(19) United States
(12) Patent Application Publication
(10) Pub. No.: US 2011/0098183 A1
(43) Pub. Date: Apr. 28, 2011

(54) PLANTS WITH INCREASED YIELD AND/OR INCREASED TOLERANCE TO ENVIRONMENTAL STRESS (IY-BM)

(75) Inventors: Oliver Bläsing, Potsdam (DE); Oliver Thimm, Berlin (DE); Stefan Henkes, Potsdam (DE); Bruce Wesley, Raleigh, NC (US); Resham Kulkarni, Cary, NC (US); Krishna Kollipara, Cary, NC (US); Christophe Reuzeau, Tocan Saint Apre (FR)

(73) Assignee: BASF Plant Science GmbH, Ludwigshafen (DE)

(21) Appl. No.: 12/809,142

(22) PCT Filed: Dec. 19, 2008
(86) PCT No.: PCT/EP08/67960

§ 371 Date: Jun. 18, 2010

(30) Foreign Application Priority Data
Dec. 19, 2007 (EP) 07150175.3

(51) Int. Cl. A01N 57/16; A01H 5/00; A01H 1/00; C07H 21/00; C07K 16/16; C07K 16/18; C12N 15/82; C12P 21/00; C07K 14/00; C07K 2/00; C07K 14/415; C07K 16/00; C12N 5/10; G01N 33/53; A01P 21/00

(52) U.S. Cl. 504/196; 800/295; 800/278; 536/23.2; 536/23.1; 536/23.6; 435/320.1; 435/69.1; 530/300; 530/350; 530/370; 530/389.1; 435/419; 800/298; 800/320.1; 800/320.3; 800/320.2; 800/320; 800/312; 800/314; 800/306; 800/317.1; 800/322; 800/317.4; 435/7.2

(57) ABSTRACT

This invention relates generally to plant cells and/or plants with increased tolerance to environmental stress and/or increased yield as compared to a corresponding, e.g. non-transformed, wild type plant cell by increasing or generating one or more activities of polypeptides associated with abiotic stress responses and abiotic stress tolerance in plants. In particular, this invention relates to plant cells and/or plants tailored to grow under conditions of environmental stress, and/or to plant cells and/or plant showing increased yield under environmental stress conditions. The invention also deals with methods of producing and screening for and breeding such plant cells and/or plants.

[0001] This invention relates generally to plant cells and/or plants with increased tolerance to environmental stress and/or increased yield as compared to a corresponding, e.g. non-transformed, wild type plant cell by increasing or generating one or more activities of polypeptides associated with abiotic stress responses and abiotic stress tolerance in plants. In particular, this invention relates to plant cells and/or plants tailored to grow under conditions of environmental stress, and/or to plant cells and/or plants showing increased yield under environmental stress conditions. The invention also deals with methods of producing and screening for and breeding such plant cells and/or plants.

[0002] The present invention disclosed herein provides a method for producing a plant with increased yield as compared to a corresponding wild type plant comprising increasing or generating one or more activities in a plant or a part thereof. The present invention further relates to nucleic acids enhancing or improving one or more traits of a transgenic plant, and cells, progenies, seeds and pollen derived from such plants or parts, as well as methods of making and methods of using such plant cell(s) or plant(s), progenies, seed(s) or pollen. Particularly, said improved trait(s) are manifested in an increased yield, preferably by improving one or more yield-related trait(s).

[0003] Under field conditions, plant performance, for example in terms of growth, development, biomass accumulation and seed generation, depends on a plant's tolerance and acclimation ability to numerous environmental conditions, changes and stresses. Since the beginning of agriculture and horticulture, there was a need for improving plant traits in crop cultivation. Breeding strategies foster crop properties to withstand biotic and abiotic stresses, to improve nutrient use efficiency and to alter other intrinsic crop specific yield parameters, i.e. increasing yield by applying technical advances. Plants are sessile organisms and consequently need to cope with various environmental stresses. Biotic stresses such as plant pests and pathogens on the one hand, and abiotic environmental stresses on the other hand are major limiting factors for plant growth and productivity (Boyer, Plant Productivity and Environment, Science 218, 443-448 (1982); Bohnert et al., Adaptations to Environmental Stresses, Plant Cell 7(7), 1099-1111 (1995)), thereby limiting plant cultivation and geographical distribution. Plants exposed to different stresses typically have low yields of plant material, like seeds, fruit or other produces. Crop losses and crop yield losses caused by abiotic and biotic stresses represent a significant economic and political factor and contribute to food shortages, particularly in many underdeveloped countries.

[0004] Conventional means for crop and horticultural improvements today utilize selective breeding techniques to identify plants with desirable characteristics. Advances in molecular biology have allowed to modify the germplasm of plants in a specific way. For example, the modification of a single gene, resulted in several cases in a significant increase in e.g. stress tolerance (Wang et al., 2003) as well as other yield-related traits. There is a need to identify genes which confer resistance to various combinations of stresses or which confer improved yield under suboptimal growth conditions. There is still a need to identify genes which confer the overall capacity to improve yield of plants.

[0005] Further, population increases and climate change have brought the possibility of global food, feed, and fuel shortages into sharp focus in recent years. Agriculture consumes 70% of water used by people, at a time when rainfall in many parts of the world is declining. In addition, as land use shifts from farms to cities and suburbs, fewer hectares of arable land are available to grow agricultural crops. Agricultural biotechnology has attempted to meet humanity's growing needs through genetic modifications of plants that could increase crop yield, for example, by conferring better tolerance to abiotic stress responses or by increasing biomass.

[0006] Agricultural biotechnologists have used assays in model plant systems, greenhouse studies of crop plants, and field trials in their efforts to develop transgenic plants that exhibit increased yield, either through increases in abiotic stress tolerance or through increased biomass.

[0007] Agricultural biotechnologists also use measurements of other parameters that indicate the potential impact of a transgene on crop yield. For forage crops like alfalfa, silage corn, and hay, the plant biomass correlates with the total yield. For grain crops, however, other parameters have been used to estimate yield, such as plant size, as measured by total plant dry weight, above-ground dry weight, above-ground fresh weight, leaf area, stem volume, plant height, rosette diameter, leaf length, root length, root mass, tiller number, and leaf number. Plant size at an early developmental stage will typically correlate with plant size later in development. A larger plant with a greater leaf area can typically absorb more light and carbon dioxide than a smaller plant and therefore will likely gain a greater weight during the same period. There is a strong genetic component to plant size and growth rate, and so for a range of diverse genotypes plant size under one environmental condition is likely to correlate with size under another. In this way a standard environment is used to approximate the diverse and dynamic environments encountered at different locations and times by crops in the field.

[0008] Some genes that are involved in stress responses, water use, and/or biomass in plants have been characterized, but to date, success at developing transgenic crop plants with improved yield has been limited, and no such plants have been commercialized. There is a need, therefore, to identify additional genes that have the capacity to increase yield of crop plants.

[0009] Accordingly, in a first embodiment, the present invention provides a method for producing a plant with increased yield as compared to a corresponding wild type plant comprising at least the following step: increasing or generating in a plant one or more activities (in the following referred to as one or more “activities” or one or more of said activities or for one selected activity as “said activity”) selected from the group consisting of 30S ribosomal protein S11, 60S ribosomal protein, Adaptin medium chain homolog APM2, B0252-protein, BRICK1-like protein, Cav1 protein, Chloroplast chaperonin, DNA polymerase, flagellar protein, G2/mitotic-specific cyclin, GRE1-protein(Hydrophilin), Membrane protein, ORF YPL249c-a, RNA polymerase II holoenzyme cyclin-like subunit, Serine/threonine-protein kinase, Short chain dehydrogenase, Sterol-C-methyltransferase, transcription regulator (farR), Ykr015c-protein, and YPL167C_{—}2-protein.

[0010] Accordingly, in a further embodiment, the invention provides a transgenic plant that over-expresses an isolated polynucleotide identified in Table I in the sub-cellular compartment and tissue indicated herein. The transgenic plant of the invention demonstrates an improved yield or increased yield as compared to a wild type variety of the plant. The terms “improved yield” or “increased yield” can be used interchangeable.

[0011] The term “yield” as used herein generally refers to a measurable produce from a plant, particularly a crop. Yield and yield increase (in comparison to a non-transformed starting or wild-type plant) can be measured in a number of ways, and it is understood that a skilled person will be able to apply the correct meaning in view of the particular embodiments, the particular crop concerned and the specific purpose or application concerned.

[0012] As used herein, the term “improved yield” or the term “increased yield” means any improvement in the yield of any measured plant product, such as grain, fruit or fiber. In accordance with the invention, changes in different phenotypic traits may improve yield. For example, and without limitation, parameters such as floral organ development, root initiation, root biomass, seed number, seed weight, harvest index, tolerance to abiotic environmental stress, leaf formation, phototropism, apical dominance, and fruit development, are suitable measurements of improved yield. Any increase in yield is an improved yield in accordance with the invention. For example, the improvement in yield can comprise a 0.1%, 0.5%, 1%, 3%, 5%, 10%, 15%, 20%, 30%, 40%, 50%, 60%, 70%, 80%, 90% or greater increase in any measured parameter. For example, an increase in the bu/acre yield of soybeans or corn derived from a crop comprising plants which are transgenic for the nucleotides and polypeptides of Table I, as compared with the bu/acre yield from untreated soybeans or corn cultivated under the same conditions, is an improved yield in accordance with the invention. The increased or improved yield can be achieved in the absence or presence of stress conditions.

[0013] For the purposes of the description of the present invention, enhanced or increased “yield” refers to one or more yield parameters selected from the group consisting of biomass yield, dry biomass yield, aerial dry biomass yield, underground dry biomass yield, fresh-weight biomass yield, aerial fresh-weight biomass yield, underground fresh-weight biomass yield; enhanced yield of harvestable parts, either dry or fresh-weight or both, either aerial or underground or both; enhanced yield of crop fruit, either dry or fresh-weight or both, either aerial or underground or both; and preferably enhanced yield of seeds, either dry or fresh-weight or both, either aerial or underground or both. The term “yield” as used herein generally refers to a measurable produce from a plant, particularly a crop. For example, the present invention provides methods for producing transgenic plant cells or plants with can show an increased yield-related trait, e.g. an increased tolerance to environmental stress and/or increased intrinsic yield and/or biomass production as compared to a corresponding (e.g. non-transformed) wild type or starting plant by increasing or generating one or more of said activities mentioned above.

[0014] In one embodiment, an increase in yield refers to increased or improved crop yield or harvestable yield, biomass yield and/or an increased seed yield.

[0015] Crop yield is defined herein as the number of bushels of relevant agricultural product (such as grain, forage, or seed) harvested per acre. Crop yield is impacted by abiotic stresses, such as drought, heat, salinity, and cold stress, and by the size (biomass) of the plant. Traditional plant breeding strategies are relatively slow and have in general not been successful in conferring increased tolerance to abiotic stresses. Grain yield improvements by conventional breeding have nearly reached a plateau in maize.

[0016] Accordingly, in one embodiment, “Yield” as described herein refers to harvestable yield of a plant. The yield of a plant can depend on the specific plant/crop of interest as well as its intended application (such as food production, feed production, processed food production, bio-fuel, biogas or alcohol production, or the like) of interest in each particular case. Thus, in one embodiment, yield is calculated as harvest index (expressed as a ratio of the weight of the respective harvestable parts divided by the total biomass), harvestable parts weight per area (acre, square meter, or the like); and the like. The harvest index, i.e., the ratio of yield biomass to the total cumulative biomass at harvest, in maize has remained essentially unchanged during selective breeding for grain yield over the last hundred years. Accordingly, recent yield improvements that have occurred in maize are the result of the increased total biomass production per unit land area. This increased total biomass has been achieved by increasing planting density, which has led to adaptive phenotypic alterations, such as a reduction in leaf angle, which may reduce shading of lower leaves, and tassel size, which may increase harvest index. Harvest index is relatively stable under many environmental conditions, and so a robust correlation between plant size and grain yield is possible. Plant size and grain yield are intrinsically linked, because the majority of grain biomass is dependent on current or stored photosynthetic productivity by the leaves and stem of the plant. As with abiotic stress tolerance, measurements of plant size in early development, under standardized conditions in a growth chamber or greenhouse, are standard practices to measure potential yield advantages conferred by the presence of a transgene.

[0017] In one embodiment, “yield” refers to biomass yield, e.g. to dry weight biomass yield and/or fresh-weight biomass yield. Biomass yield refers to the aerial or underground parts of a plant, depending on the specific circumstances (test conditions, specific crop of interest, application of interest, and the like). In one embodiment, biomass yield refers to the aerial and underground parts. Biomass yield may be calculated as fresh-weight, dry weight or a moisture adjusted basis. Biomass yield may be calculated on a per plant basis or in relation to a specific area (e.g. biomass yield per acre/square meter/or the like).

[0018] In other embodiment, “yield” refers to seed yield which can be measured by one or more of the following parameters: number of seeds or number of filled seeds (per plant or per area (acre/square meter/or the like)); seed filling rate (ratio between number of filled seeds and total number of seeds); number of flowers per plant; seed biomass or total seeds weight (per plant or per area (acre/square meter/or the like); thousand kernel weight (TKW; extrapolated from the number of filled seeds counted and their total weight; an increase in TKW may be caused by an increased seed size, an increased seed weight, an increased embryo size, and/or an increased endosperm). Other parameters allowing to measure seed yield are also known in the art. Seed yield may be determined on a dry weight or on a fresh weight basis, or typically on a moisture adjusted basis, e.g. at 15.5 percent moisture.

[0019] In one embodiment, the term “increased yield” means that the photosynthetic active organism, especially a plant, exhibits an increased growth rate, under conditions of abiotic environmental stress, compared to the corresponding wild-type photosynthetic active organism.

[0020] An increased growth rate may be reflected inter alia by or confers an increased biomass production of the whole plant, or an increased biomass production of the aerial parts of a plant, or by an increased biomass production of the underground parts of a plant, or by an increased biomass production of parts of a plant, like stems, leaves, blossoms, fruits, and/or seeds.

[0021] In an embodiment thereof, increased yield includes higher fruit yields, higher seed yields, higher fresh matter production, and/or higher dry matter production.

[0022] In another embodiment thereof, the term “increased yield” means that the photosynthetic active organism, preferably plant, exhibits an prolonged growth under conditions of abiotic environmental stress, as compared to the corresponding, e.g. non-transformed, wild type photosynthetic active organism. A prolonged growth comprises survival and/or continued growth of the photosynthetic active organism, preferably plant, at the moment when the non-transformed wild type photosynthetic active organism shows visual symptoms of deficiency and/or death.

[0023] For example, in one embodiment, the plant used in the method of the invention is a corn plant. Increased yield for corn plants means in one embodiment, increased seed yield, in particular for corn varieties used for feed or food. Increased seed yield of corn refers in one embodiment to an increased kernel size or weight, an increased kernel per pod, or increased pods per plant. Further, in one embodiment, the cob yield is increased, this is particularly useful for corn plant varieties used for feeding. Further, for example, the length or size of the cob is increased. In one embodiment, increased yield for a corn plant relates to an improved cob to kernel ratio.

[0024] For example, in one embodiment, the plant used in the method of the invention is a soy plant. Increased yield for soy plants means in one embodiment, increased seed yield, in particular for soy varieties used for feed or food. Increased seed yield of soy refers in one embodiment to an increased kernel size or weight, an increased kernel per pod, or increased pods per plant.

[0025] For example, in one embodiment, the plant used in the method of the invention is an oil seed rape (OSR) plant. Increased yield for OSR plants means in one embodiment, increased seed yield, in particular for OSR varieties used for feed or food. Increased seed yield of OSR refers in one embodiment to an increased kernel size or weight, an increased kernel per pod, or increased pods per plant.

[0026] For example, in one embodiment, the plant used in the method of the invention is a cotton plant. Increased yield for cotton plants means in one embodiment, increased lint yield. Increased cotton yield of cotton refers in one embodiment to an increased length of lint. Increased seed yield of corn refers in one embodiment to an increased kernel size or weight, an increased kernel per pod, or increased pods per plant.

[0027] Said increased yield in accordance with the present invention can typically be achieved by enhancing or improving, in comparison to an origin or wild-type plant, one or more yield-related traits of the plant. Such yield-related traits of a plant the improvement of which results in increased yield comprise, without limitation, the increase of the intrinsic yield capacity of a plant, improved nutrient use efficiency, and/or increased stress tolerance, in particular increased abiotic stress tolerance.

[0028] Accordingly yield can be increased by improving one or more of the yield-related traits as defined herein:

[0029] Accordingly, the yield-related trait conferring an increase of the plant's yield is an increase of the intrinsic yield capacity of a plant and can be, for example, manifested by improving the specific (intrinsic) seed yield (e.g. in terms of increased seed/grain size, increased ear number, increased seed number per ear, improvement of seed filling, improvement of seed composition, embryo and/or endosperm improvements, or the like); modification and improvement of inherent growth and development mechanisms of a plant (such as plant height, plant growth rate, pod number, pod position on the plant, number of internodes, incidence of pod shatter, efficiency of nodulation and nitrogen fixation, efficiency of carbon assimilation, improvement of seedling vigour/early vigour, enhanced efficiency of germination (under stressed or non-stressed conditions), improvement in plant architecture, cell cycle modifications, photosynthesis modifications, various signaling pathway modifications, modification of transcriptional regulation, modification of translational regulation, modification of enzyme activities, and the like); and/or the like.

[0030] Accordingly, the yield-related trait conferring an increase of the plant's yield is an improvement or increase of stress tolerance of a plant and can be for example manifested by improving or increasing a plant's tolerance against stress, particularly abiotic stress. In the present application, abiotic stress refers generally to abiotic environmental conditions a plant is typically confronted with, including conditions which are typically referred to as “abiotic stress” conditions including, but not limited to, drought (tolerance to drought may be achieved as a result of improved water use efficiency), heat, low temperatures and cold conditions (such as freezing and chilling conditions), salinity, osmotic stress, shade, high plant density, mechanical stress, oxidative stress, and the like.

[0031] Accordingly, an increased plant yield is mediated by increasing the “nutrient use efficiency of a plant”, e.g. by improving the use efficiency of nutrients including, but not limited to, phosphorus, potassium, and nitrogen. For example, there is a need for plants that are capable to use nitrogen more efficiently so that less nitrogen is required for growth and therefore resulting in the improved level of yield under nitrogen deficiency conditions. Further, higher yields may be obtained with current or standard levels of nitrogen use. Accordingly, in one embodiment of the present invention, plant yield is increased by increasing nitrogen use efficiency of a plant or a part thereof. Because of the high costs of nitrogen fertilizer in relation to the revenues for agricultural products, and additionally its deleterious effect on the environment, it is desirable to develop strategies to reduce nitrogen input and/or to optimize nitrogen uptake and/or utilization of a given nitrogen availability while simultaneously maintaining optimal yield, productivity and quality of plants, preferably cultivated plants, e.g. crops. Also it is desirable to maintain the yield of crops with lower fertilizer input and/or higher yield on soils of similar or even poorer quality.

[0032] Enhanced nitrogen use efficiency of the plant can for example be determined and quantified according to the following method: Transformed plants are grown in pots in a growth chamber (Svalöf Weibull, Svalöv, Sweden). In case the plants are Arabidopsis thaliana seeds thereof are sown in pots containing a 1:1 (v:v) mixture of nutrient depleted soil (“Einheitserde Typ 0”, 30% clay, Tantau, Wansdorf Germany) and sand. Germination is induced by a four day period at 4° C., in the dark. Subsequently the plants are grown under standard growth conditions. In case the plants are Arabidopsis thaliana, the standard growth conditions are: photoperiod of 16 h light and 8 h dark, 20° C., 60% relative humidity, and a photon flux density of 200 μE. In case the plants are Arabidopsis thaliana they are watered every second day with a N-depleted nutrient solution. After 9 to 10 days the plants are individualized. After a total time of 29 to 31 days the plants are harvested and rated by the fresh weight of the aerial parts of the plants, preferably the rosettes.

[0033] The increased yield can be determined according to the method described in the examples, e.g.: (a) measuring the nitrogen content in the soil, and (b) determining, whether the nitrogen-content in the soil is optimal or suboptimal for the growth of an origin or wild type plant, e.g. a crop, and (c1) growing the plant of the invention in said soil, if the nitrogen-content is suboptimal for the growth of the origin or wild type plant, or (c2) growing the plant of the invention in the soil and comparing the yield with the yield of a standard, an origin or a wild type plant, selecting and growing the plant, which shows the highest yield, if the nitrogen-content is optimal for the origin or wild type plant.

[0034] Plant yield is increased by increasing the plant's stress tolerance(s). Generally, the term “increased tolerance to stress” can be defined as survival of plants, and/or higher yield production, under stress conditions as compared to a non-transformed wild type or starting plant. For example, the plant of the invention or produced according to the method of the invention is better adapted to the stress conditions. “Improved adaptation” to environmental stress like e.g. draught, heat, nutrient depletion, freezing and/or chilling temperatures refers herein to an improved plant performance resulting in an increased yield, particularly with regard to one or more of the yield related traits as defined in more detail above.

[0035] During its life-cycle, a plant is generally confronted with a diversity of environmental conditions. Any such conditions, which may, under certain circumstances, have an impact on plant yield, are herein referred to as “stress” condition. Environmental stresses may generally be divided into biotic and abiotic (environmental) stresses. Unfavorable nutrient conditions are sometimes also referred to as “environmental stress”. The present invention does also contemplate solutions for this kind of environmental stress, e.g. referring to increased nutrient use efficiency.

[0036] Plant yield can be further increased by increasing the abiotic stress tolerance(s) of a plant or a part thereof.

[0037] For the purposes of the description of the present invention, the terms “enhanced tolerance to abiotic stress”, “enhanced resistance to abiotic environmental stress”, “enhanced tolerance to environmental stress”, “improved adaptation to environmental stress” and other variations and expressions similar in its meaning are used interchangeably and refer, without limitation, to an improvement in tolerance to one or more abiotic environmental stress(es) as described herein and as compared to a corresponding origin or wild type plant or a part thereof.

[0038] The term abiotic stress tolerance(s) refers for example low temperature tolerance, drought tolerance or improved water use efficiency (WUE), heat tolerance, salt stress tolerance and others. Studies of a plant's response to desiccation, osmotic shock, and temperature extremes are also employed to determine the plant's tolerance or resistance to abiotic stresses.

[0039] Stress tolerance in plants like low temperature, drought, heat and salt stress tolerance can have a common theme important for plant growth, namely the availability of water. Plants are typically exposed during their life cycle to conditions of reduced environmental water content. The protection strategies are similar to those of chilling tolerance.

[0040] Accordingly, said yield-related trait relates to an increased water use efficiency of the plant of the invention and/or an increased tolerance to drought conditions of the plant of the invention. Water use efficiency (WUE) is a parameter often correlated with drought tolerance. An increase in biomass at low water availability may be due to relatively improved efficiency of growth or reduced water consumption. In selecting traits for improving crops, a decrease in water use, without a change in growth would have particular merit in an irrigated agricultural system where the water input costs were high. An increase in growth without a corresponding jump in water use would have applicability to all agricultural systems. In many agricultural systems where water supply is not limiting, an increase in growth, even if it came at the expense of an increase in water use also increases yield.

[0041] When soil water is depleted or if water is not available during periods of drought, crop yields are restricted. Plant water deficit develops if transpiration from leaves exceeds the supply of water from the roots. The available water supply is related to the amount of water held in the soil and the ability of the plant to reach that water with its root system. Transpiration of water from leaves is linked to the fixation of carbon dioxide by photosynthesis through the stomata. The two processes are positively correlated so that high carbon dioxide influx through photosynthesis is closely linked to water loss by transpiration. As water transpires from the leaf, leaf water potential is reduced and the stomata tend to close in a hydraulic process limiting the amount of photosynthesis. Since crop yield is dependent on the fixation of carbon dioxide in photosynthesis, water uptake and transpiration are contributing factors to crop yield. Plants which are able to use less water to fix the same amount of carbon dioxide or which are able to function normally at a lower water potential have the potential to conduct more photosynthesis and thereby to produce more biomass and economic yield in many agricultural systems.

[0042] Drought stress means any environmental stress which leads to a lack of water in plants or reduction of water supply to plants, including a secondary stress by low temperature and/or salt, and/or a primary stress during drought or heat, e.g. desiccation etc.

[0043] Increased tolerance to drought conditions can for example be determined and quantified according to the following method. E.g., transformed plants are grown individually in pots in a growth chamber (York Industriekälte GmbH, Mannheim, Germany). Germination is induced. In case the plants are Arabidopsis thaliana sown seeds are kept at 4° C., in the dark, for 3 days in order to induce germination. Subsequently conditions are changed for 3 days to 20° C./6° C. day/night temperature with a 16/8 h day-night cycle at 150 μE/m2s. Subsequently the plants are grown under standard growth conditions. In case the plants are Arabidopsis thaliana, the standard growth conditions are: photoperiod of 16 h light and 8 h dark, 20° C., 60% relative humidity, and a photon flux density of 200 μE. Plants are grown and cultured until they develop leaves. In case the plants are Arabidopsis thaliana they are watered daily until they were approximately 3 weeks old. Starting at that time drought was imposed by withholding water. After the non-transformed wild type plants show visual symptoms of injury, the evaluation starts and plants are scored for symptoms of drought symptoms and biomass production comparison to wild type and neighboring plants for 5-6 days in succession.

[0044] In a further embodiment, the tolerance to drought, e.g. the tolerance to cycling drought is determined according to the method described in the examples. The tolerance to drought can be a tolerance to cycling drought. Accordingly, a method for increasing the yield can comprise the following steps: (a) determining, whether the water supply in the area for planting is optimal or suboptimal for the growth of an origin or wild type plant, e.g. a crop, and/or determining the visual symptoms of injury of plants growing in the area for planting; and (b1) growing the plant of the invention in said soil, if the water supply is suboptimal for the growth of an origin or wild type plant or visual symptoms for drought can be found at a standard, origin or wild type plant growing in the area; or (b2) growing the plant of the invention in the soil and comparing the yield with the yield of a standard, an origin or a wild type plant and selecting and growing the plant, which shows the highest yield, if the water supply is optimal for the origin or wild type plant.

[0045] Visual symptoms of injury for example state for one or any combination of two, three or more of the following features: (a) wilting; (b) leaf browning; (c) loss of turgor, which results in drooping of leaves or needles stems, and flowers, (d) drooping and/or shedding of leaves or needles, (e) the leaves are green but leaf angled slightly toward the ground compared with controls, (f) leaf blades begun to fold (curl) inward, (g) premature senescence of leaves or needles, (h) loss of chlorophyll in leaves or needles and/or yellowing.

[0046] Said yield-related trait of the plant of the invention can be an increased tolerance to heat conditions of said plant.

[0047] Said yield-related trait of the plant of the invention can be an increased low temperature tolerance of said plant, e.g. comprising freezing tolerance and/or chilling tolerance. Low temperatures impinge on a plethora of biological processes. They retard or inhibit almost all metabolic and cellular processes The response of plants to low temperature is an important determinant of their ecological range. The problem of coping with low temperatures is exacerbated by the need to prolong the growing season beyond the short summer found at high latitudes or altitudes. Most plants have evolved adaptive strategies to protect themselves against low temperatures. Generally, adaptation to low temperature may be divided into chilling tolerance, and freezing tolerance.

[0048] Chilling tolerance is naturally found in species from temperate or boreal zones and allows survival and an enhanced growth at low but non-freezing temperatures. Species from tropical or subtropical zones are chilling sensitive and often show wilting, chlorosis or necrosis, slowed growth and even death at temperatures around 10° C. during one or more stages of development. Accordingly, improved or enhanced “chilling tolerance” or variations thereof refers herein to improved adaptation to low but non-freezing temperatures around 10° C., preferably temperatures between 1 to 18° C., more preferably 4-14° C., and most preferred 8 to 12° C.; hereinafter called “chilling temperature”.

[0049] Freezing tolerance allows survival at near zero to particularly subzero temperatures. It is believed to be promoted by a process termed cold-acclimation which occurs at low but non-freezing temperatures and provides increased freezing tolerance at subzero temperatures. In addition, most species from temperate regions have life cycles that are adapted to seasonal changes of the temperature. For those plants, low temperatures may also play an important role in plant development through the process of stratification and vernalisation. It becomes obvious that a clear-cut distinction between or definition of chilling tolerance and freezing tolerance is difficult and that the processes may be overlapping or interconnected. Improved or enhanced “freezing tolerance” or variations thereof refers herein to improved adaptation to temperatures near or below zero, namely preferably temperatures below 4° C., more preferably below 3 or 2° C., and particularly preferred at or below 0 (zero)° C. or below −4° C., or even extremely low temperatures down to −10° C. or lower; hereinafter called “freezing temperature.

[0050] Accordingly, the plant may show an early seedling growth after exposure to low temperatures to an chilling-sensitive wild type or origin, improving in a further embodiment seed germination rates. The process of seed germination strongly depends on environmental temperature and the properties of the seeds determine the level of activity and performance during germination and seedling emergence when being exposed to low temperature. The method of the invention further provides in one embodiment a plant which show under chilling condition an reduced delay of leaf development. In one embodiment the method of the invention relates to a production of a tolerant major crop, e.g. corn (maize), bean, rice, soy bean, cotton, tomato, banana, cucumber or potato because most major crops are chilling-sensitive.

[0051] Enhanced tolerance to low temperature may, for example, be determined according to the following method: Transformed plants are grown in pots in a growth chamber (e.g. York, Mannheim, Germany). In case the plants are Arabidopsis thaliana seeds thereof are sown in pots containing a 3.5:1 (v:v) mixture of nutrient rich soil (GS90, Tantau, Wansdorf, Germany) and sand. Plants are grown under standard growth conditions. In case the plants are Arabidopsis thaliana, the standard growth conditions are: photoperiod of 16 h light and 8 h dark, 20° C., 60% relative humidity, and a photon flux density of 200 μmol/m2s. Plants are grown and cultured. In case the plants are Arabidopsis thaliana they are watered every second day. After 9 to 10 days the plants are individualized. Cold (e.g. chilling at 11-12° C.) is applied 14 days after sowing until the end of the experiment. After a total growth period of 29 to 31 days the plants are harvested and rated by the fresh weight of the aerial parts of the plants, in the case of Arabidopsis preferably the rosettes.

[0052] Accordingly, a method for increasing yield may comprise the following steps: (a) determining, whether the temperature in the area for planting is optimal or suboptimal for the growth of an origin or wild type plant, e.g. a crop; and (b1) growing the plant of the invention in said soil; if the temperature is suboptimal low for the growth of an origin or wild type plant growing in the area; or (b2) growing the plant of the invention in the soil and comparing the yield with the yield of a standard, an origin or a wild type plant and selecting and growing the plant, which shows the highest yield, if the temperature is optimal for the origin or wild type plant.

[0053] Yield-related trait may also be increased salinity tolerance (salt tolerance), tolerance to osmotic stress, increased shade tolerance, increased tolerance to a high plant density, increased tolerance to mechanical stresses, and/or increased tolerance to oxidative stress.

[0054] The term “enhanced tolerance to abiotic environmental stress” in a photosynthetic active organism can also mean that the photosynthetic active organism, preferably a plant, when confronted with abiotic environmental stress conditions exhibits an enhanced dry biomass yield as compared to a corresponding, e.g. non-transformed, wild type photosynthetic active organism like a plant.

[0055] For example, the term “enhanced tolerance to abiotic environmental stress” in a photosynthetic active organism means that the photosynthetic active organism, preferably a plant, when confronted with abiotic environmental stress conditions exhibits an enhanced aerial dry biomass yield as compared to a corresponding, e.g. non-transformed, wild type photosynthetic active organism.

[0056] For example, the term “enhanced tolerance to abiotic environmental stress” in a photosynthetic active organism means that the photosynthetic active organism, preferably a plant, when confronted with abiotic environmental stress conditions exhibits an enhanced underground dry biomass yield as compared to a corresponding, e.g. non-transformed, wild type photosynthetic active organism.

[0057] For example, the term “enhanced tolerance to abiotic environmental stress” in a photosynthetic active organism means that the photosynthetic active organism, preferably a plant, when confronted with abiotic environmental stress conditions exhibits an enhanced fresh weight biomass yield as compared to a corresponding, e.g. non-transformed, wild type photosynthetic active organism.

[0058] For example, the term “enhanced tolerance to abiotic environmental stress” in a photosynthetic active organism means that the photosynthetic active organism, preferably a plant, when confronted with abiotic environmental stress conditions exhibits an enhanced aerial fresh weight biomass yield as compared to a corresponding, e.g. non-transformed, wild type photosynthetic active organism.

[0059] For example, the term “enhanced tolerance to abiotic environmental stress” in a photosynthetic active organism means that the photosynthetic active organism, preferably a plant, when confronted with abiotic environmental stress conditions exhibits an enhanced underground fresh weight biomass yield as compared to a corresponding, e.g. non-transformed, wild type photosynthetic active organism.

[0060] In another embodiment thereof, the term “enhanced tolerance to abiotic environmental stress” in a photosynthetic active organism means that the photosynthetic active organism, preferably a plant, when confronted with abiotic environmental stress conditions exhibits an enhanced yield of harvestable parts of a plant as compared to a corresponding, e.g. non-transformed, wild type photosynthetic active organism.

[0061] For example, the term “enhanced tolerance to abiotic environmental stress” in a photosynthetic active organism means that the photosynthetic active organism, preferably a plant, when confronted with abiotic environmental stress conditions exhibits an enhanced yield of dry harvestable parts of a plant as compared to a corresponding, e.g. non-transformed, wild type photosynthetic active organism.

[0062] For example, the term “enhanced tolerance to abiotic environmental stress” in a photosynthetic active organism means that the photosynthetic active organism, preferably a plant, when confronted with abiotic environmental stress conditions exhibits an enhanced yield of dry aerial harvestable parts of a plant as compared to a corresponding, e.g. non-transformed, wild type photosynthetic active organism.

[0063] For example, the term “enhanced tolerance to abiotic environmental stress” in a photosynthetic active organism means that the photosynthetic active organism, preferably a plant, when confronted with abiotic environmental stress conditions exhibits an enhanced yield of underground dry harvestable parts of a plant as compared to a corresponding, e.g. non-transformed, wild type photosynthetic active organism.

[0064] For example, the term “enhanced tolerance to abiotic environmental stress” in a photosynthetic active organism means that the photosynthetic active organism, preferably a plant, when confronted with abiotic environmental stress conditions exhibits an enhanced yield of fresh weight harvestable parts of a plant as compared to a corresponding, e.g. non-transformed, wild type photosynthetic active organism.

[0065] For example, the term “enhanced tolerance to abiotic environmental stress” in a photosynthetic active organism means that the photosynthetic active organism, preferably a plant, when confronted with abiotic environmental stress conditions an enhanced yield of aerial fresh weight harvestable parts of a plant as compared to a corresponding, e.g. non-transformed, wild type photosynthetic active organism.

[0066] For example, the term “enhanced tolerance to abiotic environmental stress” in a photosynthetic active organism means that the photosynthetic active organism, preferably a plant, when confronted with abiotic environmental stress conditions exhibits an enhanced yield of underground fresh weight harvestable parts of a plant as compared to a corresponding, e.g. non-transformed, wild type photosynthetic active organism.

[0067] For example, the term “enhanced tolerance to abiotic environmental stress” in a photosynthetic active organism means that the photosynthetic active organism, preferably a plant, when confronted with abiotic environmental stress conditions exhibits an enhanced yield of the crop fruit as compared to a corresponding, e.g. non-transformed, wild type photosynthetic active organism.

[0068] For example, the term “enhanced tolerance to abiotic environmental stress” in a photosynthetic active organism means that the photosynthetic active organism, preferably a plant, when confronted with abiotic environmental stress conditions exhibits an enhanced yield of the fresh crop fruit as compared to a corresponding, e.g. non-transformed, wild type photosynthetic active organism.

[0069] For example, the term “enhanced tolerance to abiotic environmental stress” in a photosynthetic active organism means that the photosynthetic active organism, preferably a plant, when confronted with abiotic environmental stress conditions exhibits an enhanced yield of the dry crop fruit as compared to a corresponding, e.g. non-transformed, wild type photosynthetic active organism.

[0070] For example, the term “enhanced tolerance to abiotic environmental stress” in a photosynthetic active organism means that the photosynthetic active organism, preferably a plant, when confronted with abiotic environmental stress conditions exhibits an enhanced grain dry weight as compared to a corresponding, e.g. non-transformed, wild type photosynthetic active organism.

[0071] For example, the term “enhanced tolerance to abiotic environmental stress” in a photosynthetic active organism means that the photosynthetic active organism, preferably a plant, when confronted with abiotic environmental stress conditions exhibits an enhanced yield of seeds as compared to a corresponding, e.g. non-transformed, wild type photosynthetic active organism.

[0072] For example, the term “enhanced tolerance to abiotic environmental stress” in a photosynthetic active organism means that the photosynthetic active organism, preferably a plant, when confronted with abiotic environmental stress conditions exhibits an enhanced yield of fresh weight seeds as compared to a corresponding, e.g. non-transformed, wild type photosynthetic active organism.

[0073] For example, the term “enhanced tolerance to abiotic environmental stress” in a photosynthetic active organism means that the photosynthetic active organism, preferably a plant, when confronted with abiotic environmental stress conditions exhibits an enhanced yield of dry seeds as compared to a corresponding, e.g. non-transformed, wild type photosynthetic active organism. For example, the abiotic environmental stress conditions, the organism is confronted with can, however, be any of the abiotic environmental stresses mentioned herein.

[0074] An increased nitrogen use efficiency of the produced corn relates in one embodiment to an improved protein content of the corn seed, in particular in corn seed used as feed. Increased nitrogen use efficiency relates in another embodiment to an increased kernel size or number. A increased water use efficiency of the produced corn relates in one embodiment to an increased kernel size or number. Further, an increased tolerance to low temperature relates in one embodiment to an early vigor and allows the early planting and sowing of a corn plant produced according to the method of the present invention.

[0075] A increased nitrogen use efficiency of the produced soy plant relates in one embodiment to an improved protein content of the soy seed, in particular in soy seed used as feed. Increased nitrogen use efficiency relates in another embodiment to an increased kernel size or number. A increased water use efficiency of the produced soy plant relates in one embodiment to an increased kernel size or number. Further, an increased tolerance to low temperature relates in one embodiment to an early vigor and allows the early planting and sowing of a soy plant produced according to the method of the present invention.

[0076] A increased nitrogen use efficiency of the produced OSR plant relates in one embodiment to an improved protein content of the OSR seed, in particular in OSR seed used as feed. Increased nitrogen use efficiency relates in another embodiment to an increased kernel size or number. A increased water use efficiency of the produced OSR plant relates in one embodiment to an increased kernel size or number. Further, an increased tolerance to low temperature relates in one embodiment to an early vigor and allows the early planting and sowing of a soy plant produced according to the method of the present invention. In one embodiment, the present invention relates to a method for the production of hardy oil seed rape (OSR with winter hardness) comprising using a hardy oil seed rape plant in the above mentioned method of the invention.

[0077] A increased nitrogen use efficiency of the produced cotton plant relates in one embodiment to an improved protein content of the cotton seed, in particular in cotton seed used for feeding. Increased nitrogen use efficiency relates in another embodiment to an increased kernel size or number. A increased water use efficiency of the produced cotton plant relates in one embodiment to an increased kernel size or number. Further, an increased tolerance to low temperature relates in one embodiment to an early vigor and allows the early planting and sowing of a soy plant produced according to the method of the present invention.

[0078] Developing plants having a higher capacity of biomass and/or yield production and stress-tolerant and/or resistant plants is a strategy that has the potential to solve or mediate at least some of the existing problems (McKersie and Leshem, 1994. Stress and Stress Coping in Cultivated Plants, Kluwer Academic Publishers). However, traditional plant breeding strategies to develop new lines of plants that exhibit tolerance (tolerance) to all types of stress are relatively slow and require specific resistant lines for crossing with the desired line. Limited germplasm resources for stress tolerance and incompatibility in crosses between distantly related plant species represent significant problems encountered in conventional breeding.

[0079] Additionally, the cellular processes leading to drought, low temperature and salt tolerance are complex in nature and involve multiple mechanisms of cellular adaptation and numerous metabolic pathways (McKersie and Leshem, 1994. Stress and Stress Coping in Cultivated Plants, Kluwer Academic Publishers). This multi-component nature of stress tolerance has not only made breeding for tolerance largely unsuccessful, but has also limited the ability to genetically engineer stress tolerance plants using biotechnological methods.

[0080] For example, the overexpression of antioxidant enzymes or ROS-scavenging enzymes is one possibility to engineer tolerance, e.g. transgenic alfalfa plants expressing Mn-superoxide dismutase tend to have reduced injury after water-deficit stress (McKersie et al., 1996. Plant Physiol. 111, 1177-1181). These same transgenic plants show increased yield in field trials (McKersie et al., 1999. Plant Physiology, 119: 839-847; McKersie et al., 1996. Plant Physiol. 111, 1177-1181). Transgenic plants that overproduce osmolytes such as mannitol, fructans, proline or glycine-betaine also show increased tolerance to some forms of abiotic stress and it is proposed that the synthesized osmolytes act as ROS scavengers (Tarczynski. et al. 1993. Science 259, 508-510; Sheveleva, et al. 1997. Plant Physiol. 115, 1211-1219).

[0081] Nevertheless, the transformed and stress resistant plants cited above generally exhibit slower growth and reduced biomass, due to an imbalance in development and physiology of the plant, thus having significant fitness cost (Kasuga et al., 1999; Danby and Gehring et al., 2005). Despite maintaining basic metabolic function this leads to severe biomass and yield loss.

[0082] Sometimes the root/shoot dry weight ratio increase as plant water stress develops. The increase is mostly due to a relative reduction in shoot dry weight. The ratio of seed yield to above-ground dry weight is relatively stable under many environmental conditions and so a robust correlation between plant size and grain yield can often be obtained. These processes are intrinsically linked because the majority of grain biomass is dependent on current stored photosynthetic productivity by the leaves and stem of the plant. Therefore selecting for plant size, even at early stages of development, has been used as an indicator for future yield potential.

[0083] There is still a need to identify genes expressed plants that have the capacity to confer either increased biomass or yield production and/or stress tolerance to its host plant and to other plant species, especially to confer increased tolerance to environmental stress. It is an object of this invention to identify new methods to improve the intrinsic capacities of plants to produce higher yield and/or to confer stress tolerance in plants or plant cells. Complex traits of abiotic stress phenomena make genetic optimisation difficult. However, the modification of a single gene e.g. transcription factors or antiporters resulted in several cases in a significant increase in stress tolerance (Wang et al., 2003).

[0084] Accordingly, in one embodiment of the present invention, yield is increased by improving one or more of the yield-related traits as defined herein. Thus, the present invention provides a method for producing a transgenic plant showing an increased yield-related trait as compared to a corresponding origin or the wild type plant, by increasing or generating one or more activities (in the following “activities”) selected from the group consisting of 30S ribosomal protein S11, 60S ribosomal protein, Adaptin medium chain homolog APM2, B0252-protein, BRICK1-like protein, Cav1 protein, Chloroplast chaperonin, DNA polymerase, flagellar protein, G2/mitotic-specific cyclin, GRE1-protein(Hydrophilin), Membrane protein, ORF YPL249c-a, RNA polymerase II holoenzyme cyclin-like subunit, Serine/threonine-protein kinase, Short chain dehydrogenase, Sterol-C-methyltransferase, transcription regulator (farR), Ykr015c-protein, and YPL167C_{—}2-protein.

[0085] Accordingly, the present invention provides a method for producing a transgenic plant cell or plant with increased tolerance to environmental stress and/or increased yield or biomass production as compared to a corresponding (non-transformed) wild type or starting plant cell by increasing or generating one or more activities selected from the group consisting of: 30S ribosomal protein S11, 60S ribosomal protein, Adaptin medium chain homolog APM2, B0252-protein, BRICK1-like protein, Cav1 protein, Chloroplast chaperonin, DNA polymerase, flagellar protein, G2/mitotic-specific cyclin, GRE1-protein(Hydrophilin), Membrane protein, ORF YPL249c-a, RNA polymerase II holoenzyme cyclin-like subunit, Serine/threonine-protein kinase, Short chain dehydrogenase, Sterol-C-methyltransferase, transcription regulator (farR), Ykr015c-protein, and YPL167C_{—}2-protein.

[0086] Thus, in one embodiment, the present invention provides a method for producing a transgenic plant showing an increased yield as compared to a corresponding origin or wild type plant, by increasing or generating one or more said “activities” according to the methods disclosed below.

[0087] In one embodiment, enhanced or increased “yield” refers to one or more yield parameters selected from the group consisting of biomass yield, dry biomass yield, aerial dry biomass yield, underground dry biomass yield, freshweight biomass yield, aerial freshweight biomass yield, underground freshweight biomass yield; enhanced yield of harvestable parts, either dry or freshweight or both, either aerial or underground or both; enhanced yield of crop fruit, either dry or freshweight or both, either aerial or underground or both; and preferably enhanced yield of seeds, either dry or freshweight or both, either aerial or underground or both. The meaning of “yield” is, mainly, dependent on the crop of interest, and it is understood, that the skilled person will understand in each particular case what is meant from the circumstances of the description.

[0088] In one embodiment, the activity is increased by increasing the amount and/or activity of one or more proteins having an activity selected from the group consisting of: 30S ribosomal protein S11, 60S ribosomal protein, Adaptin medium chain homolog APM2, B0252-protein, BRICK1-like protein, Cav1 protein, Chloroplast chaperonin, DNA polymerase, flagellar protein, G2/mitotic-specific cyclin, GRE1-protein(Hydrophilin), Membrane protein, ORF YPL249c-a, RNA polymerase II holoenzyme cyclin-like subunit, Serine/threonine-protein kinase, Short chain dehydrogenase, Sterol-C-methyltransferase, transcription regulator (farR), Ykr015c-protein, and YPL167C_{—}2-protein and the polypeptides as depicted in table II, column 5 and 7.

[0089] In one embodiment, said activity is increased in one or more specific compartments of a cell and confers an increased yield, e.g. the plant shows an increased or improved said yield-related trait. For example, said activity is increased in the plastid of a cell as indicated in table I or II in column 6 and increases yield in a corresponding plant. For example the specific plastidic localization of said activity which can be derived form the disclosure of table I or II in column 6 confers an improved or increased yield-related trait as shown in table VIIIa to VIIId. Further, said activity can be increased in mitochondria of a cell and increases yield in a corresponding plant, e.g. conferring an improved or increased yield-related trait as the relevant activities indicated in table VIIIa to VIIId, if applicable.

[0090] Further, the present invention relates to method for producing a plant with increased yield as compared to a corresponding wild type plant comprising at least one of the steps selected from the group consisting of: (i) increasing or generating the activity of a polypeptide comprising a polypeptide, a consensus sequence or at least one polypeptide motif as depicted in column 5 or 7 of table II or of table IV, respectively; (ii) increasing or generating the activity of an expression product of one or more nucleic acid molecule(s) comprising one or more polynucleotide(s) as depicted in column 5 or 7 of table I, and (iii) increasing or generating the activity of a functional equivalent of (i) or (ii).

[0091] Accordingly, the increase or generation of one or more said activities is for example conferred by one or more expression products of said nucleic acid molecule, e.g. proteins. Accordingly, in the present invention described above, the increase or generation of one or more said activities is for example conferred by one or more protein(s) each comprising a polypeptide selected from the group as depicted in table II, column 5 and 7.

[0092] The method of the invention comprises in one embodiment the following steps: (i) increasing or generating of the expression of; and/or (ii) increasing or generating the expression of an expression product; and/or (iii) increasing or generating one or more activities of an expression product encoded by; at least one nucleic acid molecule (in the following “Yield Related Protein (YIP)”-encoding gene or “YIP”-gene) comprising a nucleic acid molecule selected from the group consisting of:
[0093] (a) a nucleic acid molecule encoding the polypeptide shown in column 5 or 7 of table II;
[0094] (b) a nucleic acid molecule shown in column 5 or 7 of table I;
[0095] (c) a nucleic acid molecule, which, as a result of the degeneracy of the genetic code, can be derived from a polypeptide sequence depicted in column 5 or 7 of table II and confers an increased yield as compared to a corresponding, e.g. non-transformed, wild type plant cell, a transgenic plant or a part thereof;
[0096] (d) a nucleic acid molecule having at least 30, for example 50, 60, 70, 80, 85, 90, 95, 97, 98, or 99% identity with the nucleic acid molecule sequence of a polynucleotide comprising the nucleic acid molecule shown in column 5 or 7 of table I and confers an increased yield as compared to a corresponding, e.g. non-transformed, wild type plant cell, a transgenic plant or a part thereof;
[0097] (e) a nucleic acid molecule encoding a polypeptide having at least 30, for example 50, 60, 70, 80, 85, 90, 95, 97, 98, or 99% identity with the amino acid sequence of the polypeptide encoded by the nucleic acid molecule of (a) to (c) and having the activity represented by a nucleic acid molecule comprising a polynucleotide as depicted in column 5 of table I and confers an increased yield as compared to a corresponding, e.g. non-transformed, wild type plant cell, a transgenic plant or a part thereof;
[0098] (f) a nucleic acid molecule which hybridizes with a nucleic acid molecule of (a) to (c) under stringent hybridization conditions and confers an increased yield as compared to a corresponding, e.g. non-transformed, wild type plant cell, a transgenic plant or a part thereof;
[0099] (g) a nucleic acid molecule encoding a polypeptide which can be isolated with the aid of monoclonal or polyclonal antibodies made against a polypeptide encoded by one of the nucleic acid molecules of (a) to (e) and having the activity represented by the nucleic acid molecule comprising a polynucleotide as depicted in column 5 of table I;
[0100] (h) a nucleic acid molecule encoding a polypeptide comprising the consensus sequence or one or more polypeptide motifs as shown in column 7 of table IV and preferably having the activity represented by a nucleic acid molecule comprising a polynucleotide as depicted in column 5 of table II or IV;
[0101] (i) a nucleic acid molecule encoding a polypeptide having the activity represented by a protein as depicted in column 5 of table II and conferring increased yield as compared to a corresponding, e.g. non-transformed, wild type plant cell, a transgenic plant or a part thereof;
[0102] (j) nucleic acid molecule which comprises a polynucleotide, which is obtained by amplifying a cDNA library or a genomic library using the primers in column 7 of table III and preferably having the activity represented by a nucleic acid molecule comprising a polynucleotide as depicted in column 5 of table II or IV; and
[0103] (k) a nucleic acid molecule which is obtainable by screening a suitable nucleic acid library under stringent hybridization conditions with a probe comprising a complementary sequence of a nucleic acid molecule of (a) or (b) or with a fragment thereof, having at least 15 nt, preferably 20 nt, 30 nt, 50 nt, 100 nt, 200 nt, or 500 nt, 1000 nt, 1500 nt, 2000 nt or 3000 nt of a nucleic acid molecule complementary to a nucleic acid molecule sequence characterized in (a) to (e) and encoding a polypeptide having the activity represented by a protein comprising a polypeptide as depicted in column 5 of table II.

[0104] Accordingly, the present invention provides YIP and YIP genes. Further, the present invention provides YIP and YIP genes derived from plants and other organisms in column 5 as well as in column 7 of tables I or II. Accordingly, the present invention provides YIP and YIP genes derived from plants. In particular, gene from plants are described in column 5 as well as in column 7 of tables I or II.

[0105] As used herein, the terms “environmental stress” or “abiotic environmental stress” and variations thereof are used interchangeably and refer to any abiotic suboptimal growing condition and include, without limitation, suboptimal conditions associated with low temperature, heat, oxidative stress, drought and salinity or combinations thereof.

[0106] In one embodiment of the invention the term “increased tolerance to environmental stress” relates to an increased tolerance to water stress, which is produced as a secondary stress by low temperature and/or salt, and/or as a primary stress during drought or heat.

[0107] In one embodiment of the invention the term “increased tolerance to environmental stress” relates to an increased low temperature tolerance. In one embodiment of the invention the term “increased tolerance to environmental stress” relates to an increased salt tolerance. In a preferred embodiment of the invention the term “increased tolerance to environmental stress” relates to an increased drought tolerance.

[0108] In one embodiment of the invention the term “increased tolerance to environmental stress” relates to an increased low temperature tolerance, comprising freezing tolerance and/or chilling tolerance.

[0109] In one embodiment of the invention the term “increased tolerance to environmental stress” is defined as survival of plants, and/or higher yield or biomass production, under stress conditions as compared to non-transformed wild type or starting plants.

[0110] Accordingly, it was an object of the present invention to develop a process for improving or increasing yield production of a plant, either in the absence of or under conditions of abiotic stress. Thus, it was an object of the present invention to develop a process for improving the intrinsic potential of yield or, more generally, biomass production of plants. It was a further object of the present invention to develop such process which also leads to improved yield/biomass production under conditions of environmental stress. Therefore, it was an object of the present invention to develop a process for improving or increasing yield production of a plant and to improve the plant's tolerance to conditions of environmental and particularly abiotic stresses.

[0111] It was found that one or more of these object are achieved by providing a process according to the present invention described herein.

[0112] It was further an object of the present invention to provide a plant cell with increased yield, and/or a plant with enhanced tolerance to abiotic environmental stress, and/or showing under conditions of abiotic environmental stress an increased yield, as compared to a corresponding, e.g. non-transformed, wild type or starting plant cell and/or plant.

[0113] It was found that one or more of these object are achieved by providing a process according to the present invention described herein.

[0114] In one embodiment of the present invention, these traits are achieved by a process for an enhanced tolerance to abiotic environmental stress in a photosynthetic active organism, preferably a plant, as compared to a corresponding (non-transformed) wild type or starting photosynthetic active organism.

[0115] For the purposes of the description of the present invention, the terms “enhanced tolerance to environmental stress”, “enhanced resistance to abiotic environmental stress”, “enhanced tolerance to environmental stress”, “improved adaptation to environmental stress” and variations thereof are used interchangeably and refer preferably, without limitation, to an improvement in tolerance to one or more abiotic environmental stress(es) selected from the group consisting of salt stress, heat stress, drought stress and low temperature stress, while low temperature stress refers to chilling tolerance and/or freezing tolerance of a photosynthetic active organism as compared to a corresponding (non-transformed) wild type (or starting) photosynthetic active organism.

[0116] “Improved adaptation” or “enhanced tolerance” to environmental stress like refers to an improved plant performance, while improved plant performance may also be achieved by improving the intrinsic plant properties resulting to an increase in yield and/or biomass production.

[0117] In one embodiment, the present invention refers to a process of developing or obtaining a plant or plant cell that exhibits increased yield, a plant or plant cell that exhibits enhanced tolerance to environmental stress, or a plant or plant cell that exhibits increased yield in the presence of abiotic environmental stress conditions, as compared to a corresponding, e.g. non-transformed, wild type plant. This is generally referred to as a “method for producing a transgenic plant or plant cell with increased yield, e.g an improved yield-related trait, e.g. enhanced tolerance to abiotic environmental stress and/or increased yield like biomass”.

[0118] In another embodiment of the present invention, these traits are achieved by a process for increased yield in the presence and/or absence of environmental stress, particularly abiotic environmental stress, in a photosynthetic active organism, preferably a plant, as compared to a corresponding (non-transformed) wild type or starting photosynthetic active organism.

[0119] In an embodiment thereof, the term “increased yield” means that the photosynthetic active organism, especially a plant, exhibits an increased growth rate, compared to the corresponding wild-type photosynthetic active organism. An increased growth rate may be reflected inter alia by an increased biomass production of the whole plant, or by an increased biomass production of the aerial parts of a plant, or by an increased biomass production of the underground parts of a plant, or by an increased biomass production of parts of a plant, like stems, leaves, blossoms, fruits, and/or seeds.

[0120] In an embodiment thereof, increased yield includes higher fruit yields, higher seed yields, higher fresh matter production, and/or higher dry matter production.

[0121] In another embodiment thereof, the term “increased yield” means that the photosynthetic active organism, preferably plant, exhibits a prolonged growth, as compared to the corresponding, e.g. non-transformed, wild type photosynthetic active organism. A prolonged growth comprises survival and/or continued growth of the photosynthetic active organism, preferably plant, at the moment when the non-transformed wild type photosynthetic active organism shows visual symptoms of deficiency and/or death, confronted or in the absence of environmental stress.

[0122] More preferably, the present invention relates to a process for the production of a plant (or plant cell) exhibiting increased yield as defined above in the absence of stress conditions, as compared to the corresponding, e.g. non-transformed, wild type plant (cell).

[0123] Accordingly, in a preferred embodiment, the present invention provides a method for producing a transgenic plant cell with increased yield, e.g an improved yield-related trait, e.g. enhanced tolerance to abiotic environmental stress and/or increased yield like biomass as compared to a corresponding, e.g. non-transformed, wild type plant cell by increasing or generating one or more activities selected from the group consisting of 30S ribosomal protein S11, 60S ribosomal protein, Adaptin medium chain homolog APM2, B0252-protein, BRICK1-like protein, Cav1 protein, Chloroplast chaperonin, DNA polymerase, flagellar protein, G2/mitotic-specific cyclin, GRE1-protein(Hydrophilin), Membrane protein, ORF YPL249c-a, RNA polymerase II holoenzyme cyclin-like subunit, Serine/threonine-protein kinase, Short chain dehydrogenase, Sterol-C-methyltransferase, transcription regulator (farR), Ykr015c-protein, and YPL167C_{—}2-protein. In a preferred embodiment, the present invention provides a method for producing a transgenic plant cell with increased yield, in the absence of environmental stress, as compared to a corresponding, e.g. non-transformed, wild type plant cell, by increasing or generating one or more activities selected from the group consisting of 30S ribosomal protein S11, 60S ribosomal protein, Adaptin medium chain homolog APM2, B0252-protein, BRICK1-like protein, Cav1 protein, Chloroplast chaperonin, DNA polymerase, flagellar protein, G2/mitotic-specific cyclin, GRE1-protein(Hydrophilin), Membrane protein, ORF YPL249c-a, RNA polymerase II holoenzyme cyclin-like subunit, Serine/threonine-protein kinase, Short chain dehydrogenase, Sterol-C-methyltransferase, transcription regulator (farR), Ykr015c-protein, and YPL167C_{—}2-protein.

[0124] In one embodiment of the invention the proteins having an activity selected from the group consisting of 30S ribosomal protein S11, 60S ribosomal protein, Adaptin medium chain homolog APM2, B0252-protein, BRICK1-like protein, Cav1 protein, Chloroplast chaperonin, DNA polymerase, flagellar protein, G2/mitotic-specific cyclin, GRE1-protein(Hydrophilin), Membrane protein, ORF YPL249c-a, RNA polymerase II holoenzyme cyclin-like subunit, Serine/threonine-protein kinase, Short chain dehydrogenase, Sterol-C-methyltransferase, transcription regulator (farR), Ykr015c-protein, and YPL167C_{—}2-protein and the polypeptides as depicted in table II, column 5 and 7 are referred to as “Yield Increase Protein” (YIP).

[0125] In a preferred embodiment of the invention a photosynthetic active organism, particularly a plant, shows an enhanced tolerance to abiotic environmental stress. In another preferred embodiment a photosynthetic active organism, especially a plant, shows increased yield under conditions of abiotic environmental stress.

[0126] In another embodiment this invention fulfills the need to identify new, unique genes capable of conferring enhanced tolerance to abiotic environmental stress to photosynthetic active organism, preferably plants, upon expression or over-expression of endogenous and/or exogenous genes.

[0127] In another embodiment thereof this invention fulfills the need to identify new, unique genes capable of conferring enhanced tolerance to abiotic environmental stress to photosynthetic active organism, preferably plants, upon expression or over-expression of endogenous genes.

[0128] In another embodiment thereof this invention fulfills the need to identify new, unique genes capable of conferring enhanced tolerance to abiotic environmental stress to photosynthetic active organism, preferably plants, upon expression or over-expression of exogenous genes.

[0129] In another embodiment this invention fulfills the need to identify new, unique genes capable of conferring an increase of yield to photosynthetic active organism, preferably plants, upon expression or over-expression of endogenous and/or exogenous genes.

[0130] In another embodiment thereof this invention fulfills the need to identify new, unique genes capable of conferring an increase of yield to photosynthetic active organism, preferably plants, upon expression or over-expression of endogenous genes.

[0131] In another embodiment thereof this invention fulfills the need to identify new, unique genes capable of conferring an increase of yield to photosynthetic active organism, preferably plants, upon expression or over-expression of exogenous genes.

[0132] In another embodiment this invention fulfills the need to identify new, unique genes capable of conferring an enhanced tolerance to abiotic environmental stress in combination with an increase of yield to photosynthetic active organism, preferably plants, upon expression or over-expression of endogenous and/or exogenous genes.

[0133] In another embodiment thereof this invention fulfills the need to identify new, unique genes capable of conferring an enhanced tolerance to abiotic environmental stress in combination with an increase of yield to photosynthetic active organism, preferably plants, upon expression or over-expression of endogenous genes.

[0134] In another embodiment this invention fulfills the need to identify new, unique genes capable of conferring an enhanced tolerance to abiotic environmental stress in combination with an increase of yield to photosynthetic active organisms, preferably plants, upon expression or over-expression of exogenous genes.

[0135] Accordingly, the present invention relates to a method for producing a transgenic photosynthetic active organism or a part thereof, preferably a plant cell, a plant or a part thereof, with enhanced yield, e.g an improved yield-related trait, e.g. enhanced tolerance to abiotic environmental stress and/or increased yield like biomass as compared to a corresponding, e.g. non-transformed, wild type photosynthetic active organism or a part thereof, preferably a plant cell, a plant or a part thereof, which comprises
[0136] (a) increasing or generating one or more activities selected from the group consisting of 30S ribosomal protein S11, 60S ribosomal protein, Adaptin medium chain homolog APM2, B0252-protein, BRICK1-like protein, Cav1 protein, Chloroplast chaperonin, DNA polymerase, flagellar protein, G2/mitotic-specific cyclin, GRE1-protein(Hydrophilin), Membrane protein, ORF YPL249c-a, RNA polymerase II holoenzyme cyclin-like subunit, Serine/threonine-protein kinase, Short chain dehydrogenase, Sterol-C-methyltransferase, transcription regulator (farR), Ykr015c-protein, and YPL167C_{—}2-protein in a photosynthetic active organism or a part thereof, preferably a plant cell, a plant or a part thereof, and
[0137] (b) growing the photosynthetic active organism or a part thereof, preferably a plant cell, a plant or a part thereof under conditions which permit the development of a photosynthetic active organism or a part thereof, preferably a plant cell, a plant or a part thereof, with enhanced yield, e.g an improved yield-related trait, e.g. enhanced tolerance to abiotic environmental stress and/or increased yield like biomass as compared to a corresponding, e.g. non-transformed, wild type photosynthetic active organism or a part thereof, preferably a plant cell, a plant or a part thereof.

[0138] In an embodiment the present invention relates to a method for producing a transgenic photosynthetic active organism or a part thereof, preferably a plant cell, a plant or a part thereof with enhanced yield, e.g an improved yield-related trait, e.g. enhanced tolerance to abiotic environmental stress and/or increased yield like biomass as compared to a corresponding, e.g. non-transformed, wild type photosynthetic active organism or a part thereof, preferably a plant cell, a plant or a part thereof, which comprises
[0139] (a) increasing or generating one or more activities selected from the group consisting of: 30S ribosomal protein S11, 60S ribosomal protein, Adaptin medium chain homolog APM2, B0252-protein, BRICK1-like protein, Cav1 protein, Chloroplast chaperonin, DNA polymerase, flagellar protein, G2/mitotic-specific cyclin, GRE1-protein(Hydrophilin), Membrane protein, ORF YPL249c-a, RNA polymerase II holoenzyme cyclin-like subunit, Serine/threonine-protein kinase, Short chain dehydrogenase, Sterol-C-methyltransferase, transcription regulator (farR), Ykr015c-protein, and YPL167C_{—}2-protein in a photosynthetic active organism or a part thereof, preferably a plant cell, a plant or a part thereof,
[0140] (b) growing the photosynthetic active organism or a part thereof, preferably a plant cell, a plant or a part thereof together with non-transformed wildtype photosynthetic active organism or a part thereof, preferably a plant,
[0141] (c) under conditions of abiotic environmental stress, and
[0142] (d) selecting the photosynthetic active organism or a part thereof, preferably a plant cell, a plant or a part thereof, with enhanced yield, e.g an improved yield-related trait, e.g. enhanced tolerance to abiotic environmental stress and/or increased yield like biomass, as compared to a corresponding, e.g. non-transformed, wild type photosynthetic active organism or a part thereof, preferably a plant cell, a plant or a part thereof, after the non-transformed wild type photosynthetic active organism or a part thereof, preferably a plant cell, a plant or a part thereof, show visual symptoms of deficiency and/or death.

[0143] Enhanced yield, particularly biomass production, may, for example and preferably, be determined according to the following method:

[0144] Transformed plants are grown in pots in a growth chamber (e.g. Svalöf Weibull, Svalöv, Sweden). In case the plants are Arabidopsis thaliana seeds thereof are sown in pots containing a 3.5:1 (v:v) mixture of nutrient rich soil (GS90, Tantau, Wansdorf, Germany) and sand. Plants are grown under standard growth conditions. In case the plants are A. thaliana, the standard growth conditions are: photoperiod of 16 h light and 8 h dark, 20° C., 60% relative humidity, and a photon flux density of 200 μmol/m²s. Plants are grown and cultured. In case the plants are Arabidopsis thaliana they are watered every second day. After 9 to 10 days the plants are individualized. After a total growth period of 29 to 30 days the plants are harvested and rated by the fresh weight of the aerial parts of the plants, in the case of Arabidopsis preferably the rosettes.

[0145] In one embodiment the present invention relates to a method for producing a transgenic photosynthetic active organism or a part thereof, preferably a plant cell, a plant or a part thereof with enhanced yield, e.g an improved yield-related trait, e.g. enhanced tolerance to abiotic environmental stress and/or increased yield like biomass as compared to a corresponding, e.g. non-transformed, wild type photosynthetic active organism or a part thereof, preferably a plant cell, a plant or a part thereof, which comprises
[0146] (a) increasing or generating the activity of a protein as shown in table II, column 3 encoded by the nucleic acid sequences as shown in table I, column 5, in photosynthetic active organism or a part thereof, preferably a plant cell, a plant or a part thereof, and
[0147] (b) growing the photosynthetic active organism or a part thereof, preferably a plant cell, a plant or a part thereof under conditions which permit the development of a plant with enhanced yield, e.g an improved yield-related trait, e.g. enhanced tolerance to abiotic environmental stress and/or increased yield like biomass as compared to a corresponding, e.g. non-transformed, wild type photosynthetic active organism or a part thereof, preferably a plant.

[0148] Accordingly, the present invention relates to a method for producing a transgenic plant cell, a plant or a part thereof with enhanced yield, e.g an improved yield-related trait, e.g. enhanced tolerance to abiotic environmental stress and/or increased yield like biomass as compared to a corresponding, e.g. non-transformed, wild type plant cell, a plant or a part thereof, which comprises
[0149] (a) increasing or generating one or more activities selected from the group consisting of 30S ribosomal protein S11, 60S ribosomal protein, Adaptin medium chain homolog APM2, B0252-protein, BRICK1-like protein, Cav1 protein, Chloroplast chaperonin, DNA polymerase, flagellar protein, G2/mitotic-specific cyclin, GRE1-protein(Hydrophilin), Membrane protein, ORF YPL249c-a, RNA polymerase II holoenzyme cyclin-like subunit, Serine/threonine-protein kinase, Short chain dehydrogenase, Sterol-C-methyltransferase, transcription regulator (farR), Ykr015c-protein, and YPL167C_{—}2-protein in the plastid of a plant cell, and
[0150] (b) growing the plant cell under conditions which permit the development of a plant with enhanced yield, e.g an improved yield-related trait, e.g. enhanced tolerance to abiotic environmental stress and/or increased yield like biomass as compared to a corresponding, e.g. non-transformed, wild type plant.

[0151] In another embodiment the present invention relates to a method for producing a transgenic plant cell, a plant or a part thereof with enhanced yield, e.g an improved yield-related trait, e.g. enhanced tolerance to abiotic environmental stress and/or increased yield like biomass as compared to a corresponding, e.g. non-transformed, wild type plant cell, a plant or a part thereof, which comprises
[0152] (a) increasing or generating one or more activities selected from the group consisting of 30S ribosomal protein S11, 60S ribosomal protein, Adaptin medium chain homolog APM2, B0252-protein, BRICK1-like protein, Cav1 protein, Chloroplast chaperonin, DNA polymerase, flagellar protein, G2/mitotic-specific cyclin, GRE1-protein(Hydrophilin), Membrane protein, ORF YPL249c-a, RNA polymerase II holoenzyme cyclin-like subunit, Serine/threonine-protein kinase, Short chain dehydrogenase, Sterol-C-methyltransferase, transcription regulator (farR), Ykr015c-protein, and YPL167C_{—}2-protein in the cytoplasm of a plant cell, and
[0153] (b) growing the plant cell under conditions which permit the development of a plant with enhanced yield, e.g an improved yield-related trait, e.g. enhanced tolerance to abiotic environmental stress and/or increased yield like biomass as compared to a corresponding, e.g. non-transformed, wild type plant.

[0154] In one embodiment the present invention relates to a method for producing a transgenic plant cell, a plant or a part thereof with enhanced yield, e.g an improved yield-related trait, e.g. enhanced tolerance to abiotic environmental stress and/or increased yield like biomass as compared to a corresponding, e.g. non-transformed, wild type plant cell, a plant or a part thereof, which comprises
[0155] (a) increasing or generating the activity of a protein as shown in table II, column 3 encoded by the nucleic acid sequences as shown in table I, column 5 or 7, in the plastid of a plant cell, and
[0156] (b) growing the plant cell under conditions which permit the development of a plant with enhanced yield, e.g an improved yield-related trait, e.g. enhanced tolerance to abiotic environmental stress and/or increased yield like biomass as compared to a corresponding, e.g. non-transformed, wild type plant.

[0157] In one embodiment the present invention relates to a method for producing a transgenic plant cell, a plant or a part thereof with enhanced yield, e.g an improved yield-related trait, e.g. enhanced tolerance to abiotic environmental stress and/or increased yield like biomass as compared to a corresponding, e.g. non-transformed, wild type plant cell, a plant or a part thereof, which comprises
[0158] (a) increasing or generating the activity of a protein as shown in table II, column 3 encoded by the nucleic acid sequences as shown in table I, column 5 or 7, in the cytoplasm of a plant cell, and
[0159] (b) growing the plant cell under conditions which permit the development of a plant with enhanced yield, e.g an improved yield-related trait, e.g. enhanced tolerance to abiotic environmental stress and/or increased yield like biomass as compared to a corresponding, e.g. non-transformed, wild type plant.

[0160] In another embodiment the present invention is related to a method for producing a transgenic plant cell, a plant or a part thereof with enhanced yield, e.g an improved yield-related trait, e.g. enhanced tolerance to abiotic environmental stress and/or increased yield like biomass as compared to a corresponding, e.g. non-transformed, wild type plant cell, a plant or a part thereof, which comprises
[0161] (a) increasing or generating one or more activities selected from the group consisting of 30S ribosomal protein S11, 60S ribosomal protein, Adaptin medium chain homolog APM2, B0252-protein, BRICK1-like protein, Cav1 protein, Chloroplast chaperonin, DNA polymerase, flagellar protein, G2/mitotic-specific cyclin, GRE1-protein(Hydrophilin), Membrane protein, ORF YPL249c-a, RNA polymerase II holoenzyme cyclin-like subunit, Serine/threonine-protein kinase, Short chain dehydrogenase, Sterol-C-methyltransferase, transcription regulator (farR), Ykr015c-protein, and YPL167C_{—}2-protein in an organelle of a plant cell or
[0162] (b) increasing or generating the activity of a protein as shown in table II, column 3 encoded by the nucleic acid sequences as shown in table I, column 5 or 7, which are joined to a nucleic acid sequence encoding a transit peptide in a plant cell; or
[0163] (c) increasing or generating the activity of a protein as shown in table II, column 3 encoded by the nucleic acid sequences as shown in table I, column 5 or 7, which are joined to a nucleic acid sequence encoding chloroplast localization sequence, in a plant cell, and
[0164] (d) growing the plant cell under conditions which permit the development of a plant with enhanced yield, e.g an improved yield-related trait, e.g. enhanced tolerance to abiotic environmental stress and/or increased yield like biomass as compared to a corresponding, e.g. non-transformed, wild type plant.

[0165] In another embodiment, the present invention relates to a method for producing a transgenic plant cell, a plant or a part thereof with enhanced yield, e.g an improved yield-related trait, e.g. enhanced tolerance to abiotic environmental stress and/or increased yield like biomass as compared to a corresponding, e.g. non-transformed, wild type plant cell, a plant or a part thereof, which comprises
[0166] (a) increasing or generating the activity of a protein as shown in table II, column 3 encoded by the nucleic acid sequences as shown in table I, column 5 or 7, in an organelle of a plant through the transformation of the organelle, or
[0167] (b) increasing or generating the activity of a protein as shown in table II, column 3 encoded by the nucleic acid sequences as shown in table I, column 5 or 7 in the plastid of a plant, or in one or more parts thereof through the transformation of the plastids; and
[0168] (c) growing the plant cell under conditions which permit the development of a plant with enhanced yield, e.g an improved yield-related trait, e.g. enhanced tolerance to abiotic environmental stress and/or increased yield like biomass as compared to a corresponding, e.g. non-transformed, wild type plant.

[0169] In principle the nucleic acid sequence encoding a transit peptide can be isolated from every organism such as microorganisms such as algae or plants containing plastids preferably chloroplasts. A “transit peptide” is an amino acid sequence, whose encoding nucleic acid sequence is translated together with the corresponding structural gene. That means the transit peptide is an integral part of the translated protein and forms an amino terminal extension of the protein. Both are translated as so called “preprotein”. In general the transit peptide is cleaved off from the preprotein during or just after import of the protein into the correct cell organelle such as a plastid to yield the mature protein. The transit peptide ensures correct localization of the mature protein by facilitating the transport of proteins through intracellular membranes.

[0170] Preferred nucleic acid sequences encoding a transit peptide are derived from a nucleic acid sequence encoding a protein finally resided in the plastid and stemming from an organism selected from the group consisting of the genera Acetabularia, Arabidopsis, Brassica, Capsicum, Chlamydomonas, Cururbita, Dunaliella, Euglena, Flaveria, Glycine, Helianthus, Hordeum, Lemna, Lolium, Lycopersion, Malus, Medicago, Mesembryanthemum, Nicotiana, Oenotherea, Oryza, Petunia, Phaseolus, Physcomitrella, Pinus, Pisum, Raphanus, Silene, Sinapis, Solanum, Spinacea, Stevia, Synechococcus, Triticum and Zea.

[0171] Advantageously such transit peptides, which are beneficially used in the inventive process, are derived from the nucleic acid sequence encoding a protein selected from the group consisting of ribulose bisphosphate carboxylase/oxygenase, 5-enolpyruvylshikimate-3-phosphate synthase, acetolactate synthase, chloroplast ribosomal protein CS17, Cs protein, ferredoxin, plastocyanin, ribulose bisphosphate carboxylase activase, tryptophan synthase, acyl carrier protein, plastid chaperonin-60, cytochrome c₅₅₂, 22-kDA heat shock protein, 33-kDa Oxygen-evolving enhancer protein 1, ATP synthase γ subunit, ATP synthase δ subunit, chlorophyll-a/b-binding proteinII-1, Oxygen-evolving enhancer protein 2, Oxygen-evolving enhancer protein 3, photosystem I: P21, photosystem I: P28, photosystem I: P30, photosystem I: P35, photosystem I: P37, glycerol-3-phosphate acyltransferases, chlorophyll a/b binding protein, CAB2 protein, hydroxymethyl-bilane synthase, pyruvate-orthophosphate dikinase, CAB3 protein, plastid ferritin, ferritin, early light-inducible protein, glutamate-1-semialdehyde aminotransferase, protochlorophyllide reductase, starch-granule-bound amylase synthase, light-harvesting chlorophyll a/b-binding protein of photosystem II, major pollen allergen Lol p 5a, plastid ClpB ATP-dependent protease, superoxide dismutase, ferredoxin NADP oxidoreductase, 28-kDa ribonucleoprotein, 31-kDa ribonucleoprotein, 33-kDa ribonucleoprotein, acetolactate synthase, ATP synthase CF₀ subunit 1, ATP synthase CF₀ subunit 2, ATP synthase CF₀ subunit 3, ATP synthase CF₀ subunit 4, cytochrome f, ADP-glucose pyrophosphorylase, glutamine synthase, glutamine synthase 2, carbonic anhydrase, GapA protein, heat-shock-protein hsp21, phosphate translocator, plastid ClpA ATP-dependent protease, plastid ribosomal protein CL24, plastid ribosomal protein CL9, plastid ribosomal protein PsCL18, plastid ribosomal protein PsCL25, DAHP synthase, starch phosphorylase, root acyl carrier protein II, betaine-aldehyde dehydrogenase, GapB protein, glutamine synthetase 2, phosphoribulokinase, nitrite reductase, ribosomal protein L12, ribosomal protein L13, ribosomal protein L21, ribosomal protein L35, ribosomal protein L40, triose phosphate-3-phosphoglycerate-phosphate translocator, ferredoxin-dependent glutamate synthase, glyceraldehyde-3-phosphate dehydrogenase, NADP-dependent malic enzyme and NADP-malate dehydrogenase.

[0172] More preferred the nucleic acid sequence encoding a transit peptide is derived from a nucleic acid sequence encoding a protein finally resided in the plastid and stemming from an organism selected from the group consisting of the species Acetabularia mediterranea, Arabidopsis thaliana, Brassica campestris, Brassica napus, Capsicum annuum, Chlamydomonas reinhardtii, Cururbita moschata, Dunaliella salina, Dunaliella tertiolecta, Euglena gracilis, Flaveria trinervia, Glycine max, Helianthus annuus, Hordeum vulgare, Lemna gibba, Lolium perenne, Lycopersion esculentum, Malus domestica, Medicago falcata, Medicago sativa, Mesembryanthemum crystallinum, Nicotiana plumbaginifolia, Nicotiana sylvestris, Nicotiana tabacum, Oenotherea hookeri, Oryza sativa, Petunia hybrida, Phaseolus vulgaris, Physcomitrella patens, Pinus tunbergii, Pisum sativum, Raphanus sativus, Silene pratensis, Sinapis alba, Solanum tuberosum, Spinacea oleracea, Stevia rebaudiana, Synechococcus, Synechocystis, Triticum aestivum and Zea mays.

[0173] Even more preferred nucleic acid sequences are encoding transit peptides as disclosed by von Heijne et al. (Plant Molecular Biology Reporter, 9 (2), 104, (1991)), which are hereby incorporated by reference. Table V shows some examples of the transit peptide sequences disclosed by von Heijne et al. According to the disclosure of the invention especially in the examples the skilled worker is able to link other nucleic acid sequences disclosed by von Heijne et al. to the nucleic acid sequences shown in table I, columns 5 and 7. Most preferred nucleic acid sequences encoding transit peptides are derived from the genus Spinacia such as chlorplast 30S ribosomal protein PSrp-1, root acyl carrier protein II, acyl carrier protein, ATP synthase: γ subunit, ATP synthase: δ subunit, cytochrom f, ferredoxin I, ferredoxin NADP oxidoreductase (=FNR), nitrite reductase, phosphoribulokinase, plastocyanin or carbonic anhydrase. The skilled worker will recognize that various other nucleic acid sequences encoding transit peptides can easely isolated from plastid-localized proteins, which are expressed from nuclear genes as precursors and are then targeted to plastids. Such transit peptides encoding sequences can be used for the construction of other expression constructs. The transit peptides advantageously used in the inventive process and which are part of the inventive nucleic acid sequences and proteins are typically 20 to 120 amino acids, preferably 25 to 110, 30 to 100 or 35 to 90 amino acids, more preferably 40 to 85 amino acids and most preferably 45 to 80 amino acids in length and functions post-translationally to direct the protein to the plastid preferably to the chloroplast. The nucleic acid sequences encoding such transit peptides are localized upstream of nucleic acid sequence encoding the mature protein. For the correct molecular joining of the transit peptide encoding nucleic acid and the nucleic acid encoding the protein to be targeted it is sometimes necessary to introduce additional base pairs at the joining position, which forms restriction enzyme recognition sequences useful for the molecular joining of the different nucleic acid molecules. This procedure might lead to very few additional amino acids at the N-terminal of the mature imported protein, which usually and preferably do not interfere with the protein function. In any case, the additional base pairs at the joining position which forms restriction enzyme recognition sequences have to be chosen with care, in order to avoid the formation of stop codons or codons which encode amino acids with a strong influence on protein folding, like e.g. proline. It is preferred that such additional codons encode small structural flexible amino acids such as glycine or alanine.

[0174] As mentioned above the nucleic acid sequences coding for the proteins as shown in table II, column 3 and its homologs as disclosed in table I, columns 5 and 7 can be joined to a nucleic acid sequence encoding a transit peptide. This nucleic acid sequence encoding a transit peptide ensures transport of the protein to the plastid. The nucleic acid sequence of the gene to be expressed and the nucleic acid sequence encoding the transit peptide are operably linked. Therefore the transit peptide is fused in frame to the nucleic acid sequence coding for proteins as shown in table II, column 3 and its homologs as disclosed in table I, columns 5 and 7.

[0175] The term “organelle” according to the invention shall mean for example “mitochondria” or preferably “plastid” (throughout the specification the “plural” shall comprise the “singular” and vice versa). The term “plastid” according to the invention are intended to include various forms of plastids including proplastids, chloroplasts, chromoplasts, gerontoplasts, leucoplasts, amyloplasts, elaioplasts and etioplasts, preferably chloroplasts. They all have as a common ancestor the aforementioned proplasts.

[0176] Other transit peptides are disclosed by Schmidt et al. (J. Biol. Chem. 268 (36), 27447 (1993)), Della-Cioppa et al. (Plant. Physiol. 84, 965 (1987)), de Castro Silva Filho et al. (Plant Mol. Biol. 30, 769 (1996)), Zhao et al. (J. Biol. Chem. 270 (11), 6081(1995)), Römer et al. (Biochem. Biophys. Res. Commun. 196 (3), 1414 (1993)), Keegstra et al. (Annu. Rev. Plant Physiol. Plant Mol. Biol. 40, 471(1989)), Lubben et al. (Photosynthesis Res. 17, 173 (1988)) and Lawrence et al. (J. Biol. Chem. 272 (33), 20357 (1997)). A general review about targeting is disclosed by Kermode Allison R. in Critical Reviews in Plant Science 15 (4), 285 (1996) under the title “Mechanisms of Intracellular Protein Transport and Targeting in Plant Cells.”.

[0177] Favored transit peptide sequences, which are used in the inventive process and which form part of the inventive nucleic acid sequences are generally enriched in hydroxylated amino acid residues (serine and threonine), with these two residues generally constituting 20 to 35% of the total. They often have an amino-terminal region empty of Gly, Pro, and charged residues. Furthermore they have a number of small hydrophobic amino acids such as valine and alanine and generally acidic amino acids are lacking. In addition they generally have a middle region rich in Ser, Thr, Lys and Arg. Overall they have very often a net positive charge.

[0178] Alternatively, nucleic acid sequences coding for the transit peptides may be chemically synthesized either in part or wholly according to structure of transit peptide sequences disclosed in the prior art. Said natural or chemically synthesized sequences can be directly linked to the sequences encoding the mature protein or via a linker nucleic acid sequence, which may be typically less than 500 base pairs, preferably less than 450, 400, 350, 300, 250 or 200 base pairs, more preferably less than 150, 100, 90, 80, 70, 60, 50, 40 or 30 base pairs and most preferably less than 25, 20, 15, 12, 9, 6 or 3 base pairs in length and are in frame to the coding sequence. Furthermore favorable nucleic acid sequences encoding transit peptides may comprise sequences derived from more than one biological and/or chemical source and may include a nucleic acid sequence derived from the amino-terminal region of the mature protein, which in its native state is linked to the transit peptide. In a preferred embodiment of the invention said amino-terminal region of the mature protein is typically less than 150 amino acids, preferably less than 140, 130, 120, 110, 100 or 90 amino acids, more preferably less than 80, 70, 60, 50, 40, 35, 30, 25 or 20 amino acids and most preferably less than 19, 18, 17, 16, 15, 14, 13, 12, 11 or 10 amino acids in length. But even shorter or longer stretches are also possible. In addition target sequences, which facilitate the transport of proteins to other cell compartments such as the vacuole, endoplasmic reticulum, golgi complex, glyoxysomes, peroxisomes or mitochondria may be also part of the inventive nucleic acid sequence. The proteins translated from said inventive nucleic acid sequences are a kind of fusion proteins that means the nucleic acid sequences encoding the transit peptide for example the ones shown in table V, preferably the last one of the table are joint to the nucleic acid sequences shown in table I, columns 5 and 7. The person skilled in the art is able to join said sequences in a functional manner. Advantageously the transit peptide part is cleaved off from the protein part shown in table II, columns 5 and 7 during the transport preferably into the plastids. All products of the cleavage of the preferred transit peptide shown in the last line of table V have preferably the N-terminal amino acid sequences QIA CSS or QIA EFQLTT in front of the start methionine of the protein mentioned in table II, columns 5 and 7. Other short amino acid sequences of an range of 1 to 20 amino acids preferable 2 to 15 amino acids, more preferable 3 to 10 amino acids most preferably 4 to 8 amino acids are also possible in front of the start methionine of the protein mentioned in table II, columns 5 and 7. In case of the amino acid sequence QIA CSS the three amino acids in front of the start methionine are stemming from the LIC (=ligatation independent cloning) cassette. Said short amino acid sequence is preferred in the case of the expression of Escherichia coli genes. In case of the amino acid sequence QIA EFQLTT the six amino acids in front of the start methionine are stemming from the LIC cassette. Said short amino acid sequence is preferred in the case of the expression of Saccharomyces cerevisiae genes. The skilled worker knows that other short sequences are also useful in the expression of the genes mentioned in table I, columns 5 and 7. Furthermore the skilled worker is aware of the fact that there is not a need for such short sequences in the expression of the genes.

TABLE V
Examples of transit peptides disclosed by von Heijne et al.

| Trans Pep | Organism | Transit Peptide | SEQ ID NO: | Reference |
|---|---|---|---|---|
| 1 | Acetabularia | MASIMMNKSVVLSKECAKPLATPK | 17 | Mol. Gen. |
| | mediterranea | VTLNKRGFATTIATKNREMMVWQP | | Genet. 218, |
| | | FNNKMFETFSFLPP | | 445 (1989) |

| | | | | |
|---|---|---|---|---|
| 2 | Arabidopsis | MAASLQSTATFLQSAKIATAPSRG | 18 | EMBO J. 8, |
| | thaliana | SSHLRSTQAVGKSFGLETSSARLT | | 3187 (1989) |
| | | CSFQSDFKDFTGKCSDAVKIAGFA | | |
| | | LATSALVVSGASAEGAPK | | |
| 3 | Arabidopsis | MAQVSRICNGVQNPSLICNLSKSS | 19 | Mol. Gen. |
| | thaliana | QRKSPLSVSLKTQQHPRAYPISSS | | Genet. 210, |
| | | WGLKKSGMTLIGSELRPLKVMSSV | | 437 (1987) |
| | | STAEKASEIVLQPIREISGLIKLP | | |
| 4 | Arabidopsis | MAAATTTTTTSSSISFSTKPSPSS | 20 | Plant |
| | thaliana | SKSPLPISRFSLPFSLNPNKSSSS | | Physiol. 85, |
| | | SRRRGIKSSSPSSISAVLNTTTNV | | 1110 (1987) |
| | | TTTPSPTKPTKPETFISRFAPDQP | | |
| | | RKGA | | |
| 5 | Arabidopsis | MITSSLTCSLQALKLSSPFAHGST | 21 | J. Biol. |
| | thaliana | PLSSLSKPNSFPNHRMPALVPV | | Chem. 265, |
| | | | | 2763 (1990) |
| 6 | Arabidopsis | MASLLGTSSSAI- | 22 | EMBO J. 9, |
| | thaliana | WASPSLSSPSSKPSSSPICFRPGK | | 1337 (1990) |
| | | LFGSKLNAGIQI | | |
| | | RPKKNRSRYHVSVMNVATEINSTE | | |
| | | QVVGKFDSKKSARPVYPFAAI | | |
| 7 | Arabidopsis | MASTALSSAIVGTSFIRRSPAPIS | 23 | Plant |
| | thaliana | LRSLPSANTQSLFGLKSGTARGGR | | Physiol. 93, |
| | | VVAM | | 572 (1990) |
| 8 | Arabidopsis | MAASTMALSSPAFAGKAVNLSPAA | 24 | Nucl. Acids |
| | thaliana | SEVLGSGRVTNRKTV | | Res. 14, |
| | | | | 4051 (1986) |
| 9 | Arabidopsis | MAAITSATVTIPSFTGLKLAVSSK | 25 | Gene 65, 59 |
| | thaliana | PKTLSTISRSSSATRAPPKLALKS | | (1988) |
| | | SLKDFGVIAVATAASIVLAGNAMA | | |
| | | MEVLLGSDDGSLAFVPSEFT | | |
| 10 | Arabidopsis | MAAAVSTVGAINRAPLSLNGSGSG | 26 | Nucl. Acids |
| | thaliana | AVSAPASTFLGKKVVTVSRFAQSN | | Res. 17, |
| | | KKSNGSFKVLAVKEDKQTDGDRWR | | 2871 (1989) |
| | | GLAYDTSDDQIDI | | |
| 11 | Arabidopsis | MKSSMLSSTAWTSPAQATMVAPF | 27 | Plant Mol. |
| | thaliana | TGLKSSASFPVTRKANNDITSIT | | Biol. 11, 745 |
| | | SNGGRVSC | | (1988) |
| 12 | Arabidopsis | MAASGTSATFRASVSSAPSSSSQL | 28 | Proc. Natl. |
| | thaliana | THLKSPFKAVKYTPLPSSRSKSSS | | Acad. Sci. |
| | | FSVSCTIAKDPPVLMAAGSDPALW | | USA, 86, |
| | | QRPDSFGRFGKFGGKYVPE | | 4604 (1989) |
| 13 | Brassica | MSTTFCSSVCMQATSLAATTRISF | 29 | Nucl. Acids |
| | campestris | QKPALVSTTNLSFNLRRSIPTRFS | | Res. 15, |
| | | ISCAAKPETVEKVSKIVKKQLSLK | | 7197 (1987) |
| | | DDQKVVAE | | |
| 14 | Brassica | MATTFSASVSMQATSLATTTRISF | 30 | Eur. J. Bio- |
| | napus | QKPVLVSNHGRTNLSFNLSRTRLS | | chem. 174, |
| | | ISC | | 287 (1988) |
| 15 | Chlamydomonas | MQALSSRVNIAAKPQRAQRLVVRA | 31 | Plant Mol. |
| | reinhardtii | EEVKAAPKKEVGPKRGSLVK | | Biol. 12, 463 |
| | | | | (1989) |
| 16 | Cucurbita | MAELIQDKESAQSAATAAAASSGY | 32 | FEBS Lett. |
| | moschata | ERRNEPAHSRKFLEVRSEEELL- | | 238, 424 |
| | | SCIKK | | (1988) |
| 17 | Spinacea | MSTINGCLTSISPSRTQLKNTSTL | 33 | J. Biol. |
| | oleracea | RPTFIANSRVNPSSSVPPSLIRNQ | | Chem. 265, |
| | | PVFAAPAPIITPTL | | (10) 5414 |
| | | | | (1990) |
| 18 | Spinacea | MTTAVTAAVSFPSTKTTSLSARCS | 34 | Curr. Genet. |
| | oleracea | SVISPDKISYKKVPLYYRNVSATG | | 13, 517 |
| | | KMGPIRAQIASDVEAPPPAPAK- | | (1988) |
| | | VEKMS | | |
| 19 | Spinacea | MTTAVTAAVSFPSTKTTSLSARSS | 35 | |
| | oleracea | SVISPDKISYKKVPLYYRNVSATG | | |
| | | KMGPIRA | | |

[0179] Alternatively to the targeting of the sequences shown in table II, columns 5 and 7 preferably of sequences in general encoded in the nucleus with the aid of the targeting sequences mentioned for example in table V alone or in combination with other targeting sequences preferably into the plastids, the nucleic acids of the invention can directly be introduced into the plastidal genome. Therefore in a preferred embodiment the nucleic acid sequences shown in table I, columns 5 and 7 are directly introduced and expressed in plastids.

[0180] The term “introduced” in the context of this specification shall mean the insertion of a nucleic acid sequence into the organism by means of a “transfection”, “transduction” or preferably by “transformation”.

[0181] A plastid, such as a chloroplast, has been “transformed” by an exogenous (preferably foreign) nucleic acid sequence if nucleic acid sequence has been introduced into the plastid that means that this sequence has crossed the membrane or the membranes of the plastid. The foreign DNA may be integrated (covalently linked) into plastid DNA making up the genome of the plastid, or it may remain unintegrated (e.g., by including a chloroplast origin of replication). “Stably” integrated DNA sequences are those, which are inherited through plastid replication, thereby transferring new plastids, with the features of the integrated DNA sequence to the progeny.

[0182] For expression a person skilled in the art is familiar with different methods to introduce the nucleic acid sequences into different organelles such as the preferred plastids. Such methods are for example disclosed by Maiga P. (Annu. Rev. Plant Biol. 55, 289 (2004)), Evans T. (WO 2004/040973), McBride K. E. et al. (U.S. Pat. No. 5,455,818), Daniell H. et al. (U.S. Pat. No. 5,932,479 and U.S. Pat. No. 5,693,507) and Straub J. M. et al. (U.S. Pat. No. 6,781,033). A preferred method is the transformation of microspore-derived hypocotyl or cotyledonary tissue (which are green and thus contain numerous plastids) leaf tissue and afterwards the regeneration of shoots from said transformed plant material on selective medium. As methods for the transformation bombarding of the plant material or the use of independently replicating shuttle vectors are well known by the skilled worker. But also a PEG-mediated transformation of the plastids or Agrobacterium transformation with binary vectors is possible. Useful markers for the transformation of plastids are positive selection markers for example the chloramphenicol-, streptomycin-, kanamycin-, neomycin-, amikamycin-, spectinomycin-, triazine- and/or lincomycin-tolerance genes. As additional markers named in the literature often as secondary markers, genes coding for the tolerance against herbicides such as phosphinothricin (=glufosinate, BASTA™, Liberty™, encoded by the bar gene), glyphosate (=N-(phosphonomethyl)glycine, Roundup™, encoded by the 5-enolpyruvylshikimate-3-phosphate synthase gene=epsps), sulfonylureas (like Staple™, encoded by the acetolactate synthase (ALS) gene), imidazolinones [=IMI, like imazethapyr, imazamox, Clearfield™, encoded by the acetohydroxyacid synthase (AHAS) gene, also known as acetolactate synthase (ALS) gene] or bromoxynil (=Buctril™, encoded by the oxy gene) or genes coding for antibiotics such as hygromycin or G418 are useful for further selection. Such secondary markers are useful in the case when most genome copies are transformed. In addition negative selection markers such as the bacterial cytosine deaminase (encoded by the codA gene) are also useful for the transformation of plastids.

[0183] To increase the possibility of identification of transformants it is also desirable to use reporter genes other then the aforementioned tolerance genes or in addition to said genes. Reporter genes are for example β-galactosidase-, β-glucuronidase-(GUS), alkaline phosphatase- and/or green-fluorescent protein-genes (GFP).

[0184] For the inventive process it is of great advantage that by transforming the plastids the intraspecies specific transgene flow is blocked, because a lot of species such as corn, cotton and rice have a strict maternal inheritance of plastids. By placing the genes specified in table I, columns 5 and 7 or active fragments thereof in the plastids of plants, these genes will not be present in the pollen of said plants.

[0185] A further preferred embodiment of the invention relates to the use of so called “chloroplast localization sequences”, in which a first RNA sequence or molecule is capable of transporting or “chaperoning” a second RNA sequence, such as a RNA sequence transcribed from the sequences depicted in table 1, columns 5 and 7 or a sequence encoding a protein, as depicted in table II, columns 5 and 7, from an external environment inside a cell or outside a plastid into a chloroplast. In one embodiment the chloroplast localization signal is substantially similar or complementary to a complete or intact viroid sequence. The chloroplast localization signal may be encoded by a DNA sequence, which is transcribed into the chloroplast localization RNA. The term “viroid” refers to a naturally occurring single stranded RNA molecule (Flores, C. R. Acad Sci III. 324 (10), 943 (2001)). Viroids usually contain about 200-500 nucleotides and generally exist as circular molecules. Examples of viroids that contain chloroplast localization signals include but are not limited to ASBVd, PLMVd, CChMVd and ELVd. The viroid sequence or a functional part of it can be fused to the sequences depicted in table I, columns 5 and 7 or a sequence encoding a protein, as depicted in table II, columns 5 and 7 in such a manner that the viroid sequence transports a sequence transcribed from a sequence as depicted in table 1, columns 5 and 7 or a sequence encoding a protein as depicted in table II, columns 5 and 7 into the chloroplasts. A preferred embodiment uses a modified ASBVd (Navarro et al., Virology. 268 (1), 218 (2000)).

[0186] In a further specific embodiment the protein to be expressed in the plastids such as the proteins depicted in table II, columns 5 and 7 are encoded by different nucleic acids. Such a method is disclosed in WO 2004/040973, which shall be incorporated by reference. WO 2004/040973 teaches a method, which relates to the translocation of an RNA corresponding to a gene or gene fragment into the chloroplast by means of a chloroplast localization sequence. The genes, which should be expressed in the plant or plants cells, are split into nucleic acid fragments, which are introduced into different compartments in the plant e.g. the nucleus, the plastids and/or mitochondria. Additionally plant cells are described in which the chloroplast contains a ribozyme fused at one end to an RNA encoding a fragment of a protein used in the inventive process such that the ribozyme can trans-splice the translocated fusion RNA to the RNA encoding the gene fragment to form and as the case may be reunite the nucleic acid fragments to an intact mRNA encoding a functional protein for example as disclosed in table II, columns 5 and 7.

[0187] In a preferred embodiment of the invention the nucleic acid sequences as shown in table I, columns 5 and 7 used in the inventive process are transformed into plastids, which are metabolically active. Those plastids should preferably maintain at a high copy number in the plant or plant tissue of interest, most preferably the chloroplasts found in green plant tissues, such as leaves or cotyledons or in seeds.

[0188] For a good expression in the plastids the nucleic acid sequences as shown in table I, columns 5 and 7 are introduced into an expression cassette using preferably a promoter and terminator, which are active in plastids preferably a chloroplast promoter. Examples of such promoters include the psbA promoter from the gene from spinach or pea, the rbcL promoter, and the atpB promoter from corn.

[0189] Comprises/comprising and grammatical variations thereof when used in this specification are to be taken to specify the presence of stated features, integers, steps or components or groups thereof, but not to preclude the presence or addition of one or more other features, integers, steps, components or groups thereof.

[0190] In accordance with the invention, the term “plant cell” or the term “organism” as understood herein relates always to a plant cell or a organelle thereof, preferably a plastid, more preferably chloroplast.

[0191] As used herein, “plant” is meant to include not only a whole plant but also a part thereof i.e., one or more cells, and tissues, including for example, leaves, stems, shoots, roots, flowers, fruits and seeds.

[0192] Surprisingly it was found, that the transgenic expression of the Saccaromyces cerevisiae protein as shown in table II, column 3 and/or the transgenic expression of the E. coli protein as shown in table II, column 3 in a plant such as A. thaliana for example, conferred enhanced tolerance to abiotic environmental stress, particularly low temperature, and/or increased yield to the transgenic plant cell, plant or a part thereof as compared to a corresponding, e.g. non-transformed, wild type plant cell, a plant or a part thereof.

[0193] Accordingly, in one embodiment, in case the activity of a polypeptide according to the polypeptide SEQ ID NO. 40, or encoded by a nucleic acid molecule comprising the nucleic acid SEQ ID NO. 39, or a homolog of said nucleic acid molecule or polypeptide, e.g. in case the activity of the Arabidopsis thaliana nucleic acid molecule or a polypeptide, respectively, comprising the nucleic acid SEQ ID NO. 39 or polypeptide SEQ ID NO. 40, respectively, is increased or generated, e.g. if the activity of a nucleic acid molecule or a polypeptide comprising the nucleic acid or polypeptide or the consensus sequence or the polypeptide motif, as depicted in table I, II or IV, column 7 in the respective same line as the nucleic acid molecule SEQ ID NO. 39 or polypeptide SEQ ID NO. 40, respectively, is increased or generated or if the activity “Chloroplast chaperonin” is increased or generated in a plant cell, plant or part thereof, especially if localized cytoplasmic, an increased yield as compared to a corresponding non-modified, e.g. a non-transformed, wild type plant cell, a plant or a part thereof is conferred.

[0194] In a further embodiment, in case the activity of a polypeptide according to the polypeptide SEQ ID NO. 40, or encoded by a nucleic acid molecule comprising the nucleic acid SEQ ID NO. 39, or a homolog of said nucleic acid molecule or polypeptide, e.g. in case the activity of the Arabidopsis thaliana nucleic acid molecule or a polypeptide comprising the nucleic acid SEQ ID NO. 39 or polypeptide SEQ ID NO. 40, respectively, is increased or generated, e.g. if the activity of a nucleic acid molecule or a polypeptide comprising the nucleic acid or polypeptide or the consensus sequence or the polypeptide motif, as depicted in table I, II or IV, column 7 in the respective same line as the nucleic acid molecule SEQ ID NO. 39 or polypeptide SEQ ID NO. 40, respectively, is increased or generated or if the activity “Chloroplast chaperonin” is increased or generated in a plant cell, plant or part thereof, especially, if the polypeptide is cytoplasmic localized, an increased biomass, compared to a corresponding non-modified, e.g. a non-transformed, wild type plant cell, a plant or a part thereof is conferred.

[0195] Particularly, an increase of yield from 1.1-fold to 1.365-fold, for example plus at least 100% thereof, under standard conditions, e.g. in the absence of nutrient deficiency as well as stress conditions is conferred compared to a corresponding non-modified, e.g. non-transformed, wild type plant cell, a plant or a part thereof.

[0196] In a further embodiment, in case the activity of a polypeptide according to the polypeptide SEQ ID NO. 40, or encoded by a nucleic acid molecule comprising the nucleic acid SEQ ID NO. 39, or a homolog of said nucleic acid molecule or polypeptide, e.g. in case the activity of the Arabidopsis thaliana nucleic acid molecule or a polypeptide comprising the nucleic acid SEQ ID NO. 39 or polypeptide SEQ ID NO. 40, respectively, is increased or generated, e.g. if the activity of a nucleic acid molecule or a polypeptide comprising the nucleic acid or polypeptide or the consensus sequence or the polypeptide motif, as depicted in table I, II or IV, column 7 in the respective same line as the nucleic acid molecule SEQ ID NO. 39 or polypeptide SEQ ID NO. 40, respectively, is increased or generated or if the activity “Chloroplast chaperonin” is increased or generated in a plant cell, plant or part thereof, especially if the polypeptide is cytoplasmic localized, an increased nutrient use efficiency as compared to a corresponding non-modified, e.g. a non-transformed, wild type plant cell, a plant or a part thereof is conferred. In one embodiment an increased nitrogen use efficiency is conferred.

[0197] Particularly, an increase of yield from 1.05-fold to 1.419-fold, for example plus at least 100% thereof, under conditions of nitrogen deficiency is conferred compared to a corresponding non-modified, e.g. non-transformed, wild type plant cell, a plant or a part thereof.

[0198] In a further embodiment, in case the activity of a polypeptide according to the polypeptide SEQ ID NO. 40, or encoded by a nucleic acid molecule comprising the nucleic acid SEQ ID NO. 39, or a homolog of said nucleic acid molecule or polypeptide, e.g. in case the activity of the Arabidopsis thaliana nucleic acid molecule or a polypeptide comprising the nucleic acid SEQ ID NO. 39 or polypeptide SEQ ID NO. 40, respectively, is increased or generated, e.g. if the activity of a nucleic acid molecule or a polypeptide comprising the nucleic acid or polypeptide or the consensus sequence or the polypeptide motif, as depicted in table I, II or IV, column 7 in the respective same line as the nucleic acid molecule SEQ ID NO. 39 or polypeptide SEQ ID NO. 40, respectively, is increased or generated or if the activity “Chloroplast chaperonin” is increased or generated in a plant cell, plant or part thereof, especially if the polypeptide is cytoplasmic localized, an increased intrinsic yield as compared to a corresponding non-modified, e.g. a non-transformed, wild type plant cell, a plant or a part thereof is conferred. In one embodiment an increased yield under standard conditions, e.g. in the absence of nutrient deficiency as well as stress conditions, is conferred.

[0199] Particularly, an increase of yield from 1.05-fold to 1.075-fold, for example plus at least 100% thereof, under conditions of low temperature is conferred compared to a corresponding non-modified, e.g. non-transformed, wild type plant cell, a plant or a part thereof.

[0200] Accordingly, in one embodiment, in case the activity of a polypeptide according to the polypeptide SEQ ID NO. 138, or encoded by a nucleic acid molecule comprising the nucleic acid SEQ ID NO. 137, or a homolog of said nucleic acid molecule or polypeptide, e.g. in case the activity of the Azotobacter vinelandii nucleic acid molecule or a polypeptide, respectively, comprising the nucleic acid SEQ ID NO. 137 or polypeptide SEQ ID NO. 138, respectively, is increased or generated, e.g. if the activity of a nucleic acid molecule or a polypeptide comprising the nucleic acid or polypeptide or the consensus sequence or the polypeptide motif, as depicted in table I, II or IV, column 7 in the respective same line as the nucleic acid molecule SEQ ID NO. 137 or polypeptide SEQ ID NO. 138, respectively, is increased or generated or if the activity “30S ribosomal protein S11” is increased or generated in a plant cell, plant or part thereof, especially if localized cytoplasmic, an increased yield as compared to a corresponding non-modified, e.g. a non-transformed, wild type plant cell, a plant or a part thereof is conferred.

[0201] In a further embodiment, in case the activity of a polypeptide according to the polypeptide SEQ ID NO. 138, or encoded by a nucleic acid molecule comprising the nucleic acid SEQ ID NO. 137, or a homolog of said nucleic acid molecule or polypeptide, e.g. in case the activity of the Azotobacter vinelandii nucleic acid molecule or a polypeptide comprising the nucleic acid SEQ ID NO. 137 or polypeptide SEQ ID NO. 138, respectively, is increased or generated, e.g. if the activity of a nucleic acid molecule or a polypeptide comprising the nucleic acid or polypeptide or the consensus sequence or the polypeptide motif, as depicted in table I, II or IV, column 7 in the respective same line as the nucleic acid molecule SEQ ID NO. 137 or polypeptide SEQ ID NO. 138, respectively, is increased or generated or if the activity “30S ribosomal protein S11” is increased or generated in a plant cell, plant or part thereof, especially, if the polypeptide is cytoplasmic localized, an increased biomass, compared to a corresponding non-modified, e.g. a non-transformed, wild type plant cell, a plant or a part thereof is conferred.

[0202] Particularly, an increase of yield from 1.1-fold to 1.231-fold, for example plus at least 100% thereof, under standard conditions, e.g. in the absence of nutrient deficiency as well as stress conditions is conferred compared to a corresponding non-modified, e.g. non-transformed, wild type plant cell, a plant or a part thereof.

[0203] In a further embodiment, in case the activity of a polypeptide according to the polypeptide SEQ ID NO. 138, or encoded by a nucleic acid molecule comprising the nucleic acid SEQ ID NO. 137, or a homolog of said nucleic acid molecule or polypeptide, e.g. in case the activity of the Azotobacter vinelandii nucleic acid molecule or a polypeptide comprising the nucleic acid SEQ ID NO. 137 or polypeptide SEQ ID NO. 138, respectively, is increased or generated, e.g. if the activity of a nucleic acid molecule or a polypeptide comprising the nucleic acid or polypeptide or the consensus sequence or the polypeptide motif, as depicted in table I, II or IV, column 7 in the respective same line as the nucleic acid molecule SEQ ID NO. 137 or polypeptide SEQ ID NO. 138, respectively, is increased or generated or if the activity “30S ribosomal protein S11” is increased or generated in a plant cell, plant or part thereof, especially if the polypeptide is cytoplasmic localized, an increased nutrient use efficiency as compared to a corresponding non-modified, e.g. a non-transformed, wild type plant cell, a plant or a part thereof is conferred. In one embodiment an increased nitrogen use efficiency is conferred.

[0204] Particularly, an increase of yield from 1.05-fold to 1.872-fold, for example plus at least 100% thereof, under conditions of nitrogen deficiency is conferred compared to a corresponding non-modified, e.g. non-transformed, wild type plant cell, a plant or a part thereof.

[0205] In a further embodiment, in case the activity of a polypeptide according to the polypeptide SEQ ID NO. 138, or encoded by a nucleic acid molecule comprising the nucleic acid SEQ ID NO. 137, or a homolog of said nucleic acid molecule or polypeptide, e.g. in case the activity of the Azotobacter vinelandii nucleic acid molecule or a polypeptide comprising the nucleic acid SEQ ID NO. 137 or polypeptide SEQ ID NO. 138, respectively, is increased or generated, e.g. if the activity of a nucleic acid molecule or a polypeptide comprising the nucleic acid or polypeptide or the consensus sequence or the polypeptide motif, as depicted in table I, II or IV, column 7 in the respective same line as the nucleic acid molecule SEQ ID NO. 137 or polypeptide SEQ ID NO. 138, respectively, is increased or generated or if the activity “30S ribosomal protein S11” is increased or generated in a plant cell, plant or part thereof, especially if the polypeptide is cytoplasmic localized, an increased intrinsic yield as compared to a corresponding non-modified, e.g. a non-transformed, wild type plant cell, a plant or a part thereof is conferred. In one embodiment an increased yield under standard conditions, e.g. in the absence of nutrient deficiency as well as stress conditions, is conferred.

[0206] Particularly, an increase of yield from 1.05-fold to 1.083-fold, for example plus at least 100% thereof, under conditions of low temperature is conferred com-pared to a corresponding non-modified, e.g. non-transformed, wild type plant cell, a plant or a part thereof.

[0207] Accordingly, in one embodiment, in case the activity of a polypeptide according to the polypeptide SEQ ID NO. 983, or encoded by a nucleic acid molecule comprising the nucleic acid SEQ ID NO. 982, or a homolog of said nucleic acid molecule or polypeptide, e.g. in case the activity of the Azotobacter vinelandii nucleic acid molecule or a polypeptide, respectively, comprising the nucleic acid SEQ ID NO. 982 or polypeptide SEQ ID NO. 983, respectively, is increased or generated, e.g. if the activity of a nucleic acid molecule or a polypeptide comprising the nucleic acid or polypeptide or the consensus sequence or the polypeptide motif, as depicted in table I, II or IV, column 7 in the respective same line as the nucleic acid molecule SEQ ID NO. 982 or polypeptide SEQ ID NO. 983, respectively, is increased or generated or if the activity “Short chain dehydrogenase” is increased or generated in a plant cell, plant or part thereof, especially if localized cytoplasmic, an increased yield as compared to a corresponding non-modified, e.g. a non-transformed, wild type plant cell, a plant or a part thereof is conferred.

[0208] In a further embodiment, in case the activity of a polypeptide according to the polypeptide SEQ ID NO. 983, or encoded by a nucleic acid molecule comprising the nucleic acid SEQ ID NO. 982, or a homolog of said nucleic acid molecule or polypeptide, e.g. in case the activity of the Azotobacter vinelandii nucleic acid molecule or a polypeptide comprising the nucleic acid SEQ ID NO. 982 or polypeptide SEQ ID NO. 983, respectively, is increased or generated, e.g. if the activity of a nucleic acid molecule or a polypeptide comprising the nucleic acid or polypeptide or the consensus sequence or the polypeptide motif, as depicted in table I, II or IV, column 7 in the respective same line as the nucleic acid molecule SEQ ID NO. 982 or polypeptide SEQ ID NO. 983, respectively, is increased or generated or if the activity “Short chain dehydrogenase” is increased or generated in a plant cell, plant or part thereof, especially, if the polypeptide is cytoplasmic localized, an increased biomass, compared to a corresponding non-modified, e.g. a non-transformed, wild type plant cell, a plant or a part thereof is conferred.

[0209] Particularly, an increase of yield from 1.1-fold to 1.429-fold, for example plus at least 100% thereof, under standard conditions, e.g. in the absence of nutrient deficiency as well as stress conditions is conferred compared to a corresponding non-modified, e.g. non-transformed, wild type plant cell, a plant or a part thereof.

[0210] In a further embodiment, in case the activity of a polypeptide according to the polypeptide SEQ ID NO. 983, or encoded by a nucleic acid molecule comprising the nucleic acid SEQ ID NO. 982, or a homolog of said nucleic acid molecule or polypeptide, e.g. in case the activity of the Azotobacter vinelandii nucleic acid molecule or a polypeptide comprising the nucleic acid SEQ ID NO. 982 or polypeptide SEQ ID NO. 983, respectively, is increased or generated, e.g. if the activity of a nucleic acid molecule or a polypeptide comprising the nucleic acid or polypeptide or the consensus sequence or the polypeptide motif, as depicted in table I, II or IV, column 7 in the respective same line as the nucleic acid molecule SEQ ID NO. 982 or polypeptide SEQ ID NO. 983, respectively, is increased or generated or if the activity “Short chain dehydrogenase” is increased or generated in a plant cell, plant or part thereof, especially if the polypeptide is cytoplasmic localized, an increased nutrient use efficiency as compared to a corresponding non-modified, e.g. a non-transformed, wild type plant cell, a plant or a part thereof is conferred. In one embodiment an increased nitrogen use efficiency is conferred.

[0211] Particularly, an increase of yield from 1.05-fold to 1.590-fold, for example plus at least 100% thereof, under conditions of nitrogen deficiency is conferred compared to a corresponding non-modified, e.g. non-transformed, wild type plant cell, a plant or a part thereof.

[0212] Accordingly, in one embodiment, in case the activity of a polypeptide according to the polypeptide SEQ ID NO. 1226, or encoded by a nucleic acid molecule comprising the nucleic acid SEQ ID NO. 1225, or a homolog of said nucleic acid molecule or polypeptide, e.g. in case the activity of the Escherichia coli nucleic acid molecule or a polypeptide, respectively, comprising the nucleic acid SEQ ID NO. 1225 or polypeptide SEQ ID NO. 1226, respectively, is increased or generated, e.g. if the activity of a nucleic acid molecule or a polypeptide comprising the nucleic acid or polypeptide or the consensus sequence or the polypeptide motif, as depicted in table I, II or IV, column 7 in the respective same line as the nucleic acid molecule SEQ ID NO. 1225 or polypeptide SEQ ID NO. 1226, respectively, is increased or generated or if the activity “B0252-protein” is increased or generated in a plant cell, plant or part thereof, especially if localized cytoplasmic, an increased yield as compared to a corresponding non-modified, e.g. a non-transformed, wild type plant cell, a plant or a part thereof is conferred.

[0213] In a further embodiment, in case the activity of a polypeptide according to the polypeptide SEQ ID NO. 1226, or encoded by a nucleic acid molecule comprising the nucleic acid SEQ ID NO. 1225, or a homolog of said nucleic acid molecule or polypeptide, e.g. in case the activity of the Escherichia coli nucleic acid molecule or a polypeptide comprising the nucleic acid SEQ ID NO. 1225 or polypeptide SEQ ID NO. 1226, respectively, is increased or generated, e.g. if the activity of a nucleic acid molecule or a polypeptide comprising the nucleic acid or polypeptide or the consensus sequence or the polypeptide motif, as depicted in table I, II or IV, column 7 in the respective same line as the nucleic acid molecule SEQ ID NO. 1225 or polypeptide SEQ ID NO. 1226, respectively, is increased or generated or if the activity “B0252-protein” is increased or generated in a plant cell, plant or part thereof, especially, if the polypeptide is Cytoplasmic localized, an increased biomass, compared to a corresponding non-modified, e.g. a non-transformed, wild type plant cell, a plant or a part thereof is conferred.

[0214] Particularly, an increase of yield from 1.1-fold to 1.489-fold, for example plus at least 100% thereof, under standard conditions, e.g. in the absence of nutrient deficiency as well as stress conditions is conferred compared to a corresponding non-modified, e.g. non-transformed, wild type plant cell, a plant or a part thereof.

[0215] In a further embodiment, in case the activity of a polypeptide according to the polypeptide SEQ ID NO. 1226, or encoded by a nucleic acid molecule comprising the nucleic acid SEQ ID NO. 1225, or a homolog of said nucleic acid molecule or polypeptide, e.g. in case the activity of the Escherichia coli nucleic acid molecule or a polypeptide comprising the nucleic acid SEQ ID NO. 1225 or polypeptide SEQ ID NO. 1226, respectively, is increased or generated, e.g. if the activity of a nucleic acid molecule or a polypeptide comprising the nucleic acid or polypeptide or the consensus sequence or the polypeptide motif, as depicted in table I, II or IV, column 7 in the respective same line as the nucleic acid molecule SEQ ID NO. 1225 or polypeptide SEQ ID NO. 1226, respectively, is increased or generated or if the activity “B0252-protein” is increased or generated in a plant cell, plant or part thereof, especially if the polypeptide is cytoplasmic localized, an increased nutrient use efficiency as compared to a corresponding non-modified, e.g. a non-transformed, wild type plant cell, a plant or a part thereof is conferred. In one embodiment an increased nitrogen use efficiency is conferred.

[0216] Particularly, an increase of yield from 1.05-fold to 1.617-fold, for example plus at least 100% thereof, under conditions of nitrogen deficiency is conferred compared to a corresponding non-modified, e.g. non-transformed, wild type plant cell, a plant or a part thereof.

[0217] Accordingly, in one embodiment, in case the activity of a polypeptide according to the polypeptide SEQ ID NO. 1328, or encoded by a nucleic acid molecule comprising the nucleic acid SEQ ID NO. 1327, or a homolog of said nucleic acid molecule or polypeptide, e.g. in case the activity of the Escherichia coli nucleic acid molecule or a polypeptide, respectively, comprising the nucleic acid SEQ ID NO. 1327 or polypeptide SEQ ID NO. 1328, respectively, is increased or generated, e.g. if the activity of a nucleic acid molecule or a polypeptide comprising the nucleic acid or polypeptide or the consensus sequence or the polypeptide motif, as depicted in table I, II or IV, column 7 in the respective same line as the nucleic acid molecule SEQ ID NO. 1327 or polypeptide SEQ ID NO. 1328, respectively, is increased or generated or if the activity “transcription regulator (farR)” is increased or generated in a plant cell, plant or part thereof, especially if localized cytoplasmic, an increased yield as compared to a corresponding non-modified, e.g. a non-transformed, wild type plant cell, a plant or a part thereof is conferred.

[0218] In a further embodiment, in case the activity of a polypeptide according to the polypeptide SEQ ID NO. 1328, or encoded by a nucleic acid molecule comprising the nucleic acid SEQ ID NO. 1327, or a homolog of said nucleic acid molecule or polypeptide, e.g. in case the activity of the Escherichia coli nucleic acid molecule or a polypeptide comprising the nucleic acid SEQ ID NO. 1327 or polypeptide SEQ ID NO. 1328, respectively, is increased or generated, e.g. if the activity of a nucleic acid molecule or a polypeptide comprising the nucleic acid or polypeptide or the consensus sequence or the polypeptide motif, as depicted in table I, II or IV, column 7 in the respective same line as the nucleic acid molecule SEQ ID NO. 1327 or polypeptide SEQ ID NO. 1328, respectively, is increased or generated or if the activity “transcription regulator (farR)” is increased or generated in a plant cell, plant or part thereof, especially, if the polypeptide is cytoplasmic localized, an increased biomass, compared to a corresponding non-modified, e.g. a non-transformed, wild type plant cell, a plant or a part thereof is conferred.

[0219] Particularly, an increase of yield from 1.1-fold to 1.593-fold, for example plus at least 100% thereof, under standard conditions, e.g. in the absence of nutrient deficiency as well as stress conditions is conferred compared to a corresponding non-modified, e.g. non-transformed, wild type plant cell, a plant or a part thereof.

[0220] In a further embodiment, in case the activity of a polypeptide according to the polypeptide SEQ ID NO. 1328, or encoded by a nucleic acid molecule comprising the nucleic acid SEQ ID NO. 1327, or a homolog of said nucleic acid molecule or polypeptide, e.g. in case the activity of the Escherichia coli nucleic acid molecule or a polypeptide comprising the nucleic acid SEQ ID NO. 1327 or polypeptide SEQ ID NO. 1328, respectively, is increased or generated, e.g. if the activity of a nucleic acid molecule or a polypeptide comprising the nucleic acid or polypeptide or the consensus sequence or the polypeptide motif, as depicted in table I, II or IV, column 7 in the respective same line as the nucleic acid molecule SEQ ID NO. 1327 or polypeptide SEQ ID NO. 1328, respectively, is increased or generated or if the activity “transcription regulator (farR)” is increased or generated in a plant cell, plant or part thereof, especially if the polypeptide is cytoplasmic localized, an increased nutrient use efficiency as compared to a corresponding non-modified, e.g. a non-transformed, wild type plant cell, a plant or a part thereof is conferred. In one embodiment an increased nitrogen use efficiency is conferred.

[0221] Particularly, an increase of yield from 1.05-fold to 1.408-fold, for example plus at least 100% thereof, under conditions of nitrogen deficiency is conferred compared to a corresponding non-modified, e.g. non-transformed, wild type plant cell, a plant or a part thereof.

[0222] In a further embodiment, in case the activity of a polypeptide according to the polypeptide SEQ ID NO. 1328, or encoded by a nucleic acid molecule comprising the nucleic acid SEQ ID NO. 1327, or a homolog of said nucleic acid molecule or polypeptide, e.g. in case the activity of the Escherichia coli nucleic acid molecule or a polypeptide comprising the nucleic acid SEQ ID NO. 1327 or polypeptide SEQ ID NO. 1328, respectively, is increased or generated, e.g. if the activity of a nucleic acid molecule or a polypeptide comprising the nucleic acid or polypeptide or the consensus sequence or the polypeptide motif, as depicted in table I, II or IV, column 7 in the respective same line as the nucleic acid molecule SEQ ID NO. 1327 or polypeptide SEQ ID NO. 1328, respectively, is increased or generated or if the activity “transcription regulator (farR)” is increased or generated in a plant cell, plant or part thereof, especially if the polypeptide is cytoplasmic localized, an increased intrinsic yield as compared to a corresponding non-modified, e.g. a non-transformed, wild type plant cell, a plant or a part thereof is conferred. In one embodiment an increased yield under standard conditions, e.g. in the absence of nutrient deficiency as well as stress conditions, is conferred.

[0223] Particularly, an increase of yield from 1.05-fold to 1.221-fold, for example plus at least 100% thereof, under conditions of low temperature is conferred com-pared to a corresponding non-modified, e.g. non-transformed, wild type plant cell, a plant or a part thereof.

[0224] Accordingly, in one embodiment, in case the activity of a polypeptide according to the polypeptide SEQ ID NO. 1426, or encoded by a nucleic acid molecule comprising the nucleic acid SEQ ID NO. 1425, or a homolog of said nucleic acid molecule or polypeptide, e.g. in case the activity of the Escherichia coli nucleic acid molecule or a polypeptide, respectively, comprising the nucleic acid SEQ ID NO. 1425 or polypeptide SEQ ID NO. 1426, respectively, is increased or generated, e.g. if the activity of a nucleic acid molecule or a polypeptide comprising the nucleic acid or polypeptide or the consensus sequence or the polypeptide motif, as depicted in table I, II or IV, column 7 in the respective same line as the nucleic acid molecule SEQ ID NO. 1425 or polypeptide SEQ ID NO. 1426, respectively, is increased or generated or if the activity “flagellar protein” is increased or generated in a plant cell, plant or part thereof, especially if localized cytoplasmic, an increased yield as compared to a corresponding non-modified, e.g. a non-transformed, wild type plant cell, a plant or a part thereof is conferred.

[0225] In a further embodiment, in case the activity of a polypeptide according to the polypeptide SEQ ID NO. 1426, or encoded by a nucleic acid molecule comprising the nucleic acid SEQ ID NO. 1425, or a homolog of said nucleic acid molecule or polypeptide, e.g. in case the activity of the Escherichia coli nucleic acid molecule or a polypeptide comprising the nucleic acid SEQ ID NO. 1425 or polypeptide SEQ ID NO. 1426, respectively, is increased or generated, e.g. if the activity of a nucleic acid molecule or a polypeptide comprising the nucleic acid or polypeptide or the consensus sequence or the polypeptide motif, as depicted in table I, II or IV, column 7 in the respective same line as the nucleic acid molecule SEQ ID NO. 1425 or polypeptide SEQ ID NO. 1426, respectively, is increased or generated or if the activity “flagellar protein” is increased or generated in a plant cell, plant or part thereof, especially, if the polypeptide is Cytoplasmic localized, an increased biomass, compared to a corresponding non-modified, e.g. a non-transformed, wild type plant cell, a plant or a part thereof is conferred.

[0226] Particularly, an increase of yield from 1.1-fold to 1.325-fold, for example plus at least 100% thereof, under standard conditions, e.g. in the absence of nutrient deficiency as well as stress conditions is conferred compared to a corresponding non-modified, e.g. non-transformed, wild type plant cell, a plant or a part thereof.

[0227] In a further embodiment, in case the activity of a polypeptide according to the polypeptide SEQ ID NO. 1426, or encoded by a nucleic acid molecule comprising the nucleic acid SEQ ID NO. 1425, or a homolog of said nucleic acid molecule or polypeptide, e.g. in case the activity of the Escherichia coli nucleic acid molecule or a polypeptide comprising the nucleic acid SEQ ID NO. 1425 or polypeptide SEQ ID NO. 1426, respectively, is increased or generated, e.g. if the activity of a nucleic acid molecule or a polypeptide comprising the nucleic acid or polypeptide or the consensus sequence or the polypeptide motif, as depicted in table I, II or IV, column 7 in the respective same line as the nucleic acid molecule SEQ ID NO. 1425 or polypeptide SEQ ID NO. 1426, respectively, is increased or generated or if the activity “flagellar protein” is increased or generated in a plant cell, plant or part thereof, especially if the polypeptide is cytoplasmic localized, an increased nutrient use efficiency as compared to a corresponding non-modified, e.g. a non-transformed, wild type plant cell, a plant or a part thereof is conferred. In one embodiment an increased nitrogen use efficiency is conferred.

[0228] Particularly, an increase of yield from 1.05-fold to 1.741-fold, for example plus at least 100% thereof, under conditions of nitrogen deficiency is conferred compared to a corresponding non-modified, e.g. non-transformed, wild type plant cell, a plant or a part thereof.

[0229] In a further embodiment, in case the activity of a polypeptide according to the polypeptide SEQ ID NO. 1426, or encoded by a nucleic acid molecule comprising the nucleic acid SEQ ID NO. 1425, or a homolog of said nucleic acid molecule or polypeptide, e.g. in case the activity of the Escherichia coli nucleic acid molecule or a polypeptide comprising the nucleic acid SEQ ID NO. 1425 or polypeptide SEQ ID NO. 1426, respectively, is increased or generated, e.g. if the activity of a nucleic acid molecule or a polypeptide comprising the nucleic acid or polypeptide or the consensus sequence or the polypeptide motif, as depicted in table I, II or IV, column 7 in the respective same line as the nucleic acid molecule SEQ ID NO. 1425 or polypeptide SEQ ID NO. 1426, respectively, is increased or generated or if the activity “flagellar protein” is increased or generated in a plant cell, plant or part thereof, especially if the polypeptide is cytoplasmic localized, an increased intrinsic yield as compared to a corresponding non-modified, e.g. a non-transformed, wild type plant cell, a plant or a part thereof is conferred. In one embodiment an increased yield under standard conditions, e.g. in the absence of nutrient deficiency as well as stress conditions, is conferred.

[0230] Particularly, an increase of yield from 1.05-fold to 1.192-fold, for example plus at least 100% thereof, under conditions of low temperature is conferred com-pared to a corresponding non-modified, e.g. non-transformed, wild type plant cell, a plant or a part thereof.

[0231] Accordingly, in one embodiment, in case the activity of a polypeptide according to the polypeptide SEQ ID NO. 1450, or encoded by a nucleic acid molecule comprising the nucleic acid SEQ ID NO. 1449, or a homolog of said nucleic acid molecule or polypeptide, e.g. in case the activity of the Escherichia coli nucleic acid molecule or a polypeptide, respectively, comprising the nucleic acid SEQ ID NO. 1449 or polypeptide SEQ ID NO. 1450, respectively, is increased or generated, e.g. if the activity of a nucleic acid molecule or a polypeptide comprising the nucleic acid or polypeptide or the consensus sequence or the polypeptide motif, as depicted in table I, II or IV, column 7 in the respective same line as the nucleic acid molecule SEQ ID NO. 1449 or polypeptide SEQ ID NO. 1450, respectively, is increased or generated or if the activity “Short chain dehydrogenase” is increased or generated in a plant cell, plant or part thereof, especially if localized cytoplasmic, an increased yield as compared to a corresponding non-modified, e.g. a non-transformed, wild type plant cell, a plant or a part thereof is conferred.

[0232] In a further embodiment, in case the activity of a polypeptide according to the polypeptide SEQ ID NO. 1450, or encoded by a nucleic acid molecule comprising the nucleic acid SEQ ID NO. 1449, or a homolog of said nucleic acid molecule or polypeptide, e.g. in case the activity of the Escherichia coli nucleic acid molecule or a polypeptide comprising the nucleic acid SEQ ID NO. 1449 or polypeptide SEQ ID NO. 1450, respectively, is increased or generated, e.g. if the activity of a nucleic acid molecule or a polypeptide comprising the nucleic acid or polypeptide or the consensus sequence or the polypeptide motif, as depicted in table I, II or IV, column 7 in the respective same line as the nucleic acid molecule SEQ ID NO. 1449 or polypeptide SEQ ID NO. 1450, respectively, is increased or generated or if the activity “Short chain dehydrogenase” is increased or generated in a plant cell, plant or part thereof, especially, if the polypeptide is cytoplasmic localized, an increased biomass, compared to a corresponding non-modified, e.g. a non-transformed, wild type plant cell, a plant or a part thereof is conferred.

[0233] Particularly, an increase of yield from 1.1-fold to 1.246-fold, for example plus at least 100% thereof, under standard conditions, e.g. in the absence of nutrient deficiency as well as stress conditions is conferred compared to a corresponding non-modified, e.g. non-transformed, wild type plant cell, a plant or a part thereof.

[0234] In a further embodiment, in case the activity of a polypeptide according to the polypeptide SEQ ID NO. 1450, or encoded by a nucleic acid molecule comprising the nucleic acid SEQ ID NO. 1449, or a homolog of said nucleic acid molecule or polypeptide, e.g. in case the activity of the Escherichia coli nucleic acid molecule or a polypeptide comprising the nucleic acid SEQ ID NO. 1449 or polypeptide SEQ ID NO. 1450, respectively, is increased or generated, e.g. if the activity of a nucleic acid molecule or a polypeptide comprising the nucleic acid or polypeptide or the consensus sequence or the polypeptide motif, as depicted in table I, II or IV, column 7 in the respective same line as the nucleic acid molecule SEQ ID NO. 1449 or polypeptide SEQ ID NO. 1450, respectively, is increased or generated or if the activity “Short chain dehydrogenase” is increased or generated in a plant cell, plant or part thereof, especially if the polypeptide is cytoplasmic localized, an increased nutrient use efficiency as compared to a corresponding non-modified, e.g. a non-transformed, wild type plant cell, a plant or a part thereof is conferred. In one embodiment an increased nitrogen use efficiency is conferred.

[0235] Particularly, an increase of yield from 1.05-fold to 1.808-fold, for example plus at least 100% thereof, under conditions of nitrogen deficiency is conferred compared to a corresponding non-modified, e.g. non-transformed, wild type plant cell, a plant or a part thereof.

[0236] Accordingly, in one embodiment, in case the activity of a polypeptide according to the polypeptide SEQ ID NO. 2173, or encoded by a nucleic acid molecule comprising the nucleic acid SEQ ID NO. 2172, or a homolog of said nucleic acid molecule or polypeptide, e.g. in case the activity of the Glycine max nucleic acid molecule or a polypeptide, respectively, comprising the nucleic acid SEQ ID NO. 2172 or polypeptide SEQ ID NO. 2173, respectively, is increased or generated, e.g. if the activity of a nucleic acid molecule or a polypeptide comprising the nucleic acid or polypeptide or the consensus sequence or the polypeptide motif, as depicted in table I, II or IV, column 7 in the respective same line as the nucleic acid molecule SEQ ID NO. 2172 or polypeptide SEQ ID NO. 2173, respectively, is increased or generated or if the activity “BRICK1-like protein” is increased or generated in a plant cell, plant or part thereof, especially if localized cytoplasmic, an increased yield as compared to a corresponding non-modified, e.g. a non-transformed, wild type plant cell, a plant or a part thereof is conferred.

[0237] In a further embodiment, in case the activity of a polypeptide according to the polypeptide SEQ ID NO. 2173, or encoded by a nucleic acid molecule comprising the nucleic acid SEQ ID NO. 2172, or a homolog of said nucleic acid molecule or polypeptide, e.g. in case the activity of the Glycine max nucleic acid molecule or a polypeptide comprising the nucleic acid SEQ ID NO. 2172 or polypeptide SEQ ID NO. 2173, respectively, is increased or generated, e.g. if the activity of a nucleic acid molecule or a polypeptide comprising the nucleic acid or polypeptide or the consensus sequence or the polypeptide motif, as depicted in table I, II or IV, column 7 in the respective same line as the nucleic acid molecule SEQ ID NO. 2172 or polypeptide SEQ ID NO. 2173, respectively, is increased or generated or if the activity “BRICK1-like protein” is increased or generated in a plant cell, plant or part thereof, especially, if the polypeptide is Cytoplasmic localized, an increased biomass, compared to a corresponding non-modified, e.g. a non-transformed, wild type plant cell, a plant or a part thereof is conferred.

[0238] Particularly, an increase of yield from 1.1-fold to 1.373-fold, for example plus at least 100% thereof, under standard conditions, e.g. in the absence of nutrient deficiency as well as stress conditions is conferred compared to a corresponding non-modified, e.g. non-transformed, wild type plant cell, a plant or a part thereof.

[0239] In a further embodiment, in case the activity of a polypeptide according to the polypeptide SEQ ID NO. 2173, or encoded by a nucleic acid molecule comprising the nucleic acid SEQ ID NO. 2172, or a homolog of said nucleic acid molecule or polypeptide, e.g. in case the activity of the Glycine max nucleic acid molecule or a polypeptide comprising the nucleic acid SEQ ID NO. 2172 or polypeptide SEQ ID NO. 2173, respectively, is increased or generated, e.g. if the activity of a nucleic acid molecule or a polypeptide comprising the nucleic acid or polypeptide or the consensus sequence or the polypeptide motif, as depicted in table I, II or IV, column 7 in the respective same line as the nucleic acid molecule SEQ ID NO. 2172 or polypeptide SEQ ID NO. 2173, respectively, is increased or generated or if the activity “BRICK1-like protein” is increased or generated in a plant cell, plant or part thereof, especially if the polypeptide is cytoplasmic localized, an increased nutrient use efficiency as compared to a corresponding non-modified, e.g. a non-transformed, wild type plant cell, a plant or a part thereof is conferred. In one embodiment an increased nitrogen use efficiency is conferred.

[0240] Particularly, an increase of yield from 1.05-fold to 1.994-fold, for example plus at least 100% thereof, under conditions of nitrogen deficiency is conferred compared to a corresponding non-modified, e.g. non-transformed, wild type plant cell, a plant or a part thereof.

[0241] In a further embodiment, in case the activity of a polypeptide according to the polypeptide SEQ ID NO. 2173, or encoded by a nucleic acid molecule comprising the nucleic acid SEQ ID NO. 2172, or a homolog of said nucleic acid molecule or polypeptide, e.g. in case the activity of the Glycine max nucleic acid molecule or a polypeptide comprising the nucleic acid SEQ ID NO. 2172 or polypeptide SEQ ID NO. 2173, respectively, is increased or generated, e.g. if the activity of a nucleic acid molecule or a polypeptide comprising the nucleic acid or polypeptide or the consensus sequence or the polypeptide motif, as depicted in table I, II or IV, column 7 in the respective same line as the nucleic acid molecule SEQ ID NO. 2172 or polypeptide SEQ ID NO. 2173, respectively, is increased or generated or if the activity “BRICK1-like protein” is increased or generated in a plant cell, plant or part thereof, especially if the polypeptide is cytoplasmic localized, an increased intrinsic yield as compared to a corresponding non-modified, e.g. a non-transformed, wild type plant cell, a plant or a part thereof is conferred. In one embodiment an increased yield under standard conditions, e.g. in the absence of nutrient deficiency as well as stress conditions, is conferred.

[0242] Particularly, an increase of yield from 1.05-fold to 1.126-fold, for example plus at least 100% thereof, under conditions of low temperature is conferred com-pared to a corresponding non-modified, e.g. non-transformed, wild type plant cell, a plant or a part thereof.

[0243] Accordingly, in one embodiment, in case the activity of a polypeptide according to the polypeptide SEQ ID NO. 2215, or encoded by a nucleic acid molecule comprising the nucleic acid SEQ ID NO. 2214, or a homolog of said nucleic acid molecule or polypeptide, e.g. in case the activity of the Synechocystis sp. nucleic acid molecule or a polypeptide, respectively, comprising the nucleic acid SEQ ID NO. 2214 or polypeptide SEQ ID NO. 2215, respectively, is increased or generated, e.g. if the activity of a nucleic acid molecule or a polypeptide comprising the nucleic acid or polypeptide or the consensus sequence or the polypeptide motif, as depicted in table I, II or IV, column 7 in the respective same line as the nucleic acid molecule SEQ ID NO. 2214 or polypeptide SEQ ID NO. 2215, respectively, is increased or generated or if the activity “Sterol-C-methyltransferase” is increased or generated in a plant cell, plant or part thereof, especially if localized mitochondrial, an increased yield as compared to a corresponding non-modified, e.g. a non-transformed, wild type plant cell, a plant or a part thereof is conferred.

[0244] In a further embodiment, in case the activity of a polypeptide according to the polypeptide SEQ ID NO. 2215, or encoded by a nucleic acid molecule comprising the nucleic acid SEQ ID NO. 2214, or a homolog of said nucleic acid molecule or polypeptide, e.g. in case the activity of the Synechocystis sp. nucleic acid molecule or a polypeptide comprising the nucleic acid SEQ ID NO. 2214 or polypeptide SEQ ID NO. 2215, respectively, is increased or generated, e.g. if the activity of a nucleic acid molecule or a polypeptide comprising the nucleic acid or polypeptide or the consensus sequence or the polypeptide motif, as depicted in table I, II or IV, column 7 in the respective same line as the nucleic acid molecule SEQ ID NO. 2214 or polypeptide SEQ ID NO. 2215, respectively, is increased or generated or if the activity “Sterol-C-methyltransferase” is increased or generated in a plant cell, plant or part thereof, especially, if the polypeptide is mitochondrial localized, an increased biomass, compared to a corresponding non-modified, e.g. a non-transformed, wild type plant cell, a plant or a part thereof is conferred.

[0245] Particularly, an increase of yield from 1.1-fold to 1.235-fold, for example plus at least 100% thereof, under standard conditions, e.g. in the absence of nutrient deficiency as well as stress conditions is conferred compared to a corresponding non-modified, e.g. non-transformed, wild type plant cell, a plant or a part thereof.

[0246] In a further embodiment, in case the activity of a polypeptide according to the polypeptide SEQ ID NO. 2215, or encoded by a nucleic acid molecule comprising the nucleic acid SEQ ID NO. 2214, or a homolog of said nucleic acid molecule or polypeptide, e.g. in case the activity of the Synechocystis sp. nucleic acid molecule or a polypeptide comprising the nucleic acid SEQ ID NO. 2214 or polypeptide SEQ ID NO. 2215, respectively, is increased or generated, e.g. if the activity of a nucleic acid molecule or a polypeptide comprising the nucleic acid or polypeptide or the consensus sequence or the polypeptide motif, as depicted in table I, II or IV, column 7 in the respective same line as the nucleic acid molecule SEQ ID NO. 2214 or polypeptide SEQ ID NO. 2215, respectively, is increased or generated or if the activity “Sterol-C-methyltransferase” is increased or generated in a plant cell, plant or part thereof, especially if the polypeptide is mitochondrial localized, an increased nutrient use efficiency as compared to a corresponding non-modified, e.g. a non-transformed, wild type plant cell, a plant or a part thereof is conferred. In one embodiment an increased nitrogen use efficiency is conferred.

[0247] Particularly, an increase of yield from 1.05-fold to 1.443-fold, for example plus at least 100% thereof, under conditions of nitrogen deficiency is conferred compared to a corresponding non-modified, e.g. non-transformed, wild type plant cell, a plant or a part thereof.

[0248] Accordingly, in one embodiment, in case the activity of a polypeptide according to the polypeptide SEQ ID NO. 2342, or encoded by a nucleic acid molecule comprising the nucleic acid SEQ ID NO. 2341, or a homolog of said nucleic acid molecule or polypeptide, e.g. in case the activity of the Saccharomyces cerevisiae nucleic acid molecule or a polypeptide, respectively, comprising the nucleic acid SEQ ID NO. 2341 or polypeptide SEQ ID NO. 2342, respectively, is increased or generated, e.g. if the activity of a nucleic acid molecule or a polypeptide comprising the nucleic acid or polypeptide or the consensus sequence or the polypeptide motif, as depicted in table I, II or IV, column 7 in the respective same line as the nucleic acid molecule SEQ ID NO. 2341 or polypeptide SEQ ID NO. 2342, respectively, is increased or generated or if the activity “Cav1 protein” is increased or generated in a plant cell, plant or part thereof, especially if localized cytoplasmic, an increased yield as compared to a corresponding non-modified, e.g. a non-transformed, wild type plant cell, a plant or a part thereof is conferred.

[0249] In a further embodiment, in case the activity of a polypeptide according to the polypeptide SEQ ID NO. 2342, or encoded by a nucleic acid molecule comprising the nucleic acid SEQ ID NO. 2341, or a homolog of said nucleic acid molecule or polypeptide, e.g. in case the activity of the Saccharomyces cerevisiae nucleic acid molecule or a polypeptide comprising the nucleic acid SEQ ID NO. 2341 or polypeptide SEQ ID NO. 2342, respectively, is increased or generated, e.g. if the activity of a nucleic acid molecule or a polypeptide comprising the nucleic acid or polypeptide or the consensus sequence or the polypeptide motif, as depicted in table I, II or IV, column 7 in the respective same line as the nucleic acid molecule SEQ ID NO. 2341 or polypeptide SEQ ID NO. 2342, respectively, is increased or generated or if the activity “Cav1 protein” is increased or generated in a plant cell, plant or part thereof, especially, if the polypeptide is cytoplasmic localized, an increased biomass, compared to a corresponding non-modified, e.g. a non-transformed, wild type plant cell, a plant or a part thereof is conferred.

[0250] Particularly, an increase of yield from 1.1-fold to 1.391-fold, for example plus at least 100% thereof, under standard conditions, e.g. in the absence of nutrient deficiency as well as stress conditions is conferred compared to a corresponding non-modified, e.g. non-transformed, wild type plant cell, a plant or a part thereof.

[0251] In a further embodiment, in case the activity of a polypeptide according to the polypeptide SEQ ID NO. 2342, or encoded by a nucleic acid molecule comprising the nucleic acid SEQ ID NO. 2341, or a homolog of said nucleic acid molecule or polypeptide, e.g. in case the activity of the Saccharomyces cerevisiae nucleic acid molecule or a polypeptide comprising the nucleic acid SEQ ID NO. 2341 or polypeptide SEQ ID NO. 2342, respectively, is increased or generated, e.g. if the activity of a nucleic acid molecule or a polypeptide comprising the nucleic acid or polypeptide or the consensus sequence or the polypeptide motif, as depicted in table I, II or IV, column 7 in the respective same line as the nucleic acid molecule SEQ ID NO. 2341 or polypeptide SEQ ID NO. 2342, respectively, is increased or generated or if the activity “Cav1 protein” is increased or generated in a plant cell, plant or part thereof, especially if the polypeptide is Cytoplasmic localized, an increased nutrient use efficiency as compared to a corresponding non-modified, e.g. a non-transformed, wild type plant cell, a plant or a part thereof is conferred. In one embodiment an increased nitrogen use efficiency is conferred.

[0252] Particularly, an increase of yield from 1.05-fold to 1.620-fold, for example plus at least 100% thereof, under conditions of nitrogen deficiency is conferred compared to a corresponding non-modified, e.g. non-transformed, wild type plant cell, a plant or a part thereof.

[0253] In a further embodiment, in case the activity of a polypeptide according to the polypeptide SEQ ID NO. 2342, or encoded by a nucleic acid molecule comprising the nucleic acid SEQ ID NO. 2341, or a homolog of said nucleic acid molecule or polypeptide, e.g. in case the activity of the Saccharomyces cerevisiae nucleic acid molecule or a polypeptide comprising the nucleic acid SEQ ID NO. 2341 or polypeptide SEQ ID NO. 2342, respectively, is increased or generated, e.g. if the activity of a nucleic acid molecule or a polypeptide comprising the nucleic acid or polypeptide or the consensus sequence or the polypeptide motif, as depicted in table I, II or IV, column 7 in the respective same line as the nucleic acid molecule SEQ ID NO. 2341 or polypeptide SEQ ID NO. 2342, respectively, is increased or generated or if the activity “Cav1 protein” is increased or generated in a plant cell, plant or part thereof, especially if the polypeptide is cytoplasmic localized, an increased intrinsic yield as compared to a corresponding non-modified, e.g. a non-transformed, wild type plant cell, a plant or a part thereof is conferred. In one embodiment an increased yield under standard conditions, e.g. in the absence of nutrient deficiency as well as stress conditions, is conferred.

[0254] Particularly, an increase of yield from 1.05-fold to 1.123-fold, for example plus at least 100% thereof, under conditions of low temperature is conferred com-pared to a corresponding non-modified, e.g. non-transformed, wild type plant cell, a plant or a part thereof.

[0255] Accordingly, in one embodiment, in case the activity of a polypeptide according to the polypeptide SEQ ID NO. 2346, or encoded by a nucleic acid molecule comprising the nucleic acid SEQ ID NO. 2345, or a homolog of said nucleic acid molecule or polypeptide, e.g. in case the activity of the Saccharomyces cerevisiae nucleic acid molecule or a polypeptide, respectively, comprising the nucleic acid SEQ ID NO. 2345 or polypeptide SEQ ID NO. 2346, respectively, is increased or generated, e.g. if the activity of a nucleic acid molecule or a polypeptide comprising the nucleic acid or polypeptide or the consensus sequence or the polypeptide motif, as depicted in table I, II or IV, column 7 in the respective same line as the nucleic acid molecule SEQ ID NO. 2345 or polypeptide SEQ ID NO. 2346, respectively, is increased or generated or if the activity “G2/mitotic-specific cyclin” is increased or generated in a plant cell, plant or part thereof, especially if localized cytoplasmic, an increased yield as compared to a corresponding non-modified, e.g. a non-transformed, wild type plant cell, a plant or a part thereof is conferred.

[0256] In a further embodiment, in case the activity of a polypeptide according to the polypeptide SEQ ID NO. 2346, or encoded by a nucleic acid molecule comprising the nucleic acid SEQ ID NO. 2345, or a homolog of said nucleic acid molecule or polypeptide, e.g. in case the activity of the Saccharomyces cerevisiae nucleic acid molecule or a polypeptide comprising the nucleic acid SEQ ID NO. 2345 or polypeptide SEQ ID NO. 2346, respectively, is increased or generated, e.g. if the activity of a nucleic acid molecule or a polypeptide comprising the nucleic acid or polypeptide or the consensus sequence or the polypeptide motif, as depicted in table I, II or IV, column 7 in the respective same line as the nucleic acid molecule SEQ ID NO. 2345 or polypeptide SEQ ID NO. 2346, respectively, is increased or generated or if the activity “G2/mitotic-specific cyclin” is increased or generated in a plant cell, plant or part thereof, especially, if the polypeptide is cytoplasmic localized, an increased biomass, compared to a corresponding non-modified, e.g. a non-transformed, wild type plant cell, a plant or a part thereof is conferred.

[0257] Particularly, an increase of yield from 1.1-fold to 1.312-fold, for example plus at least 100% thereof, under standard conditions, e.g. in the absence of nutrient deficiency as well as stress conditions is conferred compared to a corresponding non-modified, e.g. non-transformed, wild type plant cell, a plant or a part thereof.

[0258] In a further embodiment, in case the activity of a polypeptide according to the polypeptide SEQ ID NO. 2346, or encoded by a nucleic acid molecule comprising the nucleic acid SEQ ID NO. 2345, or a homolog of said nucleic acid molecule or polypeptide, e.g. in case the activity of the Saccharomyces cerevisiae nucleic acid molecule or a polypeptide comprising the nucleic acid SEQ ID NO. 2345 or polypeptide SEQ ID NO. 2346, respectively, is increased or generated, e.g. if the activity of a nucleic acid molecule or a polypeptide comprising the nucleic acid or polypeptide or the consensus sequence or the polypeptide motif, as depicted in table I, II or IV, column 7 in the respective same line as the nucleic acid molecule SEQ ID NO. 2345 or polypeptide SEQ ID NO. 2346, respectively, is increased or generated or if the activity “G2/mitotic-specific cyclin” is increased or generated in a plant cell, plant or part thereof, especially if the polypeptide is cytoplasmic localized, an increased nutrient use efficiency as compared to a corresponding non-modified, e.g. a non-transformed, wild type plant cell, a plant or a part thereof is conferred. In one embodiment an increased nitrogen use efficiency is conferred.

[0259] Particularly, an increase of yield from 1.05-fold to 1.291-fold, for example plus at least 100% thereof, under conditions of nitrogen deficiency is conferred compared to a corresponding non-modified, e.g. non-transformed, wild type plant cell, a plant or a part thereof.

[0260] Accordingly, in one embodiment, in case the activity of a polypeptide according to the polypeptide SEQ ID NO. 2464, or encoded by a nucleic acid molecule comprising the nucleic acid SEQ ID NO. 2463, or a homolog of said nucleic acid molecule or polypeptide, e.g. in case the activity of the Saccharomyces cerevisiae nucleic acid molecule or a polypeptide, respectively, comprising the nucleic acid SEQ ID NO. 2463 or polypeptide SEQ ID NO. 2464, respectively, is increased or generated, e.g. if the activity of a nucleic acid molecule or a polypeptide comprising the nucleic acid or polypeptide or the consensus sequence or the polypeptide motif, as depicted in table I, II or IV, column 7 in the respective same line as the nucleic acid molecule SEQ ID NO. 2463 or polypeptide SEQ ID NO. 2464, respectively, is increased or generated or if the activity “Adaptin medium chain homolog APM2” is increased or generated in a plant cell, plant or part thereof, especially if localized cytoplasmic, an increased yield as compared to a corresponding non-modified, e.g. a non-transformed, wild type plant cell, a plant or a part thereof is conferred.

[0261] In a further embodiment, in case the activity of a polypeptide according to the polypeptide SEQ ID NO. 2464, or encoded by a nucleic acid molecule comprising the nucleic acid SEQ ID NO. 2463, or a homolog of said nucleic acid molecule or polypeptide, e.g. in case the activity of the Saccharomyces cerevisiae nucleic acid molecule or a polypeptide comprising the nucleic acid SEQ ID NO. 2463 or polypeptide SEQ ID NO. 2464, respectively, is increased or generated, e.g. if the activity of a nucleic acid molecule or a polypeptide comprising the nucleic acid or polypeptide or the consensus sequence or the polypeptide motif, as depicted in table I, II or IV, column 7 in the respective same line as the nucleic acid molecule SEQ ID NO. 2463 or polypeptide SEQ ID NO. 2464, respectively, is increased or generated or if the activity “Adaptin medium chain homolog APM2” is increased or generated in a plant cell, plant or part thereof, especially, if the polypeptide is Cytoplasmic localized, an increased biomass, compared to a corresponding non-modified, e.g. a non-transformed, wild type plant cell, a plant or a part thereof is conferred.

[0262] Particularly, an increase of yield from 1.1-fold to 1.367-fold, for example plus at least 100% thereof, under standard conditions, e.g. in the absence of nutrient deficiency as well as stress conditions is conferred compared to a corresponding non-modified, e.g. non-transformed, wild type plant cell, a plant or a part thereof.

[0263] In a further embodiment, in case the activity of a polypeptide according to the polypeptide SEQ ID NO. 2464, or encoded by a nucleic acid molecule comprising the nucleic acid SEQ ID NO. 2463, or a homolog of said nucleic acid molecule or polypeptide, e.g. in case the activity of the Saccharomyces cerevisiae nucleic acid molecule or a polypeptide comprising the nucleic acid SEQ ID NO. 2463 or polypeptide SEQ ID NO. 2464, respectively, is increased or generated, e.g. if the activity of a nucleic acid molecule or a polypeptide comprising the nucleic acid or polypeptide or the consensus sequence or the polypeptide motif, as depicted in table I, II or IV, column 7 in the respective same line as the nucleic acid molecule SEQ ID NO. 2463 or polypeptide SEQ ID NO. 2464, respectively, is increased or generated or if the activity “Adaptin medium chain homolog APM2” is increased or generated in a plant cell, plant or part thereof, especially if the polypeptide is Cytoplasmic localized, an increased nutrient use efficiency as compared to a corresponding non-modified, e.g. a non-transformed, wild type plant cell, a plant or a part thereof is conferred. In one embodiment an increased nitrogen use efficiency is conferred.

[0264] Particularly, an increase of yield from 1.05-fold to 1.343-fold, for example plus at least 100% thereof, under conditions of nitrogen deficiency is conferred compared to a corresponding non-modified, e.g. non-transformed, wild type plant cell, a plant or a part thereof.

[0265] Accordingly, in one embodiment, in case the activity of a polypeptide according to the polypeptide SEQ ID NO. 2511, or encoded by a nucleic acid molecule comprising the nucleic acid SEQ ID NO. 2510, or a homolog of said nucleic acid molecule or polypeptide, e.g. in case the activity of the Saccharomyces cerevisiae nucleic acid molecule or a polypeptide, respectively, comprising the nucleic acid SEQ ID NO. 2510 or polypeptide SEQ ID NO. 2511, respectively, is increased or generated, e.g. if the activity of a nucleic acid molecule or a polypeptide comprising the nucleic acid or polypeptide or the consensus sequence or the polypeptide motif, as depicted in table I, II or IV, column 7 in the respective same line as the nucleic acid molecule SEQ ID NO. 2510 or polypeptide SEQ ID NO. 2511, respectively, is increased or generated or if the activity “Serine/threonine-protein kinase” is increased or generated in a plant cell, plant or part thereof, especially if localized Cytoplasmic, an increased yield as compared to a corresponding non-modified, e.g. a non-transformed, wild type plant cell, a plant or a part thereof is conferred.

[0266] In a further embodiment, in case the activity of a polypeptide according to the polypeptide SEQ ID NO. 2511, or encoded by a nucleic acid molecule comprising the nucleic acid SEQ ID NO. 2510, or a homolog of said nucleic acid molecule or polypeptide, e.g. in case the activity of the Saccharomyces cerevisiae nucleic acid molecule or a polypeptide comprising the nucleic acid SEQ ID NO. 2510 or polypeptide SEQ ID NO. 2511, respectively, is increased or generated, e.g. if the activity of a nucleic acid molecule or a polypeptide comprising the nucleic acid or polypeptide or the consensus sequence or the polypeptide motif, as depicted in table I, II or IV, column 7 in the respective same line as the nucleic acid molecule SEQ ID NO. 2510 or polypeptide SEQ ID NO. 2511, respectively, is increased or generated or if the activity “Serine/threonine-protein kinase” is increased or generated in a plant cell, plant or part thereof, especially, if the polypeptide is cytoplasmic localized, an increased biomass, compared to a corresponding non-modified, e.g. a non-transformed, wild type plant cell, a plant or a part thereof is conferred.

[0267] Particularly, an increase of yield from 1.1-fold to 1.522-fold, for example plus at least 100% thereof, under standard conditions, e.g. in the absence of nutrient deficiency as well as stress conditions is conferred compared to a corresponding non-modified, e.g. non-transformed, wild type plant cell, a plant or a part thereof.

[0268] In a further embodiment, in case the activity of a polypeptide according to the polypeptide SEQ ID NO. 2511, or encoded by a nucleic acid molecule comprising the nucleic acid SEQ ID NO. 2510, or a homolog of said nucleic acid molecule or polypeptide, e.g. in case the activity of the Saccharomyces cerevisiae nucleic acid molecule or a polypeptide comprising the nucleic acid SEQ ID NO. 2510 or polypeptide SEQ ID NO. 2511, respectively, is increased or generated, e.g. if the activity of a nucleic acid molecule or a polypeptide comprising the nucleic acid or polypeptide or the consensus sequence or the polypeptide motif, as depicted in table I, II or IV, column 7 in the respective same line as the nucleic acid molecule SEQ ID NO. 2510 or polypeptide SEQ ID NO. 2511, respectively, is increased or generated or if the activity “Serine/threonine-protein kinase” is increased or generated in a plant cell, plant or part thereof, especially if the polypeptide is cytoplasmic localized, an increased nutrient use efficiency as compared to a corresponding non-modified, e.g. a non-transformed, wild type plant cell, a plant or a part thereof is conferred. In one embodiment an increased nitrogen use efficiency is conferred.

[0269] Particularly, an increase of yield from 1.05-fold to 1.389-fold, for example plus at least 100% thereof, under conditions of nitrogen deficiency is conferred compared to a corresponding non-modified, e.g. non-transformed, wild type plant cell, a plant or a part thereof.

[0270] In a further embodiment, in case the activity of a polypeptide according to the polypeptide SEQ ID NO. 2511, or encoded by a nucleic acid molecule comprising the nucleic acid SEQ ID NO. 2510, or a homolog of said nucleic acid molecule or polypeptide, e.g. in case the activity of the Saccharomyces cerevisiae nucleic acid molecule or a polypeptide comprising the nucleic acid SEQ ID NO. 2510 or polypeptide SEQ ID NO. 2511, respectively, is increased or generated, e.g. if the activity of a nucleic acid molecule or a polypeptide comprising the nucleic acid or polypeptide or the consensus sequence or the polypeptide motif, as depicted in table I, II or IV, column 7 in the respective same line as the nucleic acid molecule SEQ ID NO. 2510 or polypeptide SEQ ID NO. 2511, respectively, is increased or generated or if the activity “Serine/threonine-protein kinase” is increased or generated in a plant cell, plant or part thereof, especially if the polypeptide is cytoplasmic localized, an increased intrinsic yield as compared to a corresponding non-modified, e.g. a non-transformed, wild type plant cell, a plant or a part thereof is conferred. In one embodiment an increased yield under standard conditions, e.g. in the absence of nutrient deficiency as well as stress conditions, is conferred.

[0271] Particularly, an increase of yield from 1.05-fold to 1.227-fold, for example plus at least 100% thereof, under conditions of low temperature is conferred com-pared to a corresponding non-modified, e.g. non-transformed, wild type plant cell, a plant or a part thereof.

[0272] Accordingly, in one embodiment, in case the activity of a polypeptide according to the polypeptide SEQ ID NO. 2596, or encoded by a nucleic acid molecule comprising the nucleic acid SEQ ID NO. 2595, or a homolog of said nucleic acid molecule or polypeptide, e.g. in case the activity of the Saccharomyces cerevisiae nucleic acid molecule or a polypeptide, respectively, comprising the nucleic acid SEQ ID NO. 2595 or polypeptide SEQ ID NO. 2596, respectively, is increased or generated, e.g. if the activity of a nucleic acid molecule or a polypeptide comprising the nucleic acid or polypeptide or the consensus sequence or the polypeptide motif, as depicted in table I, II or IV, column 7 in the respective same line as the nucleic acid molecule SEQ ID NO. 2595 or polypeptide SEQ ID NO. 2596, respectively, is increased or generated or if the activity “Ykr015c-protein” is increased or generated in a plant cell, plant or part thereof, especially if localized cytoplasmic, an increased yield as compared to a corresponding non-modified, e.g. a non-transformed, wild type plant cell, a plant or a part thereof is conferred.

[0273] In a further embodiment, in case the activity of a polypeptide according to the polypeptide SEQ ID NO. 2596, or encoded by a nucleic acid molecule comprising the nucleic acid SEQ ID NO. 2595, or a homolog of said nucleic acid molecule or polypeptide, e.g. in case the activity of the Saccharomyces cerevisiae nucleic acid molecule or a polypeptide comprising the nucleic acid SEQ ID NO. 2595 or polypeptide SEQ ID NO. 2596, respectively, is increased or generated, e.g. if the activity of a nucleic acid molecule or a polypeptide comprising the nucleic acid or polypeptide or the consensus sequence or the polypeptide motif, as depicted in table I, II or IV, column 7 in the respective same line as the nucleic acid molecule SEQ ID NO. 2595 or polypeptide SEQ ID NO. 2596, respectively, is increased or generated or if the activity “Ykr015c-protein” is increased or generated in a plant cell, plant or part thereof, especially, if the polypeptide is cytoplasmic localized, an increased biomass, compared to a corresponding non-modified, e.g. a non-transformed, wild type plant cell, a plant or a part thereof is conferred.

[0274] Particularly, an increase of yield from 1.1-fold to 1.347-fold, for example plus at least 100% thereof, under standard conditions, e.g. in the absence of nutrient deficiency as well as stress conditions is conferred compared to a corresponding non-modified, e.g. non-transformed, wild type plant cell, a plant or a part thereof.

[0275] In a further embodiment, in case the activity of a polypeptide according to the polypeptide SEQ ID NO. 2596, or encoded by a nucleic acid molecule comprising the nucleic acid SEQ ID NO. 2595, or a homolog of said nucleic acid molecule or polypeptide, e.g. in case the activity of the Saccharomyces cerevisiae nucleic acid molecule or a polypeptide comprising the nucleic acid SEQ ID NO. 2595 or polypeptide SEQ ID NO. 2596, respectively, is increased or generated, e.g. if the activity of a nucleic acid molecule or a polypeptide comprising the nucleic acid or polypeptide or the consensus sequence or the polypeptide motif, as depicted in table I, II or IV, column 7 in the respective same line as the nucleic acid molecule SEQ ID NO. 2595 or polypeptide SEQ ID NO. 2596, respectively, is increased or generated or if the activity “Ykr015c-protein” is increased or generated in a plant cell, plant or part thereof, especially if the polypeptide is cytoplasmic localized, an increased nutrient use efficiency as compared to a corresponding non-modified, e.g. a non-transformed, wild type plant cell, a plant or a part thereof is conferred. In one embodiment an increased nitrogen use efficiency is conferred.

[0276] Particularly, an increase of yield from 1.05-fold to 1.160-fold, for example plus at least 100% thereof, under conditions of nitrogen deficiency is conferred compared to a corresponding non-modified, e.g. non-transformed, wild type plant cell, a plant or a part thereof.

[0277] Accordingly, in one embodiment, in case the activity of a polypeptide according to the polypeptide SEQ ID NO. 2600, or encoded by a nucleic acid molecule comprising the nucleic acid SEQ ID NO. 2599, or a homolog of said nucleic acid molecule or polypeptide, e.g. in case the activity of the Saccharomyces cerevisiae nucleic acid molecule or a polypeptide, respectively, comprising the nucleic acid SEQ ID NO. 2599 or polypeptide SEQ ID NO. 2600, respectively, is increased or generated, e.g. if the activity of a nucleic acid molecule or a polypeptide comprising the nucleic acid or polypeptide or the consensus sequence or the polypeptide motif, as depicted in table I, II or IV, column 7 in the respective same line as the nucleic acid molecule SEQ ID NO. 2599 or polypeptide SEQ ID NO. 2600, respectively, is increased or generated or if the activity “RNA polymerase II holoenzyme cyclin-like subunit” is increased or generated in a plant cell, plant or part thereof, especially if localized cytoplasmic, an increased yield as compared to a corresponding non-modified, e.g. a non-transformed, wild type plant cell, a plant or a part thereof is conferred.

[0278] In a further embodiment, in case the activity of a polypeptide according to the polypeptide SEQ ID NO. 2600, or encoded by a nucleic acid molecule comprising the nucleic acid SEQ ID NO. 2599, or a homolog of said nucleic acid molecule or polypeptide, e.g. in case the activity of the Saccharomyces cerevisiae nucleic acid molecule or a polypeptide comprising the nucleic acid SEQ ID NO. 2599 or polypeptide SEQ ID NO. 2600, respectively, is increased or generated, e.g. if the activity of a nucleic acid molecule or a polypeptide comprising the nucleic acid or polypeptide or the consensus sequence or the polypeptide motif, as depicted in table I, II or IV, column 7 in the respective same line as the nucleic acid molecule SEQ ID NO. 2599 or polypeptide SEQ ID NO. 2600, respectively, is increased or generated or if the activity “RNA polymerase II holoenzyme cyclin-like subunit” is increased or generated in a plant cell, plant or part thereof, especially, if the polypeptide is cytoplasmic localized, an increased biomass, compared to a corresponding non-modified, e.g. a non-transformed, wild type plant cell, a plant or a part thereof is conferred.

[0279] Particularly, an increase of yield from 1.1-fold to 1.376-fold, for example plus at least 100% thereof, under standard conditions, e.g. in the absence of nutrient deficiency as well as stress conditions is conferred compared to a corresponding non-modified, e.g. non-transformed, wild type plant cell, a plant or a part thereof.

[0280] In a further embodiment, in case the activity of a polypeptide according to the polypeptide SEQ ID NO. 2600, or encoded by a nucleic acid molecule comprising the nucleic acid SEQ ID NO. 2599, or a homolog of said nucleic acid molecule or polypeptide, e.g. in case the activity of the Saccharomyces cerevisiae nucleic acid molecule or a polypeptide comprising the nucleic acid SEQ ID NO. 2599 or polypeptide SEQ ID NO. 2600, respectively, is increased or generated, e.g. if the activity of a nucleic acid molecule or a polypeptide comprising the nucleic acid or polypeptide or the consensus sequence or the polypeptide motif, as depicted in table I, II or IV, column 7 in the respective same line as the nucleic acid molecule SEQ ID NO. 2599 or polypeptide SEQ ID NO. 2600, respectively, is increased or generated or if the activity “RNA polymerase II holoenzyme cyclin-like subunit” is increased or generated in a plant cell, plant or part thereof, especially if the polypeptide is Cytoplasmic localized, an increased nutrient use efficiency as compared to a corresponding non-modified, e.g. a non-transformed, wild type plant cell, a plant or a part thereof is conferred. In one embodiment an increased nitrogen use efficiency is conferred.

[0281] Particularly, an increase of yield from 1.05-fold to 1.649-fold, for example plus at least 100% thereof, under conditions of nitrogen deficiency is conferred compared to a corresponding non-modified, e.g. non-transformed, wild type plant cell, a plant or a part thereof.

[0282] Accordingly, in one embodiment, in case the activity of a polypeptide according to the polypeptide SEQ ID NO. 2646, or encoded by a nucleic acid molecule comprising the nucleic acid SEQ ID NO. 2645, or a homolog of said nucleic acid molecule or polypeptide, e.g. in case the activity of the Saccharomyces cerevisiae nucleic acid molecule or a polypeptide, respectively, comprising the nucleic acid SEQ ID NO. 2645 or polypeptide SEQ ID NO. 2646, respectively, is increased or generated, e.g. if the activity of a nucleic acid molecule or a polypeptide comprising the nucleic acid or polypeptide or the consensus sequence or the polypeptide motif, as depicted in table I, II or IV, column 7 in the respective same line as the nucleic acid molecule SEQ ID NO. 2645 or polypeptide SEQ ID NO. 2646, respectively, is increased or generated or if the activity “Membrane protein” is increased or generated in a plant cell, plant or part thereof, especially if localized plastidic, an increased yield as compared to a corresponding non-modified, e.g. a non-transformed, wild type plant cell, a plant or a part thereof is conferred.

[0283] In a further embodiment, in case the activity of a polypeptide according to the polypeptide SEQ ID NO. 2646, or encoded by a nucleic acid molecule comprising the nucleic acid SEQ ID NO. 2645, or a homolog of said nucleic acid molecule or polypeptide, e.g. in case the activity of the Saccharomyces cerevisiae nucleic acid molecule or a polypeptide comprising the nucleic acid SEQ ID NO. 2645 or polypeptide SEQ ID NO. 2646, respectively, is increased or generated, e.g. if the activity of a nucleic acid molecule or a polypeptide comprising the nucleic acid or polypeptide or the consensus sequence or the polypeptide motif, as depicted in table I, II or IV, column 7 in the respective same line as the nucleic acid molecule SEQ ID NO. 2645 or polypeptide SEQ ID NO. 2646, respectively, is increased or generated or if the activity “Membrane protein” is increased or generated in a plant cell, plant or part thereof, especially, if the polypeptide is plastidic localized, an increased biomass, compared to a corresponding non-modified, e.g. a non-transformed, wild type plant cell, a plant or a part thereof is conferred.

[0284] Particularly, an increase of yield from 1.1-fold to 1.261-fold, for example plus at least 100% thereof, under standard conditions, e.g. in the absence of nutrient deficiency as well as stress conditions is conferred compared to a corresponding non-modified, e.g. non-transformed, wild type plant cell, a plant or a part thereof.

[0285] In a further embodiment, in case the activity of a polypeptide according to the polypeptide SEQ ID NO. 2646, or encoded by a nucleic acid molecule comprising the nucleic acid SEQ ID NO. 2645, or a homolog of said nucleic acid molecule or polypeptide, e.g. in case the activity of the Saccharomyces cerevisiae nucleic acid molecule or a polypeptide comprising the nucleic acid SEQ ID NO. 2645 or polypeptide SEQ ID NO. 2646, respectively, is increased or generated, e.g. if the activity of a nucleic acid molecule or a polypeptide comprising the nucleic acid or polypeptide or the consensus sequence or the polypeptide motif, as depicted in table I, II or IV, column 7 in the respective same line as the nucleic acid molecule SEQ ID NO. 2645 or polypeptide SEQ ID NO. 2646, respectively, is increased or generated or if the activity “Membrane protein” is increased or generated in a plant cell, plant or part thereof, especially if the polypeptide is Plastidic localized, an increased nutrient use efficiency as compared to a corresponding non-modified, e.g. a non-transformed, wild type plant cell, a plant or a part thereof is conferred. In one embodiment an increased nitrogen use efficiency is conferred.

[0286] Particularly, an increase of yield from 1.05-fold to 1.778-fold, for example plus at least 100% thereof, under conditions of nitrogen deficiency is conferred compared to a corresponding non-modified, e.g. non-transformed, wild type plant cell, a plant or a part thereof.

[0287] Accordingly, in one embodiment, in case the activity of a polypeptide according to the polypeptide SEQ ID NO. 2662, or encoded by a nucleic acid molecule comprising the nucleic acid SEQ ID NO. 2661, or a homolog of said nucleic acid molecule or polypeptide, e.g. in case the activity of the Saccharomyces cerevisiae nucleic acid molecule or a polypeptide, respectively, comprising the nucleic acid SEQ ID NO. 2661 or polypeptide SEQ ID NO. 2662, respectively, is increased or generated, e.g. if the activity of a nucleic acid molecule or a polypeptide comprising the nucleic acid or polypeptide or the consensus sequence or the polypeptide motif, as depicted in table I, II or IV, column 7 in the respective same line as the nucleic acid molecule SEQ ID NO. 2661 or polypeptide SEQ ID NO. 2662, respectively, is increased or generated or if the activity “DNA polymerase” is increased or generated in a plant cell, plant or part thereof, especially if localized cytoplasmic, an increased yield as compared to a corresponding non-modified, e.g. a non-transformed, wild type plant cell, a plant or a part thereof is conferred.

[0288] In a further embodiment, in case the activity of a polypeptide according to the polypeptide SEQ ID NO. 2662, or encoded by a nucleic acid molecule comprising the nucleic acid SEQ ID NO. 2661, or a homolog of said nucleic acid molecule or polypeptide, e.g. in case the activity of the Saccharomyces cerevisiae nucleic acid molecule or a polypeptide comprising the nucleic acid SEQ ID NO. 2661 or polypeptide SEQ ID NO. 2662, respectively, is increased or generated, e.g. if the activity of a nucleic acid molecule or a polypeptide comprising the nucleic acid or polypeptide or the consensus sequence or the polypeptide motif, as depicted in table I, II or IV, column 7 in the respective same line as the nucleic acid molecule SEQ ID NO. 2661 or polypeptide SEQ ID NO. 2662, respectively, is increased or generated or if the activity “DNA polymerase” is increased or generated in a plant cell, plant or part thereof, especially, if the polypeptide is cytoplasmic localized, an increased biomass, compared to a corresponding non-modified, e.g. a non-transformed, wild type plant cell, a plant or a part thereof is conferred.

[0289] Particularly, an increase of yield from 1.1-fold to 1.373-fold, for example plus at least 100% thereof, under standard conditions, e.g. in the absence of nutrient deficiency as well as stress conditions is conferred compared to a corresponding non-modified, e.g. non-transformed, wild type plant cell, a plant or a part thereof.

[0290] In a further embodiment, in case the activity of a polypeptide according to the polypeptide SEQ ID NO. 2662, or encoded by a nucleic acid molecule comprising the nucleic acid SEQ ID NO. 2661, or a homolog of said nucleic acid molecule or polypeptide, e.g. in case the activity of the Saccharomyces cerevisiae nucleic acid molecule or a polypeptide comprising the nucleic acid SEQ ID NO. 2661 or polypeptide SEQ ID NO. 2662, respectively, is increased or generated, e.g. if the activity of a nucleic acid molecule or a polypeptide comprising the nucleic acid or polypeptide or the consensus sequence or the polypeptide motif, as depicted in table I, II or IV, column 7 in the respective same line as the nucleic acid molecule SEQ ID NO. 2661 or polypeptide SEQ ID NO. 2662, respectively, is increased or generated or if the activity “DNA polymerase” is increased or generated in a plant cell, plant or part thereof, especially if the polypeptide is cytoplasmic localized, an increased nutrient use efficiency as compared to a corresponding non-modified, e.g. a non-transformed, wild type plant cell, a plant or a part thereof is conferred. In one embodiment an increased nitrogen use efficiency is conferred.

[0291] Particularly, an increase of yield from 1.05-fold to 1.642-fold, for example plus at least 100% thereof, under conditions of nitrogen deficiency is conferred compared to a corresponding non-modified, e.g. non-transformed, wild type plant cell, a plant or a part thereof.

[0292] In a further embodiment, in case the activity of a polypeptide according to the polypeptide SEQ ID NO. 2662, or encoded by a nucleic acid molecule comprising the nucleic acid SEQ ID NO. 2661, or a homolog of said nucleic acid molecule or polypeptide, e.g. in case the activity of the Saccharomyces cerevisiae nucleic acid molecule or a polypeptide comprising the nucleic acid SEQ ID NO. 2661 or polypeptide SEQ ID NO. 2662, respectively, is increased or generated, e.g. if the activity of a nucleic acid molecule or a polypeptide comprising the nucleic acid or polypeptide or the consensus sequence or the polypeptide motif, as depicted in table I, II or IV, column 7 in the respective same line as the nucleic acid molecule SEQ ID NO. 2661 or polypeptide SEQ ID NO. 2662, respectively, is increased or generated or if the activity “DNA polymerase” is increased or generated in a plant cell, plant or part thereof, especially if the polypeptide is cytoplasmic localized, an increased intrinsic yield as compared to a corresponding non-modified, e.g. a non-transformed, wild type plant cell, a plant or a part thereof is conferred. In one embodiment an increased yield under standard conditions, e.g. in the absence of nutrient deficiency as well as stress conditions, is conferred.

[0293] Particularly, an increase of yield from 1.05-fold to 1.255-fold, for example plus at least 100% thereof, under conditions of low temperature is conferred com-pared to a corresponding non-modified, e.g. non-transformed, wild type plant cell, a plant or a part thereof.

[0294] Accordingly, in one embodiment, in case the activity of a polypeptide according to the polypeptide SEQ ID NO. 2737, or encoded by a nucleic acid molecule comprising the nucleic acid SEQ ID NO. 2736, or a homolog of said nucleic acid molecule or polypeptide, e.g. in case the activity of the Saccharomyces cerevisiae nucleic acid molecule or a polypeptide, respectively, comprising the nucleic acid SEQ ID NO. 2736 or polypeptide SEQ ID NO. 2737, respectively, is increased or generated, e.g. if the activity of a nucleic acid molecule or a polypeptide comprising the nucleic acid or polypeptide or the consensus sequence or the polypeptide motif, as depicted in table I, II or IV, column 7 in the respective same line as the nucleic acid molecule SEQ ID NO. 2736 or polypeptide SEQ ID NO. 2737, respectively, is increased or generated or if the activity “GRE1-protein(Hydrophilin)” is increased or generated in a plant cell, plant or part thereof, especially if localized cytoplasmic, an increased yield as compared to a corresponding non-modified, e.g. a non-transformed, wild type plant cell, a plant or a part thereof is conferred.

[0295] In a further embodiment, in case the activity of a polypeptide according to the polypeptide SEQ ID NO. 2737, or encoded by a nucleic acid molecule comprising the nucleic acid SEQ ID NO. 2736, or a homolog of said nucleic acid molecule or polypeptide, e.g. in case the activity of the Saccharomyces cerevisiae nucleic acid molecule or a polypeptide comprising the nucleic acid SEQ ID NO. 2736 or polypeptide SEQ ID NO. 2737, respectively, is increased or generated, e.g. if the activity of a nucleic acid molecule or a polypeptide comprising the nucleic acid or polypeptide or the consensus sequence or the polypeptide motif, as depicted in table I, II or IV, column 7 in the respective same line as the nucleic acid molecule SEQ ID NO. 2736 or polypeptide SEQ ID NO. 2737, respectively, is increased or generated or if the activity “GRE1-protein(Hydrophilin)” is increased or generated in a plant cell, plant or part thereof, especially, if the polypeptide is cytoplasmic localized, an increased biomass, compared to a corresponding non-modified, e.g. a non-transformed, wild type plant cell, a plant or a part thereof is conferred.

[0296] Particularly, an increase of yield from 1.1-fold to 1.326-fold, for example plus at least 100% thereof, under standard conditions, e.g. in the absence of nutrient deficiency as well as stress conditions is conferred compared to a corresponding non-modified, e.g. non-transformed, wild type plant cell, a plant or a part thereof.

[0297] In a further embodiment, in case the activity of a polypeptide according to the polypeptide SEQ ID NO. 2737, or encoded by a nucleic acid molecule comprising the nucleic acid SEQ ID NO. 2736, or a homolog of said nucleic acid molecule or polypeptide, e.g. in case the activity of the Saccharomyces cerevisiae nucleic acid molecule or a polypeptide comprising the nucleic acid SEQ ID NO. 2736 or polypeptide SEQ ID NO. 2737, respectively, is increased or generated, e.g. if the activity of a nucleic acid molecule or a polypeptide comprising the nucleic acid or polypeptide or the consensus sequence or the polypeptide motif, as depicted in table I, II or IV, column 7 in the respective same line as the nucleic acid molecule SEQ ID NO. 2736 or polypeptide SEQ ID NO. 2737, respectively, is increased or generated or if the activity “GRE1-protein(Hydrophilin)” is increased or generated in a plant cell, plant or part thereof, especially if the polypeptide is cytoplasmic localized, an increased nutrient use efficiency as compared to a corresponding non-modified, e.g. a non-transformed, wild type plant cell, a plant or a part thereof is conferred. In one embodiment an increased nitrogen use efficiency is conferred.

[0298] Particularly, an increase of yield from 1.05-fold to 1.268-fold, for example plus at least 100% thereof, under conditions of nitrogen deficiency is conferred compared to a corresponding non-modified, e.g. non-transformed, wild type plant cell, a plant or a part thereof.

[0299] Accordingly, in one embodiment, in case the activity of a polypeptide according to the polypeptide SEQ ID NO. 2743, or encoded by a nucleic acid molecule comprising the nucleic acid SEQ ID NO. 2742, or a homolog of said nucleic acid molecule or polypeptide, e.g. in case the activity of the Saccharomyces cerevisiae nucleic acid molecule or a polypeptide, respectively, comprising the nucleic acid SEQ ID NO. 2742 or polypeptide SEQ ID NO. 2743, respectively, is increased or generated, e.g. if the activity of a nucleic acid molecule or a polypeptide comprising the nucleic acid or polypeptide or the consensus sequence or the polypeptide motif, as depicted in table I, II or IV, column 7 in the respective same line as the nucleic acid molecule SEQ ID NO. 2742 or polypeptide SEQ ID NO. 2743, respectively, is increased or generated or if the activity “60S ribosomal protein” is increased or generated in a plant cell, plant or part thereof, especially if localized cytoplasmic, an increased yield as compared to a corresponding non-modified, e.g. a non-transformed, wild type plant cell, a plant or a part thereof is conferred.

[0300] In a further embodiment, in case the activity of a polypeptide according to the polypeptide SEQ ID NO. 2743, or encoded by a nucleic acid molecule comprising the nucleic acid SEQ ID NO. 2742, or a homolog of said nucleic acid molecule or polypeptide, e.g. in case the activity of the Saccharomyces cerevisiae nucleic acid molecule or a polypeptide comprising the nucleic acid SEQ ID NO. 2742 or polypeptide SEQ ID NO. 2743, respectively, is increased or generated, e.g. if the activity of a nucleic acid molecule or a polypeptide comprising the nucleic acid or polypeptide or the consensus sequence or the polypeptide motif, as depicted in table I, II or IV, column 7 in the respective same line as the nucleic acid molecule SEQ ID NO. 2742 or polypeptide SEQ ID NO. 2743, respectively, is increased or generated or if the activity “60S ribosomal protein” is increased or generated in a plant cell, plant or part thereof, especially, if the polypeptide is cytoplasmic localized, an increased biomass, compared to a corresponding non-modified, e.g. a non-transformed, wild type plant cell, a plant or a part thereof is conferred.

[0301] Particularly, an increase of yield from 1.1-fold to 1.546-fold, for example plus at least 100% thereof, under standard conditions, e.g. in the absence of nutrient deficiency as well as stress conditions is conferred compared to a correspond-ing non-modified, e.g. non-transformed, wild type plant cell, a plant or a part thereof.

[0302] In a further embodiment, in case the activity of a polypeptide according to the polypeptide SEQ ID NO. 2743, or encoded by a nucleic acid molecule comprising the nucleic acid SEQ ID NO. 2742, or a homolog of said nucleic acid molecule or polypeptide, e.g. in case the activity of the Saccharomyces cerevisiae nucleic acid molecule or a polypeptide comprising the nucleic acid SEQ ID NO. 2742 or polypeptide SEQ ID NO. 2743, respectively, is increased or generated, e.g. if the activity of a nucleic acid molecule or a polypeptide comprising the nucleic acid or polypeptide or the consensus sequence or the polypeptide motif, as depicted in table I, II or IV, column 7 in the respective same line as the nucleic acid molecule SEQ ID NO. 2742 or polypeptide SEQ ID NO. 2743, respectively, is increased or generated or if the activity “60S ribosomal protein” is increased or generated in a plant cell, plant or part thereof, especially if the polypeptide is cytoplasmic localized, an increased nutrient use efficiency as compared to a corresponding non-modified, e.g. a non-transformed, wild type plant cell, a plant or a part thereof is conferred. In one embodiment an increased nitrogen use efficiency is conferred.

[0303] Particularly, an increase of yield from 1.05-fold to 1.223-fold, for example plus at least 100% thereof, under conditions of nitrogen deficiency is conferred compared to a corresponding non-modified, e.g. non-transformed, wild type plant cell, a plant or a part thereof.

[0304] In a further embodiment, in case the activity of a polypeptide according to the polypeptide SEQ ID NO. 2743, or encoded by a nucleic acid molecule comprising the nucleic acid SEQ ID NO. 2742, or a homolog of said nucleic acid molecule or polypeptide, e.g. in case the activity of the Saccharomyces cerevisiae nucleic acid molecule or a polypeptide comprising the nucleic acid SEQ ID NO. 2742 or polypeptide SEQ ID NO. 2743, respectively, is increased or generated, e.g. if the activity of a nucleic acid molecule or a polypeptide comprising the nucleic acid or polypeptide or the consensus sequence or the polypeptide motif, as depicted in table I, II or IV, column 7 in the respective same line as the nucleic acid molecule SEQ ID NO. 2742 or polypeptide SEQ ID NO. 2743, respectively, is increased or generated or if the activity “60S ribosomal protein” is increased or generated in a plant cell, plant or part thereof, especially if the polypeptide is cytoplasmic localized, an increased intrinsic yield as compared to a corresponding non-modified, e.g. a non-transformed, wild type plant cell, a plant or a part thereof is conferred. In one embodiment an increased yield under standard conditions, e.g. in the absence of nutrient deficiency as well as stress conditions, is conferred.

[0305] Particularly, an increase of yield from 1.05-fold to 1.230-fold, for example plus at least 100% thereof, under conditions of low temperature is conferred com-pared to a corresponding non-modified, e.g. non-transformed, wild type plant cell, a plant or a part thereof.

[0306] Accordingly, in one embodiment, in case the activity of a polypeptide according to the polypeptide SEQ ID NO. 2908, or encoded by a nucleic acid molecule comprising the nucleic acid SEQ ID NO. 2907, or a homolog of said nucleic acid molecule or polypeptide, e.g. in case the activity of the Escherichia coli nucleic acid molecule or a polypeptide, respectively, comprising the nucleic acid SEQ ID NO. 2907 or polypeptide SEQ ID NO. 2908, respectively, is increased or generated, e.g. if the activity of a nucleic acid molecule or a polypeptide comprising the nucleic acid or polypeptide or the consensus sequence or the polypeptide motif, as depicted in table I, II or IV, column 7 in the respective same line as the nucleic acid molecule SEQ ID NO. 2907 or polypeptide SEQ ID NO. 2908, respectively, is increased or generated or if the activity “Short chain dehydrogenase” is increased or generated in a plant cell, plant or part thereof, especially if localized cytoplasmic, an increased yield as compared to a corresponding non-modified, e.g. a non-transformed, wild type plant cell, a plant or a part thereof is conferred.

[0307] In a further embodiment, in case the activity of a polypeptide according to the polypeptide SEQ ID NO. 2908, or encoded by a nucleic acid molecule comprising the nucleic acid SEQ ID NO. 2907, or a homolog of said nucleic acid molecule or polypeptide, e.g. in case the activity of the Escherichia coli nucleic acid molecule or a polypeptide comprising the nucleic acid SEQ ID NO. 2907 or polypeptide SEQ ID NO. 2908, respectively, is increased or generated, e.g. if the activity of a nucleic acid molecule or a polypeptide comprising the nucleic acid or polypeptide or the consensus sequence or the polypeptide motif, as depicted in table I, II or IV, column 7 in the respective same line as the nucleic acid molecule SEQ ID NO. 2907 or polypeptide SEQ ID NO. 2908, respectively, is increased or generated or if the activity “Short chain dehydrogenase” is increased or generated in a plant cell, plant or part thereof, especially, if the polypeptide is cytoplasmic localized, an increased biomass, compared to a corresponding non-modified, e.g. a non-transformed, wild type plant cell, a plant or a part thereof is conferred.

[0308] Particularly, an increase of yield from 1.1-fold to 1.246-fold, for example plus at least 100% thereof, under standard conditions, e.g. in the absence of nutrient deficiency as well as stress conditions is conferred compared to a corresponding non-modified, e.g. non-transformed, wild type plant cell, a plant or a part thereof.

[0309] In a further embodiment, in case the activity of a polypeptide according to the polypeptide SEQ ID NO. 2908, or encoded by a nucleic acid molecule comprising the nucleic acid SEQ ID NO. 2907, or a homolog of said nucleic acid molecule or polypeptide, e.g. in case the activity of the Escherichia coli nucleic acid molecule or a polypeptide comprising the nucleic acid SEQ ID NO. 2907 or polypeptide SEQ ID NO. 2908, respectively, is increased or generated, e.g. if the activity of a nucleic acid molecule or a polypeptide comprising the nucleic acid or polypeptide or the consensus sequence or the polypeptide motif, as depicted in table I, II or IV, column 7 in the respective same line as the nucleic acid molecule SEQ ID NO. 2907 or polypeptide SEQ ID NO. 2908, respectively, is increased or generated or if the activity “Short chain dehydrogenase” is increased or generated in a plant cell, plant or part thereof, especially if the polypeptide is cytoplasmic localized, an increased nutrient use efficiency as compared to a corresponding non-modified, e.g. a non-transformed, wild type plant cell, a plant or a part thereof is conferred. In one embodiment an increased nitrogen use efficiency is conferred.

[0310] Particularly, an increase of yield from 1.05-fold to 1.808-fold, for example plus at least 100% thereof, under conditions of nitrogen deficiency is conferred compared to a corresponding non-modified, e.g. non-transformed, wild type plant cell, a plant or a part thereof.

[0311] Accordingly, in one embodiment, in case the activity of a polypeptide according to the polypeptide SEQ ID NO. 3633, or encoded by a nucleic acid molecule comprising the nucleic acid SEQ ID NO. 3632, or a homolog of said nucleic acid molecule or polypeptide, e.g. in case the activity of the Glycine max nucleic acid molecule or a polypeptide, respectively, comprising the nucleic acid SEQ ID NO. 3632 or polypeptide SEQ ID NO. 3633, respectively, is increased or generated, e.g. if the activity of a nucleic acid molecule or a polypeptide comprising the nucleic acid or polypeptide or the consensus sequence or the polypeptide motif, as depicted in table I, II or IV, column 7 in the respective same line as the nucleic acid molecule SEQ ID NO. 3632 or polypeptide SEQ ID NO. 3633, respectively, is increased or generated or if the activity “BRICK1-like protein” is increased or generated in a plant cell, plant or part thereof, especially if localized cytoplasmic, an increased yield as compared to a corresponding non-modified, e.g. a non-transformed, wild type plant cell, a plant or a part thereof is conferred.

[0312] In a further embodiment, in case the activity of a polypeptide according to the polypeptide SEQ ID NO. 3633, or encoded by a nucleic acid molecule comprising the nucleic acid SEQ ID NO. 3632, or a homolog of said nucleic acid molecule or polypeptide, e.g. in case the activity of the Glycine max nucleic acid molecule or a polypeptide comprising the nucleic acid SEQ ID NO. 3632 or polypeptide SEQ ID NO. 3633, respectively, is increased or generated, e.g. if the activity of a nucleic acid molecule or a polypeptide comprising the nucleic acid or polypeptide or the consensus sequence or the polypeptide motif, as depicted in table I, II or IV, column 7 in the respective same line as the nucleic acid molecule SEQ ID NO. 3632 or polypeptide SEQ ID NO. 3633, respectively, is increased or generated or if the activity “BRICK1-like protein” is increased or generated in a plant cell, plant or part thereof, especially, if the polypeptide is Cytoplasmic localized, an increased biomass, compared to a corresponding non-modified, e.g. a non-transformed, wild type plant cell, a plant or a part thereof is conferred.

[0313] Particularly, an increase of yield from 1.1-fold to 1.373-fold, for example plus at least 100% thereof, under standard conditions, e.g. in the absence of nutrient deficiency as well as stress conditions is conferred compared to a corresponding non-modified, e.g. non-transformed, wild type plant cell, a plant or a part thereof.

[0314] In a further embodiment, in case the activity of a polypeptide according to the polypeptide SEQ ID NO. 3633, or encoded by a nucleic acid molecule comprising the nucleic acid SEQ ID NO. 3632, or a homolog of said nucleic acid molecule or polypeptide, e.g. in case the activity of the Glycine max nucleic acid molecule or a polypeptide comprising the nucleic acid SEQ ID NO. 3632 or polypeptide SEQ ID NO. 3633, respectively, is increased or generated, e.g. if the activity of a nucleic acid molecule or a polypeptide comprising the nucleic acid or polypeptide or the consensus sequence or the polypeptide motif, as depicted in table I, II or IV, column 7 in the respective same line as the nucleic acid molecule SEQ ID NO. 3632 or polypeptide SEQ ID NO. 3633, respectively, is increased or generated or if the activity “BRICK1-like protein” is increased or generated in a plant cell, plant or part thereof, especially if the polypeptide is cytoplasmic localized, an increased nutrient use efficiency as compared to a corresponding non-modified, e.g. a non-transformed, wild type plant cell, a plant or a part thereof is conferred. In one embodiment an increased nitrogen use efficiency is conferred.

[0315] Particularly, an increase of yield from 1.05-fold to 1.994-fold, for example plus at least 100% thereof, under conditions of nitrogen deficiency is conferred compared to a corresponding non-modified, e.g. non-transformed, wild type plant cell, a plant or a part thereof.

[0316] In a further embodiment, in case the activity of a polypeptide according to the polypeptide SEQ ID NO. 3633, or encoded by a nucleic acid molecule comprising the nucleic acid SEQ ID NO. 3632, or a homolog of said nucleic acid molecule or polypeptide, e.g. in case the activity of the Glycine max nucleic acid molecule or a polypeptide comprising the nucleic acid SEQ ID NO. 3632 or polypeptide SEQ ID NO. 3633, respectively, is increased or generated, e.g. if the activity of a nucleic acid molecule or a polypeptide comprising the nucleic acid or polypeptide or the consensus sequence or the polypeptide motif, as depicted in table I, II or IV, column 7 in the respective same line as the nucleic acid molecule SEQ ID NO. 3632 or polypeptide SEQ ID NO. 3633, respectively, is increased or generated or if the activity “BRICK1-like protein” is increased or generated in a plant cell, plant or part thereof, especially if the polypeptide is Cytoplasmic localized, an increased intrinsic yield as compared to a corresponding non-modified, e.g. a non-transformed, wild type plant cell, a plant or a part thereof is conferred. In one embodiment an increased yield under standard conditions, e.g. in the absence of nutrient deficiency as well as stress conditions, is conferred.

[0317] Particularly, an increase of yield from 1.05-fold to 1.126-fold, for example plus at least 100% thereof, under conditions of low temperature is conferred com-pared to a corresponding non-modified, e.g. non-transformed, wild type plant cell, a plant or a part thereof.

[0318] Accordingly, in one embodiment, in case the activity of a polypeptide according to the polypeptide SEQ ID NO. 3677, or encoded by a nucleic acid molecule comprising the nucleic acid SEQ ID NO. 3676, or a homolog of said nucleic acid molecule or polypeptide, e.g. in case the activity of the Saccharomyces cerevisiae nucleic acid molecule or a polypeptide, respectively, comprising the nucleic acid SEQ ID NO. 3676 or polypeptide SEQ ID NO. 3677, respectively, is increased or generated, e.g. if the activity of a nucleic acid molecule or a polypeptide comprising the nucleic acid or polypeptide or the consensus sequence or the polypeptide motif, as depicted in table I, II or IV, column 7 in the respective same line as the nucleic acid molecule SEQ ID NO. 3676 or polypeptide SEQ ID NO. 3677, respectively, is increased or generated or if the activity “YPL167C_{—}2-protein” is increased or generated in a plant cell, plant or part thereof, especially if localized cytoplasmic, an increased yield as compared to a corresponding non-modified, e.g. a non-transformed, wild type plant cell, a plant or a part thereof is conferred.

[0319] In a further embodiment, in case the activity of a polypeptide according to the polypeptide SEQ ID NO. 3677, or encoded by a nucleic acid molecule comprising the nucleic acid SEQ ID NO. 3676, or a homolog of said nucleic acid molecule or polypeptide, e.g. in case the activity of the Saccharomyces cerevisiae nucleic acid molecule or a polypeptide comprising the nucleic acid SEQ ID NO. 3676 or polypeptide SEQ ID NO. 3677, respectively, is increased or generated, e.g. if the activity of a nucleic acid molecule or a polypeptide comprising the nucleic acid or polypeptide or the consensus sequence or the polypeptide motif, as depicted in table I, II or IV, column 7 in the respective same line as the nucleic acid molecule SEQ ID NO. 3676 or polypeptide SEQ ID NO. 3677, respectively, is increased or generated or if the activity “YPL167C_{—}2-protein” is increased or generated in a plant cell, plant or part thereof, especially, if the polypeptide is Cytoplasmic localized, an increased biomass, compared to a corresponding non-modified, e.g. a non-transformed, wild type plant cell, a plant or a part thereof is conferred.

[0320] Particularly, an increase of yield from 1.1-fold to 1.373-fold, for example plus at least 100% thereof, under standard conditions, e.g. in the absence of nutrient deficiency as well as stress conditions is conferred compared to a corresponding non-modified, e.g. non-transformed, wild type plant cell, a plant or a part thereof.

[0321] In a further embodiment, in case the activity of a polypeptide according to the polypeptide SEQ ID NO. 3677, or encoded by a nucleic acid molecule comprising the nucleic acid SEQ ID NO. 3676, or a homolog of said nucleic acid molecule or polypeptide, e.g. in case the activity of the Saccharomyces cerevisiae nucleic acid molecule or a polypeptide comprising the nucleic acid SEQ ID NO. 3676 or polypeptide SEQ ID NO. 3677, respectively, is increased or generated, e.g. if the activity of a nucleic acid molecule or a polypeptide comprising the nucleic acid or polypeptide or the consensus sequence or the polypeptide motif, as depicted in table I, II or IV, column 7 in the respective same line as the nucleic acid molecule SEQ ID NO. 3676 or polypeptide SEQ ID NO. 3677, respectively, is increased or generated or if the activity “YPL167C_{—}2-protein” is increased or generated in a plant cell, plant or part thereof, especially if the polypeptide is Cytoplasmic localized, an increased nutrient use efficiency as compared to a corresponding non-modified, e.g. a non-transformed, wild type plant cell, a plant or a part thereof is conferred. In one embodiment an increased nitrogen use efficiency is conferred.

[0322] Particularly, an increase of yield from 1.05-fold to 1.642-fold, for example plus at least 100% thereof, under conditions of nitrogen deficiency is conferred compared to a corresponding non-modified, e.g. non-transformed, wild type plant cell, a plant or a part thereof.

[0323] In a further embodiment, in case the activity of a polypeptide according to the polypeptide SEQ ID NO. 3677, or encoded by a nucleic acid molecule comprising the nucleic acid SEQ ID NO. 3676, or a homolog of said nucleic acid molecule or polypeptide, e.g. in case the activity of the Saccharomyces cerevisiae nucleic acid molecule or a polypeptide comprising the nucleic acid SEQ ID NO. 3676 or polypeptide SEQ ID NO. 3677, respectively, is increased or generated, e.g. if the activity of a nucleic acid molecule or a polypeptide comprising the nucleic acid or polypeptide or the consensus sequence or the polypeptide motif, as depicted in table I, II or IV, column 7 in the respective same line as the nucleic acid molecule SEQ ID NO. 3676 or polypeptide SEQ ID NO. 3677, respectively, is increased or generated or if the activity “YPL167C_{—}2-protein” is increased or generated in a plant cell, plant or part thereof, especially if the polypeptide is Cytoplasmic localized, an increased intrinsic yield as compared to a corresponding non-modified, e.g. a non-transformed, wild type plant cell, a plant or a part thereof is conferred. In one embodiment an increased yield under standard conditions, e.g. in the absence of nutrient deficiency as well as stress conditions, is conferred.

[0324] Particularly, an increase of yield from 1.05-fold to 1.255-fold, for example plus at least 100% thereof, under conditions of low temperature is conferred com-pared to a corresponding non-modified, e.g. non-transformed, wild type plant cell, a plant or a part thereof.

[0325] Accordingly, in one embodiment, in case the activity of a polypeptide according to the polypeptide SEQ ID NO. 3699, or encoded by a nucleic acid molecule comprising the nucleic acid SEQ ID NO. 3698, or a homolog of said nucleic acid molecule or polypeptide, e.g. in case the activity of the Saccharomyces cerevisiae nucleic acid molecule or a polypeptide, respectively, comprising the nucleic acid SEQ ID NO. 3698 or polypeptide SEQ ID NO. 3699, respectively, is increased or generated, e.g. if the activity of a nucleic acid molecule or a polypeptide comprising the nucleic acid or polypeptide or the consensus sequence or the polypeptide motif, as depicted in table I, II or IV, column 7 in the respective same line as the nucleic acid molecule SEQ ID NO. 3698 or polypeptide SEQ ID NO. 3699, respectively, is increased or generated or if the activity “ORF YPL249c-a” is increased or generated in a plant cell, plant or part thereof, especially if localized cytoplasmic, an increased yield as compared to a corresponding non-modified, e.g. a non-transformed, wild type plant cell, a plant or a part thereof is conferred.

[0326] In a further embodiment, in case the activity of a polypeptide according to the polypeptide SEQ ID NO. 3699, or encoded by a nucleic acid molecule comprising the nucleic acid SEQ ID NO. 3698, or a homolog of said nucleic acid molecule or polypeptide, e.g. in case the activity of the Saccharomyces cerevisiae nucleic acid molecule or a polypeptide comprising the nucleic acid SEQ ID NO. 3698 or polypeptide SEQ ID NO. 3699, respectively, is increased or generated, e.g. if the activity of a nucleic acid molecule or a polypeptide comprising the nucleic acid or polypeptide or the consensus sequence or the polypeptide motif, as depicted in table I, II or IV, column 7 in the respective same line as the nucleic acid molecule SEQ ID NO. 3698 or polypeptide SEQ ID NO. 3699, respectively, is increased or generated or if the activity “ORF YPL249c-a” is increased or generated in a plant cell, plant or part thereof, especially, if the polypeptide is cytoplasmic localized, an increased biomass, compared to a corresponding non-modified, e.g. a non-transformed, wild type plant cell, a plant or a part thereof is conferred.

[0327] Particularly, an increase of yield from 1.1-fold to 1.546-fold, for example plus at least 100% thereof, under standard conditions, e.g. in the absence of nutrient deficiency as well as stress conditions is conferred compared to a correspond-ing non-modified, e.g. non-transformed, wild type plant cell, a plant or a part thereof.

[0328] In a further embodiment, in case the activity of a polypeptide according to the polypeptide SEQ ID NO. 3699, or encoded by a nucleic acid molecule comprising the nucleic acid SEQ ID NO. 3698, or a homolog of said nucleic acid molecule or polypeptide, e.g. in case the activity of the Saccharomyces cerevisiae nucleic acid molecule or a polypeptide comprising the nucleic acid SEQ ID NO. 3698 or polypeptide SEQ ID NO. 3699, respectively, is increased or generated, e.g. if the activity of a nucleic acid molecule or a polypeptide comprising the nucleic acid or polypeptide or the consensus sequence or the polypeptide motif, as depicted in table I, II or IV, column 7 in the respective same line as the nucleic acid molecule SEQ ID NO. 3698 or polypeptide SEQ ID NO. 3699, respectively, is increased or generated or if the activity “ORF YPL249c-a” is increased or generated in a plant cell, plant or part thereof, especially if the polypeptide is cytoplasmic localized, an increased nutrient use efficiency as compared to a corresponding non-modified, e.g. a non-transformed, wild type plant cell, a plant or a part thereof is conferred. In one embodiment an increased nitrogen use efficiency is conferred.

[0329] Particularly, an increase of yield from 1.05-fold to 1.223-fold, for example plus at least 100% thereof, under conditions of nitrogen deficiency is conferred compared to a corresponding non-modified, e.g. non-transformed, wild type plant cell, a plant or a part thereof.

[0330] In a further embodiment, in case the activity of a polypeptide according to the polypeptide SEQ ID NO. 3699, or encoded by a nucleic acid molecule comprising the nucleic acid SEQ ID NO. 3698, or a homolog of said nucleic acid molecule or polypeptide, e.g. in case the activity of the Saccharomyces cerevisiae nucleic acid molecule or a polypeptide comprising the nucleic acid SEQ ID NO. 3698 or polypeptide SEQ ID NO. 3699, respectively, is increased or generated, e.g. if the activity of a nucleic acid molecule or a polypeptide comprising the nucleic acid or polypeptide or the consensus sequence or the polypeptide motif, as depicted in table I, II or IV, column 7 in the respective same line as the nucleic acid molecule SEQ ID NO. 3698 or polypeptide SEQ ID NO. 3699, respectively, is increased or generated or if the activity “ORF YPL249c-a” is increased or generated in a plant cell, plant or part thereof, especially if the polypeptide is cytoplasmic localized, an increased intrinsic yield as compared to a corresponding non-modified, e.g. a non-transformed, wild type plant cell, a plant or a part thereof is conferred. In one embodiment an increased yield under standard conditions, e.g. in the absence of nutrient deficiency as well as stress conditions, is conferred.

[0331] Particularly, an increase of yield from 1.05-fold to 1.230-fold, for example plus at least 100% thereof, under conditions of low temperature is conferred com-pared to a corresponding non-modified, e.g. non-transformed, wild type plant cell, a plant or a part thereof.

[0332] The ratios indicated above particularly refer to an increased yield actually measured as increase of biomass, especially as fresh weight biomass of aerial parts.

[0333] For the purposes of the invention, as a rule the plural is intended to encompass the singular and vice versa.

[0334] Unless otherwise specified, the terms “polynucleotide”, “nucleic acid” and “nucleic acid molecule” are interchangeably in the present context. Unless otherwise specified, the terms “peptide”, “polypeptide” and “protein” are interchangeably in the present context. The term “sequence” may relate to polynucleotides, nucleic acids, nucleic acid molecules, peptides, polypeptides and proteins, depending on the context in which the term “sequence” is used. The terms “gene(s)”, “polynucleotide”, “nucleic acid sequence”, “nucleotide sequence”, or “nucleic acid molecule(s)” as used herein refers to a polymeric form of nucleotides of any length, either ribonucleotides or deoxyribonucleotides. The terms refer only to the primary structure of the molecule.

[0335] Thus, the terms “gene(s)”, “polynucleotide”, “nucleic acid sequence”, “nucleotide sequence”, or “nucleic acid molecule(s)” as used herein include double- and single-stranded DNA and/or RNA. They also include known types of modifications, for example, methylation, “caps”, substitutions of one or more of the naturally occurring nucleotides with an analogue. Preferably, the DNA or RNA sequence comprises a coding sequence encoding the herein defined polypeptide.

[0336] A “coding sequence” is a nucleotide sequence, which is transcribed into an RNA, e.g. a regulatory RNA, such as a miRNA, a ta-siRNA, co-suppression molecule, an RNAi, a ribozyme, etc. or into a mRNA which is translated into a polypeptide when placed under the control of appropriate regulatory sequences. The boundaries of the coding sequence are determined by a translation start codon at the 5′-terminus and a translation stop codon at the 3′-terminus. A coding sequence can include, but is not limited to mRNA, cDNA, recombinant nucleotide sequences or genomic DNA, while introns may be present as well under certain circumstances.

[0337] As used in the present context a nucleic acid molecule may also encompass the untranslated sequence located at the 3′ and at the 5′ end of the coding gene region, for example at least 500, preferably 200, especially preferably 100, nucleotides of the sequence upstream of the 5′ end of the coding region and at least 100, preferably 50, especially preferably 20, nucleotides of the sequence downstream of the 3′ end of the coding gene region. In the event for example the antisense, RNAi, snRNA, dsRNA, siRNA, miRNA, ta-siRNA, co-suppression molecule, ribozyme etc. technology is used coding regions as well as the 5′- and/or 3′-regions can advantageously be used.

[0338] However, it is often advantageous only to choose the coding region for cloning and expression purposes.

[0339] “Polypeptide” refers to a polymer of amino acid (amino acid sequence) and does not refer to a specific length of the molecule. Thus, peptides and oligopeptides are included within the definition of polypeptide. This term does also refer to or include post-translational modifications of the polypeptide, for example, glycosylations, acetylations, phosphorylations and the like. Included within the definition are, for example, polypeptides containing one or more analogs of an amino acid (including, for example, unnatural amino acids, etc.), polypeptides with substituted linkages, as well as other modifications known in the art, both naturally occurring and non-naturally occurring.

[0340] The term “table I” used in this specification is to be taken to specify the content of table I A and table I B. The term “table II” used in this specification is to be taken to specify the content of table II A and table II B. The term “table I A” used in this specification is to be taken to specify the content of table I A. The term “table I B” used in this specification is to be taken to specify the content of table I B. The term “table II A” used in this specification is to be taken to specify the content of table II A. The term “table II B” used in this specification is to be taken to specify the content of table II B. In one preferred embodiment, the term “table I” means table I B. In one preferred embodiment, the term “table II” means table II B.

[0341] The terms “comprise” or “comprising” and grammatical variations thereof when used in this specification are to be taken to specify the presence of stated features, integers, steps or components or groups thereof, but not to preclude the presence or addition of one or more other features, integers, steps, components or groups thereof.

[0342] In accordance with the invention, a protein or polypeptide has the “activity of an protein as shown in table II, column 3” if its de novo activity, or its increased expression directly or indirectly leads to and confers an enhanced yield, e.g an improved yield-related trait, e.g. enhanced tolerance to abiotic environmental stress and/or increased yield like biomass as compared to a corresponding, e.g. non-transformed, wild type plant cell, plant or part thereof and the protein has the above mentioned activities of a protein as shown in table II, column 3. Throughout the specification the activity or preferably the biological activity of such a protein or polypeptide or an nucleic acid molecule or sequence encoding such protein or polypeptide is identical or similar if it still has the biological or enzymatic activity of a protein as shown in table II, column 3, or which has at least 10% of the original enzymatic activity, preferably 20%, 30%, 40%, 50%, particularly preferably 60%, 70%, 80% most particularly preferably 90%, 95%, 98%, 99% in comparison to a protein as shown in table II, column 3 of S. cerevisiae or E. coli or Synechocystis sp. or A. thaliana. In another embodiment the biological or enzymatic activity of a protein as shown in table II, column 3, has at least 101% of the original enzymatic activity, preferably 110%, 120%, %, 150%, particularly preferably 150%, 200%, 300% in comparison to a protein as shown in table II, column 3 of S. cerevisiae or E. coli or Synechocystis sp. or A. thaliana

[0343] The terms “increased”, “rised”, “extended”, “enhanced”, “improved” or “amplified” relate to a corresponding change of a property in a plant, an organism, a part of an organism such as a tissue, seed, root, leave, flower etc. or in a cell and are interchangeable. Preferably, the overall activity in the volume is increased or enhanced in cases if the increase or enhancement is related to the increase or enhancement of an activity of a gene product, independent whether the amount of gene product or the specific activity of the gene product or both is increased or enhanced or whether the amount, stability or translation efficacy of the nucleic acid sequence or gene encoding for the gene product is increased or enhanced.

[0344] The terms “increase” relate to a corresponding change of a property an organism or in a part of a plant, an organism, such as a tissue, seed, root, leave, flower etc. or in a cell. Preferably, the overall activity in the volume is increased in cases the increase relates to the increase of an activity of a gene product, independent whether the amount of gene product or the specific activity of the gene product or both is increased or generated or whether the amount, stability or translation efficacy of the nucleic acid sequence or gene encoding for the gene product is increased.

[0345] Under “change of a property” it is understood that the activity, expression level or amount of a gene product or the metabolite content is changed in a specific volume relative to a corresponding volume of a control, reference or wild type, including the de novo creation of the activity or expression.

[0346] The terms “increase” include the change of said property in only parts of the subject of the present invention, for example, the modification can be found in compartment of a cell, like a organelle, or in a part of a plant, like tissue, seed, root, leave, flower etc. but is not detectable if the overall subject, i.e. complete cell or plant, is tested.

[0347] Accordingly, the term “increase” means that the specific activity of an enzyme as well as the amount of a compound or metabolite, e.g. of a polypeptide, a nucleic acid molecule of the invention or an encoding mRNA or DNA, can be increased in a volume.

[0348] The terms “wild type”, “control” or “reference” are exchangeable and can be a cell or a part of organisms such as an organelle like a chloroplast or a tissue, or an organism, in particular a plant, which was not modified or treated according to the herein described process according to the invention. Accordingly, the cell or a part of organisms such as an organelle like a chloroplast or a tissue, or an organism, in particular a plant used as wild type, control or reference corresponds to the cell, organism, plant or part thereof as much as possible and is in any other property but in the result of the process of the invention as identical to the subject matter of the invention as possible. Thus, the wild type, control or reference is treated identically or as identical as possible, saying that only conditions or properties might be different which do not influence the quality of the tested property.

[0349] Preferably, any comparison is carried out under analogous conditions. The term “analogous conditions” means that all conditions such as, for example, culture or growing conditions, soil, nutrient, water content of the soil, temperature, humidity or surrounding air or soil, assay conditions (such as buffer composition, temperature, substrates, pathogen strain, concentrations and the like) are kept identical between the experiments to be compared.

[0350] The “reference”, “control”, or “wild type” is preferably a subject, e.g. an organelle, a cell, a tissue, an organism, in particular a plant, which was not modified or treated according to the herein described process of the invention and is in any other property as similar to the subject matter of the invention as possible. The reference, control or wild type is in its genome, transcriptome, proteome or metabolome as similar as possible to the subject of the present invention. Preferably, the term “reference-” “control-” or “wild type-”-organelle, -cell, -tissue or -organism, in particular plant, relates to an organelle, cell, tissue or organism, in particular plant, which is nearly genetically identical to the organelle, cell, tissue or organism, in particular plant, of the present invention or a part thereof preferably 95%, more preferred are 98%, even more preferred are 99,00%, in particular 99,10%, 99,30%, 99,50%, 99,70%, 99,90%, 99,99%, 99,999% or more. Most preferable the “reference”, “control”, or “wild type” is a subject, e.g. an organelle, a cell, a tissue, an organism, in particular a plant, which is genetically identical to the organism, in particular plant, cell, a tissue or organelle used according to the process of the invention except that the responsible or activity conferring nucleic acid molecules or the gene product encoded by them are amended, manipulated, exchanged or introduced according to the inventive process.

[0351] In case, a control, reference or wild type differing from the subject of the present invention only by not being subject of the process of the invention can not be provided, a control, reference or wild type can be an organism in which the cause for the modulation of an activity conferring the enhanced yield, e.g an improved yield-related trait, e.g. enhanced tolerance to abiotic environmental stress and/or increased yield like biomass as compared to a corresponding, e.g. non-transformed, wild type plant cell, plant or part thereof or expression of the nucleic acid molecule of the invention as described herein has been switched back or off, e.g. by knocking out the expression of responsible gene product, e.g. by antisense inhibition, by inactivation of an activator or agonist, by activation of an inhibitor or antagonist, by inhibition through adding inhibitory antibodies, by adding active compounds as e.g. hormones, by introducing negative dominant mutants, etc. A gene production can for example be knocked out by introducing inactivating point mutations, which lead to an enzymatic activity inhibition or a destabilization or an inhibition of the ability to bind to cofactors etc.

[0352] Accordingly, preferred reference subject is the starting subject of the present process of the invention. Preferably, the reference and the subject matter of the invention are compared after standardization and normalization, e.g. to the amount of total RNA, DNA, or protein or activity or expression of reference genes, like housekeeping genes, such as ubiquitin, actin or ribosomal proteins.

[0353] The increase or modulation according to this invention can be constitutive, e.g. due to a stable permanent transgenic expression or to a stable mutation in the corresponding endogenous gene encoding the nucleic acid molecule of the invention or to a modulation of the expression or of the behavior of a gene conferring the expression of the polypeptide of the invention, or transient, e.g. due to an transient transformation or temporary addition of a modulator such as a agonist or antagonist or inducible, e.g. after transformation with a inducible construct carrying the nucleic acid molecule of the invention under control of a inducible promoter and adding the inducer, e.g. tetracycline or as described herein below.

[0354] The increase in activity of the polypeptide amounts in a cell, a tissue, an organelle, an organ or an organism, preferably a plant, or a part thereof preferably to at least 5%, preferably to at least 20% or at to least 50%, especially preferably to at least 70%, 80%, 90% or more, very especially preferably are to at least 100%, 150% or 200%, most preferably are to at least 250% or more in comparison to the control, reference or wild type.

[0355] In one embodiment the term increase means the increase in amount in relation to the weight of the organism or part thereof (w/w).

[0356] In one embodiment the increase in activity of the polypeptide amounts in an organelle such as a plastid.

[0357] In another embodiment the increase in activity of the polypeptide amounts in the cytoplasm.

[0358] The specific activity of a polypeptide encoded by a nucleic acid molecule of the present invention or of the polypeptide of the present invention can be tested as described in the examples. In particular, the expression of a protein in question in a cell, e.g. a plant cell in comparison to a control is an easy test and can be performed as described in the state of the art.

[0359] The term “increase” includes, that a compound or an activity, especially an activity, is introduced into a cell, the cytoplasm or a subcellular compartment or organelle de novo or that the compound or the activity, especially an activity, has not been detected before, in other words it is “generated”.

[0360] Accordingly, in the following, the term “increasing” also comprises the term “generating” or “stimulating”. The increased activity manifests itself in an enhanced yield, e.g an improved yield-related trait, e.g. enhanced tolerance to abiotic environmental stress and/or increased yield like biomass as compared to a corresponding e.g. non-transformed wild type plant cell, plant or part thereof.

[0361] The sequence of AT3G60210 from Arabidopsis thaliana, e.g. as shown in column 5 of table I, is published (e.g. sequences from S. cerevisiae have been published in Goffeau et al., Science 274 (5287), 546 (1996), sequences from E. coli have been published in Blattner et al., Science 277 (5331), 1453 (1997)), and/or its activity is described as Chloroplast chaperonin.

[0362] Accordingly, in one embodiment, the process of the present invention comprises increasing or generating the activity of a gene product with the activity of a “Chloroplast chaperonin” from Arabidopsis thaliana or its functional equivalent or its homolog, e.g. the increase of
[0363] (a) a gene product of a gene comprising the nucleic acid molecule as shown in column 5 of table I, and being depicted in the same respective line as said AT3G60210 or a functional equivalent or a homologue thereof as shown depicted in column 7 of table I, preferably a homologue or functional equivalent as shown depicted in column 7 of table I B, and being depicted in the same respective line as said AT3G60210; or
[0364] (b) a polypeptide comprising a polypeptide, a consensus sequence or a polypeptide motif as shown depicted in column 5 of table II or column 7 of table IV, and being depicted in the same respective line as said AT3G60210 or a functional equivalent or a homologue thereof as depicted in column 7 of table II or IV, preferably a homologue or functional equivalent as depicted in column 7 of table II B, and being depicted in the same respective line as said AT3G60210,
   as mentioned herein, for an enhanced yield, e.g an improved yield-related trait, e.g. enhanced tolerance to abiotic environmental stress and/or increased yield like biomass as compared to a corresponding, e.g. non-transformed wild type plant cell, plant or part thereof in plant cell, plant or part thereof, as mentioned, especially for an enhanced tolerance to abiotic environmental stress, or increased yield, or an enhanced tolerance to abiotic environmental stress and increased yield.

[0365] Accordingly, in one embodiment, the molecule which activity is to be increased in the process of the invention is the gene product with an activity of described as a “Chloroplast chaperonin”, preferably it is the molecule of section (a) or (b) of this paragraph.

[0366] In one embodiment, said molecule, which activity is to be increased in the process of the invention and which is the gene product with an activity as described as a “Chloroplast chaperonin”, is increased Cytoplasmic.

[0367] The sequence of AVINDRAFT_{—}2382 from Azotobacter vinelandii, e.g. as shown in column 5 of table I, is published (e.g. sequences from S. cerevisiae have been published in Goffeau et al., Science 274 (5287), 546 (1996), sequences from E. coli have been published in Blattner et al., Science 277 (5331), 1453 (1997)), and/or its activity is described as 30S ribosomal protein S11.

[0368] Accordingly, in one embodiment, the process of the present invention comprises increasing or generating the activity of a gene product with the activity of a “30S ribosomal protein S11” from Azotobacter vinelandii or its functional equivalent or its homolog, e.g. the increase of
[0369] (a) a gene product of a gene comprising the nucleic acid molecule as shown in column 5 of table I, and being depicted in the same respective line as said AVINDRAFT_{—}2382 or a functional equivalent or a homologue thereof as shown depicted in column 7 of table I, preferably a homologue or functional equivalent as shown depicted in column 7 of table I B, and being depicted in the same respective line as said AVINDRAFT_{—}2382; or
[0370] (b) a polypeptide comprising a polypeptide, a consensus sequence or a polypeptide motif as shown depicted in column 5 of table II or column 7 of table IV, and being depicted in the same respective line as said AVINDRAFT_{—}2382 or a functional equivalent or a homologue thereof as depicted in column 7 of table II or IV, preferably a homologue or functional equivalent as depicted in column 7 of table II B, and being depicted in the same respective line as said AVINDRAFT_{—}2382,
   as mentioned herein, for an enhanced yield, e.g an improved yield-related trait, e.g. enhanced tolerance to abiotic environmental stress and/or increased yield like biomass as compared to a corresponding, e.g. non-transformed wild type plant cell, plant or part thereof in plant cell, plant or part thereof, as mentioned, especially for an enhanced tolerance to abiotic environmental stress, or increased yield, or an enhanced tolerance to abiotic environmental stress and increased yield.

[0371] Accordingly, in one embodiment, the molecule which activity is to be increased in the process of the invention is the gene product with an activity of described as a “30S ribosomal protein S11”, preferably it is the molecule of section (a) or (b) of this paragraph.

[0372] In one embodiment, said molecule, which activity is to be increased in the process of the invention and which is the gene product with an activity as described as a “30S ribosomal protein S11”, is increased Cytoplasmic.

[0373] The sequence of AVINDRAFT_{—}2913 from Azotobacter vinelandii, e.g. as shown in column 5 of table I, is published (e.g. sequences from S. cerevisiae have been published in Goffeau et al., Science 274 (5287), 546 (1996), sequences from E. coli have been published in Blattner et al., Science 277 (5331), 1453 (1997)), and/or its activity is described as Short chain dehydrogenase.

[0374] Accordingly, in one embodiment, the process of the present invention comprises increasing or generating the activity of a gene product with the activity of a “Short chain dehydrogenase” from Azotobacter vinelandii or its functional equivalent or its homolog, e.g. the increase of
[0375] (a) a gene product of a gene comprising the nucleic acid molecule as shown in column 5 of table I, and being depicted in the same respective line as said AVINDRAFT_{—}2913 or a functional equivalent or a homologue thereof as shown depicted in column 7 of table I, preferably a homologue or functional equivalent as shown depicted in column 7 of table I B, and being depicted in the same respective line as said AVINDRAFT_{—}2913; or
[0376] (b) a polypeptide comprising a polypeptide, a consensus sequence or a polypeptide motif as shown depicted in column 5 of table II or column 7 of table IV, and being depicted in the same respective line as said AVINDRAFT_{—}2913 or a functional equivalent or a homologue thereof as depicted in column 7 of table II or IV, preferably a homologue or functional equivalent as depicted in column 7 of table II B, and being depicted in the same respective line as said AVINDRAFT_{—}2913,
   as mentioned herein, for an enhanced yield, e.g an improved yield-related trait, e.g. enhanced tolerance to abiotic environmental stress and/or increased yield like biomass as compared to a corresponding, e.g. non-transformed wild type plant cell, plant or part thereof in plant cell, plant or part thereof, as mentioned, especially for an enhanced tolerance to abiotic environmental stress, or increased yield, or an enhanced tolerance to abiotic environmental stress and increased yield.

[0377] Accordingly, in one embodiment, the molecule which activity is to be increased in the process of the invention is the gene product with an activity of described as a “Short chain dehydrogenase”, preferably it is the molecule of section (a) or (b) of this paragraph.

[0378] In one embodiment, said molecule, which activity is to be increased in the process of the invention and which is the gene product with an activity as described as a “Short chain dehydrogenase”, is increased Cytoplasmic.

[0379] The sequence of B0252 from Escherichia coli, e.g. as shown in column 5 of table I, is published (e.g. sequences from S. cerevisiae have been published in Goffeau et al., Science 274 (5287), 546 (1996), sequences from E. coli have been published in Blattner et al., Science 277 (5331), 1453 (1997)), and/or its activity is described as B0252-protein.

[0380] Accordingly, in one embodiment, the process of the present invention comprises increasing or generating the activity of a gene product with the activity of a “B0252-protein” from Escherichia coli or its functional equivalent or its homolog, e.g. the increase of
[0381] (a) a gene product of a gene comprising the nucleic acid molecule as shown in column 5 of table I, and being depicted in the same respective line as said B0252 or a functional equivalent or a homologue thereof as shown depicted in column 7 of table I, preferably a homologue or functional equivalent as shown depicted in column 7 of table I B, and being depicted in the same respective line as said B0252; or
[0382] (b) a polypeptide comprising a polypeptide, a consensus sequence or a polypeptide motif as shown depicted in column 5 of table II or column 7 of table IV, and being depicted in the same respective line as said B0252 or a functional equivalent or a homologue thereof as depicted in column 7 of table II or IV, preferably a homologue or functional equivalent as depicted in column 7 of table II B, and being depicted in the same respective line as said B0252,
   as mentioned herein, for an enhanced yield, e.g an improved yield-related trait, e.g. enhanced tolerance to abiotic environmental stress and/or increased yield like biomass as compared to a corresponding, e.g. non-transformed wild type plant cell, plant or part thereof in plant cell, plant or part thereof, as mentioned, especially for an enhanced tolerance to abiotic environmental stress, or increased yield, or an enhanced tolerance to abiotic environmental stress and increased yield.

[0383] Accordingly, in one embodiment, the molecule which activity is to be increased in the process of the invention is the gene product with an activity of described as a “B0252-protein”, preferably it is the molecule of section (a) or (b) of this paragraph.

[0384] In one embodiment, said molecule, which activity is to be increased in the process of the invention and which is the gene product with an activity as described as a “B0252-protein”, is increased Cytoplasmic.

[0385] The sequence of B0730 from Escherichia coli, e.g. as shown in column 5 of table I, is published (e.g. sequences from S. cerevisiae have been published in Goffeau et al., Science 274 (5287), 546 (1996), sequences from E. coli have been published in Blattner et al., Science 277 (5331), 1453 (1997)), and/or its activity is described as transcription regulator (farR).

[0386] Accordingly, in one embodiment, the process of the present invention comprises increasing or generating the activity of a gene product with the activity of a “transcription regulator (farR)” from Escherichia coli or its functional equivalent or its homolog, e.g. the increase of
[0387] (a) a gene product of a gene comprising the nucleic acid molecule as shown in column 5 of table I, and being depicted in the same respective line as said B0730 or a functional equivalent or a homologue thereof as shown depicted in column 7 of table I, preferably a homologue or functional equivalent as shown depicted in column 7 of table I B, and being depicted in the same respective line as said B0730; or
[0388] (b) a polypeptide comprising a polypeptide, a consensus sequence or a polypeptide motif as shown depicted in column 5 of table II or column 7 of table IV, and being depicted in the same respective line as said B0730 or a functional equivalent or a homologue thereof as depicted in column 7 of table II or IV, preferably a homologue or functional equivalent as depicted in column 7 of table II B, and being depicted in the same respective line as said B0730,
   as mentioned herein, for an enhanced yield, e.g an improved yield-related trait, e.g. enhanced tolerance to abiotic environmental stress and/or increased yield like biomass as compared to a corresponding, e.g. non-transformed wild type plant cell, plant or part thereof in plant cell, plant or part thereof, as mentioned, especially for an enhanced tolerance to abiotic environmental stress, or increased yield, or an enhanced tolerance to abiotic environmental stress and increased yield.

[0389] Accordingly, in one embodiment, the molecule which activity is to be increased in the process of the invention is the gene product with an activity of described as a “transcription regulator (farR)”, preferably it is the molecule of section (a) or (b) of this paragraph.

[0390] In one embodiment, said molecule, which activity is to be increased in the process of the invention and which is the gene product with an activity as described as a “transcription regulator (farR)”, is increased Cytoplasmic.

[0391] The sequence of B1926 from Escherichia coli, e.g. as shown in column 5 of table I, is published (e.g. sequences from S. cerevisiae have been published in Goffeau et al., Science 274 (5287), 546 (1996), sequences from E. coli have been published in Blattner et al., Science 277 (5331), 1453 (1997)), and/or its activity is described as flagellar protein.

[0392] Accordingly, in one embodiment, the process of the present invention comprises increasing or generating the activity of a gene product with the activity of a “flagellar protein” from Escherichia coli or its functional equivalent or its homolog, e.g. the increase of
[0393] (a) a gene product of a gene comprising the nucleic acid molecule as shown in column 5 of table I, and being depicted in the same respective line as said B1926 or a functional equivalent or a homologue thereof as shown depicted in column 7 of table I, preferably a homologue or functional equivalent as shown depicted in column 7 of table I B, and being depicted in the same respective line as said B1926; or
[0394] (b) a polypeptide comprising a polypeptide, a consensus sequence or a polypeptide motif as shown depicted in column 5 of table II or column 7 of table IV, and being depicted in the same respective line as said B1926 or a functional equivalent or a homologue thereof as depicted in column 7 of table II or IV, preferably a homologue or functional equivalent as depicted in column 7 of table II B, and being depicted in the same respective line as said B1926,
   as mentioned herein, for an enhanced yield, e.g an improved yield-related trait, e.g. enhanced tolerance to abiotic environmental stress and/or increased yield like biomass as compared to a corresponding, e.g. non-transformed wild type plant cell, plant or part thereof in plant cell, plant or part thereof, as mentioned, especially for an enhanced tolerance to abiotic environmental stress, or increased yield, or an enhanced tolerance to abiotic environmental stress and increased yield.

[0395] Accordingly, in one embodiment, the molecule which activity is to be increased in the process of the invention is the gene product with an activity of described as a “flagellar protein”, preferably it is the molecule of section (a) or (b) of this paragraph.

[0396] In one embodiment, said molecule, which activity is to be increased in the process of the invention and which is the gene product with an activity as described as a “flagellar protein”, is increased Cytoplasmic.

[0397] The sequence of B2426 from Escherichia coli, e.g. as shown in column 5 of table I, is published (e.g. sequences from S. cerevisiae have been published in Goffeau et al., Science 274 (5287), 546 (1996), sequences from E. coli have been published in Blattner et al., Science 277 (5331), 1453 (1997)), and/or its activity is described as Short chain dehydrogenase.

[0398] Accordingly, in one embodiment, the process of the present invention comprises increasing or generating the activity of a gene product with the activity of a “Short chain dehydrogenase” from Escherichia coli or its functional equivalent or its homolog, e.g. the increase of
[0399] (a) a gene product of a gene comprising the nucleic acid molecule as shown in column 5 of table I, and being depicted in the same respective line as said B2426 or a functional equivalent or a homologue thereof as shown depicted in column 7 of table I, preferably a homologue or functional equivalent as shown depicted in column 7 of table I B, and being depicted in the same respective line as said B2426; or
[0400] (b) a polypeptide comprising a polypeptide, a consensus sequence or a polypeptide motif as shown depicted in column 5 of table II or column 7 of table IV, and being depicted in the same respective line as said B2426 or a functional equivalent or a homologue thereof as depicted in column 7 of table II or IV, preferably a homologue or functional equivalent as depicted in column 7 of table II B, and being depicted in the same respective line as said B2426,
   as mentioned herein, for an enhanced yield, e.g an improved yield-related trait, e.g. enhanced tolerance to abiotic environmental stress and/or increased yield like biomass as compared to a corresponding, e.g. non-transformed wild type plant cell, plant or part thereof in plant cell, plant or part thereof, as mentioned, especially for an enhanced tolerance to abiotic environmental stress, or increased yield, or an enhanced tolerance to abiotic environmental stress and increased yield.

[0401] Accordingly, in one embodiment, the molecule which activity is to be increased in the process of the invention is the gene product with an activity of described as a “Short chain dehydrogenase”, preferably it is the molecule of section (a) or (b) of this paragraph.

[0402] In one embodiment, said molecule, which activity is to be increased in the process of the invention and which is the gene product with an activity as described as a “Short chain dehydrogenase”, is increased Cytoplasmic.

[0403] The sequence of GM02LC13630 from Glycine max, e.g. as shown in column 5 of table I, is published (e.g. sequences from S. cerevisiae have been published in Goffeau et al., Science 274 (5287), 546 (1996), sequences from E. coli have been published in Blattner et al., Science 277 (5331), 1453 (1997)), and/or its activity is described as BRICK1-like protein.

[0404] Accordingly, in one embodiment, the process of the present invention comprises increasing or generating the activity of a gene product with the activity of a “BRICK1-like protein” from Glycine max or its functional equivalent or its homolog, e.g. the increase of
[0405] (a) a gene product of a gene comprising the nucleic acid molecule as shown in column 5 of table I, and being depicted in the same respective line as said GM02LC13630 or a functional equivalent or a homologue thereof as shown depicted in column 7 of table I, preferably a homologue or functional equivalent as shown depicted in column 7 of table I B, and being depicted in the same respective line as said GM02LC13630; or
[0406] (b) a polypeptide comprising a polypeptide, a consensus sequence or a polypeptide motif as shown depicted in column 5 of table II or column 7 of table IV, and being depicted in the same respective line as said GM02LC13630 or a functional equivalent or a homologue thereof as depicted in column 7 of table II or IV, preferably a homologue or functional equivalent as depicted in column 7 of table II B, and being depicted in the same respective line as said GM02LC13630,
   as mentioned herein, for an enhanced yield, e.g an improved yield-related trait, e.g. enhanced tolerance to abiotic environmental stress and/or increased yield like biomass as compared to a corresponding, e.g. non-transformed wild type plant cell, plant or part thereof in plant cell, plant or part thereof, as mentioned, especially for an enhanced tolerance to abiotic environmental stress, or increased yield, or an enhanced tolerance to abiotic environmental stress and increased yield.

[0407] Accordingly, in one embodiment, the molecule which activity is to be increased in the process of the invention is the gene product with an activity of described as a “BRICK1-like protein”, preferably it is the molecule of section (a) or (b) of this paragraph.

[0408] In one embodiment, said molecule, which activity is to be increased in the process of the invention and which is the gene product with an activity as described as a “BRICK1-like protein”, is increased Cytoplasmic.

[0409] The sequence of SLL0418 from Synechocystis sp., e.g. as shown in column 5 of table I, is published (e.g. sequences from S. cerevisiae have been published in Goffeau et al., Science 274 (5287), 546 (1996), sequences from E. coli have been published in Blattner et al., Science 277 (5331), 1453 (1997)), and/or its activity is described as Sterol-C-methyltransferase.

[0410] Accordingly, in one embodiment, the process of the present invention comprises increasing or generating the activity of a gene product with the activity of a “Sterol-C-methyltransferase” from Synechocystis sp. or its functional equivalent or its homolog, e.g. the increase of
[0411] (a) a gene product of a gene comprising the nucleic acid molecule as shown in column 5 of table I, and being depicted in the same respective line as said SLL0418 or a functional equivalent or a homologue thereof as shown depicted in column 7 of table I, preferably a homologue or functional equivalent as shown depicted in column 7 of table I B, and being depicted in the same respective line as said SLL0418; or
[0412] (b) a polypeptide comprising a polypeptide, a consensus sequence or a polypeptide motif as shown depicted in column 5 of table II or column 7 of table IV, and being depicted in the same respective line as said SLL0418 or a functional equivalent or a homologue thereof as depicted in column 7 of table II or IV, preferably a homologue or functional equivalent as depicted in column 7 of table II B, and being depicted in the same respective line as said SLL0418,
   as mentioned herein, for an enhanced yield, e.g an improved yield-related trait, e.g. enhanced tolerance to abiotic environmental stress and/or increased yield like biomass as compared to a corresponding, e.g. non-transformed wild type plant cell, plant or part thereof in plant cell, plant or part thereof, as mentioned, especially for an enhanced tolerance to abiotic environmental stress, or increased yield, or an enhanced tolerance to abiotic environmental stress and increased yield.

[0413] Accordingly, in one embodiment, the molecule which activity is to be increased in the process of the invention is the gene product with an activity of described as a “Sterol-C-methyltransferase”, preferably it is the molecule of section (a) or (b) of this paragraph.

[0414] In one embodiment, said molecule, which activity is to be increased in the process of the invention and which is the gene product with an activity as described as a “Sterol-C-methyltransferase”, is increased Mitochondrial.

[0415] The sequence of YCR085W from Saccharomyces cerevisiae, e.g. as shown in column 5 of table I, is published (e.g. sequences from S. cerevisiae have been published in Goffeau et al., Science 274 (5287), 546 (1996), sequences from E. coli have been published in Blattner et al., Science 277 (5331), 1453 (1997)), and/or its activity is described as Cav1 protein.

[0416] Accordingly, in one embodiment, the process of the present invention comprises increasing or generating the activity of a gene product with the activity of a “Cav1 protein” from Saccharomyces cerevisiae or its functional equivalent or its homolog, e.g. the increase of
[0417] (a) a gene product of a gene comprising the nucleic acid molecule as shown in column 5 of table I, and being depicted in the same respective line as said YCR085W or a functional equivalent or a homologue thereof as shown depicted in column 7 of table I, preferably a homologue or functional equivalent as shown depicted in column 7 of table I B, and being depicted in the same respective line as said YCR085W; or
[0418] (b) a polypeptide comprising a polypeptide, a consensus sequence or a polypeptide motif as shown depicted in column 5 of table II or column 7 of table IV, and being depicted in the same respective line as said YCR085W or a functional equivalent or a homologue thereof as depicted in column 7 of table II or IV, preferably a homologue or functional equivalent as depicted in column 7 of table II B, and being depicted in the same respective line as said YCR085W,
   as mentioned herein, for an enhanced yield, e.g an improved yield-related trait, e.g. enhanced tolerance to abiotic environmental stress and/or increased yield like biomass as compared to a corresponding, e.g. non-transformed wild type plant cell, plant or part thereof in plant cell, plant or part thereof, as mentioned, especially for an enhanced tolerance to abiotic environmental stress, or increased yield, or an enhanced tolerance to abiotic environmental stress and increased yield.

[0419] Accordingly, in one embodiment, the molecule which activity is to be increased in the process of the invention is the gene product with an activity of described as a “Cav1 protein”, preferably it is the molecule of section (a) or (b) of this paragraph.

[0420] In one embodiment, said molecule, which activity is to be increased in the process of the invention and which is the gene product with an activity as described as a “Cav1 protein”, is increased Cytoplasmic.

[0421] The sequence of YDL155W from Saccharomyces cerevisiae, e.g. as shown in column 5 of table I, is published (e.g. sequences from S. cerevisiae have been published in Goffeau et al., Science 274 (5287), 546 (1996), sequences from E. coli have been published in Blattner et al., Science 277 (5331), 1453 (1997)), and/or its activity is described as G2/mitotic-specific cyclin.

[0422] Accordingly, in one embodiment, the process of the present invention comprises increasing or generating the activity of a gene product with the activity of a “G2/mitotic-specific cyclin” from Saccharomyces cerevisiae or its functional equivalent or its homolog, e.g. the increase of
[0423] (a) a gene product of a gene comprising the nucleic acid molecule as shown in column 5 of table I, and being depicted in the same respective line as said YDL155W or a functional equivalent or a homologue thereof as shown depicted in column 7 of table I, preferably a homologue or functional equivalent as shown depicted in column 7 of table I B, and being depicted in the same respective line as said YDL155W; or
[0424] (b) a polypeptide comprising a polypeptide, a consensus sequence or a polypeptide motif as shown depicted in column 5 of table II or column 7 of table IV, and being depicted in the same respective line as said YDL155W or a functional equivalent or a homologue thereof as depicted in column 7 of table II or IV, preferably a homologue or functional equivalent as depicted in column 7 of table II B, and being depicted in the same respective line as said YDL155W,
   as mentioned herein, for an enhanced yield, e.g an improved yield-related trait, e.g. enhanced tolerance to abiotic environmental stress and/or increased yield like biomass as compared to a corresponding, e.g. non-transformed wild type plant cell, plant or part thereof in plant cell, plant or part thereof, as mentioned, especially for an enhanced tolerance to abiotic environmental stress, or increased yield, or an enhanced tolerance to abiotic environmental stress and increased yield.

[0425] Accordingly, in one embodiment, the molecule which activity is to be increased in the process of the invention is the gene product with an activity of described as a “G2/mitotic-specific cyclin”, preferably it is the molecule of section (a) or (b) of this paragraph.

[0426] In one embodiment, said molecule, which activity is to be increased in the process of the invention and which is the gene product with an activity as described as a “G2/mitotic-specific cyclin”, is increased Cytoplasmic.

[0427] The sequence of YHL019C from Saccharomyces cerevisiae, e.g. as shown in column 5 of table I, is published (e.g. sequences from S. cerevisiae have been published in Goffeau et al., Science 274 (5287), 546 (1996), sequences from E. coli have been published in Blattner et al., Science 277 (5331), 1453 (1997)), and/or its activity is described as Adaptin medium chain homolog APM2.

[0428] Accordingly, in one embodiment, the process of the present invention comprises increasing or generating the activity of a gene product with the activity of a “Adaptin medium chain homolog APM2” from Saccharomyces cerevisiae or its functional equivalent or its homolog, e.g. the increase of
[0429] (a) a gene product of a gene comprising the nucleic acid molecule as shown in column 5 of table I, and being depicted in the same respective line as said YHL019C or a functional equivalent or a homologue thereof as shown depicted in column 7 of table I, preferably a homologue or functional equivalent as shown depicted in column 7 of table I B, and being depicted in the same respective line as said YHL019C; or
[0430] (b) a polypeptide comprising a polypeptide, a consensus sequence or a polypeptide motif as shown depicted in column 5 of table II or column 7 of table IV, and being depicted in the same respective line as said YHL019C or a functional equivalent or a homologue thereof as depicted in column 7 of table II or IV, preferably a homologue or functional equivalent as depicted in column 7 of table II B, and being depicted in the same respective line as said YHL019C,
   as mentioned herein, for an enhanced yield, e.g an improved yield-related trait, e.g. enhanced tolerance to abiotic environmental stress and/or increased yield like biomass as compared to a corresponding, e.g. non-transformed wild type plant cell, plant or part thereof in plant cell, plant or part thereof, as mentioned, especially for an enhanced tolerance to abiotic environmental stress, or increased yield, or an enhanced tolerance to abiotic environmental stress and increased yield.

[0431] Accordingly, in one embodiment, the molecule which activity is to be increased in the process of the invention is the gene product with an activity of described as a “Adaptin medium chain homolog APM2”, preferably it is the molecule of section (a) or (b) of this paragraph.

[0432] In one embodiment, said molecule, which activity is to be increased in the process of the invention and which is the gene product with an activity as described as a “Adaptin medium chain homolog APM2”, is increased Cytoplasmic.

[0433] The sequence of YJR066w from Saccharomyces cerevisiae, e.g. as shown in column 5 of table I, is published (e.g. sequences from S. cerevisiae have been published in Goffeau et al., Science 274 (5287), 546 (1996), sequences from E. coli have been published in Blattner et al., Science 277 (5331), 1453 (1997)), and/or its activity is described as Serine/threonine-protein kinase.

[0434] Accordingly, in one embodiment, the process of the present invention comprises increasing or generating the activity of a gene product with the activity of a “Serine/threonine-protein kinase” from Saccharomyces cerevisiae or its functional equivalent or its homolog, e.g. the increase of
[0435] (a) a gene product of a gene comprising the nucleic acid molecule as shown in column 5 of table I, and being depicted in the same respective line as said YJR066w or a functional equivalent or a homologue thereof as shown depicted in column 7 of table I, preferably a homologue or functional equivalent as shown depicted in column 7 of table I B, and being depicted in the same respective line as said YJR066w; or
[0436] (b) a polypeptide comprising a polypeptide, a consensus sequence or a polypeptide motif as shown depicted in column 5 of table II or column 7 of table IV, and being depicted in the same respective line as said YJR066w or a functional equivalent or a homologue thereof as depicted in column 7 of table II or IV, preferably a homologue or functional equivalent as depicted in column 7 of table II B, and being depicted in the same respective line as said YJR066w,
   as mentioned herein, for an enhanced yield, e.g an improved yield-related trait, e.g. enhanced tolerance to abiotic environmental stress and/or increased yield like biomass as compared to a corresponding, e.g. non-transformed wild type plant cell, plant or part thereof in plant cell, plant or part thereof, as mentioned, especially for an enhanced tolerance to abiotic environmental stress, or increased yield, or an enhanced tolerance to abiotic environmental stress and increased yield.

[0437] Accordingly, in one embodiment, the molecule which activity is to be increased in the process of the invention is the gene product with an activity of described as a “Serine/threonine-protein kinase”, preferably it is the molecule of section (a) or (b) of this paragraph.

[0438] In one embodiment, said molecule, which activity is to be increased in the process of the invention and which is the gene product with an activity as described as a “Serine/threonine-protein kinase”, is increased Cytoplasmic.

[0439] The sequence of YKR015C from Saccharomyces cerevisiae, e.g. as shown in column 5 of table I, is published (e.g. sequences from S. cerevisiae have been published in Goffeau et al., Science 274 (5287), 546 (1996), sequences from E. coli have been published in Blattner et al., Science 277 (5331), 1453 (1997)), and/or its activity is described as Ykr015c-protein.

[0440] Accordingly, in one embodiment, the process of the present invention comprises increasing or generating the activity of a gene product with the activity of a “Ykr015c-protein” from Saccharomyces cerevisiae or its functional equivalent or its homolog, e.g. the increase of
[0441] (a) a gene product of a gene comprising the nucleic acid molecule as shown in column 5 of table I, and being depicted in the same respective line as said YKR015C or a functional equivalent or a homologue thereof as shown depicted in column 7 of table I, preferably a homologue or functional equivalent as shown depicted in column 7 of table I B, and being depicted in the same respective line as said YKR015C; or
[0442] (b) a polypeptide comprising a polypeptide, a consensus sequence or a polypeptide motif as shown depicted in column 5 of table II or column 7 of table IV, and being depicted in the same respective line as said YKR015C or a functional equivalent or a homologue thereof as depicted in column 7 of table II or IV, preferably a homologue or functional equivalent as depicted in column 7 of table II B, and being depicted in the same respective line as said YKR015C,
   as mentioned herein, for an enhanced yield, e.g an improved yield-related trait, e.g. enhanced tolerance to abiotic environmental stress and/or increased yield like biomass as compared to a corresponding, e.g. non-transformed wild type plant cell, plant or part thereof in plant cell, plant or part thereof, as mentioned, especially for an enhanced tolerance to abiotic environmental stress, or increased yield, or an enhanced tolerance to abiotic environmental stress and increased yield.

[0443] Accordingly, in one embodiment, the molecule which activity is to be increased in the process of the invention is the gene product with an activity of described as a “Ykr015c-protein”, preferably it is the molecule of section (a) or (b) of this paragraph.

[0444] In one embodiment, said molecule, which activity is to be increased in the process of the invention and which is the gene product with an activity as described as a “Ykr015c-protein”, is increased Cytoplasmic.

[0445] The sequence of YNL025C from Saccharomyces cerevisiae, e.g. as shown in column 5 of table I, is published (e.g. sequences from S. cerevisiae have been published in Goffeau et al., Science 274 (5287), 546 (1996), sequences from E. coli have been published in Blattner et al., Science 277 (5331), 1453 (1997)), and/or its activity is described as RNA polymerase II holoenzyme cyclin-like subunit.

[0446] Accordingly, in one embodiment, the process of the present invention comprises increasing or generating the activity of a gene product with the activity of a “RNA polymerase II holoenzyme cyclin-like subunit” from Saccharomyces cerevisiae or its functional equivalent or its homolog, e.g. the increase of
[0447] (a) a gene product of a gene comprising the nucleic acid molecule as shown in column 5 of table I, and being depicted in the same respective line as said YNL025C or a functional equivalent or a homologue thereof as shown depicted in column 7 of table I, preferably a homologue or functional equivalent as shown depicted in column 7 of table I B, and being depicted in the same respective line as said YNL025C; or
[0448] (b) a polypeptide comprising a polypeptide, a consensus sequence or a polypeptide motif as shown depicted in column 5 of table II or column 7 of table IV, and being depicted in the same respective line as said YNL025C or a functional equivalent or a homologue thereof as depicted in column 7 of table II or IV, preferably a homologue or functional equivalent as depicted in column 7 of table II B, and being depicted in the same respective line as said YNL025C,
   as mentioned herein, for an enhanced yield, e.g an improved yield-related trait, e.g. enhanced tolerance to abiotic environmental stress and/or increased yield like biomass as compared to a corresponding, e.g. non-transformed wild type plant cell, plant or part thereof in plant cell, plant or part thereof, as mentioned, especially for an enhanced tolerance to abiotic environmental stress, or increased yield, or an enhanced tolerance to abiotic environmental stress and increased yield.

[0449] Accordingly, in one embodiment, the molecule which activity is to be increased in the process of the invention is the gene product with an activity of described as a “RNA polymerase II holoenzyme cyclin-like subunit”, preferably it is the molecule of section (a) or (b) of this paragraph.

[0450] In one embodiment, said molecule, which activity is to be increased in the process of the invention and which is the gene product with an activity as described as a “RNA polymerase II holoenzyme cyclin-like subunit”, is increased Cytoplasmic.

[0451] The sequence of YOL073C from Saccharomyces cerevisiae, e.g. as shown in column 5 of table I, is published (e.g. sequences from S. cerevisiae have been published in Goffeau et al., Science 274 (5287), 546 (1996), sequences from E. coli have been published in Blattner et al., Science 277 (5331), 1453 (1997)), and/or its activity is described as Membrane protein

[0452] Accordingly, in one embodiment, the process of the present invention comprises increasing or generating the activity of a gene product with the activity of a “Membrane protein” from Saccharomyces cerevisiae or its functional equivalent or its homolog, e.g. the increase of
[0453] (a) a gene product of a gene comprising the nucleic acid molecule as shown in column 5 of table I, and being depicted in the same respective line as said YOL073C or a functional equivalent or a homologue thereof as shown depicted in column 7 of table I, preferably a homologue or functional equivalent as shown depicted in column 7 of table I B, and being depicted in the same respective line as said YOL073C; or
[0454] (b) a polypeptide comprising a polypeptide, a consensus sequence or a polypeptide motif as shown depicted in column 5 of table II or column 7 of table IV, and being depicted in the same respective line as said YOL073C or a functional equivalent or a homologue thereof as depicted in column 7 of table II or IV, preferably a homologue or functional equivalent as depicted in column 7 of table II B, and being depicted in the same respective line as said YOL073C,
   as mentioned herein, for an enhanced yield, e.g an improved yield-related trait, e.g. enhanced tolerance to abiotic environmental stress and/or increased yield like biomass as compared to a corresponding, e.g. non-transformed wild type plant cell, plant or part thereof in plant cell, plant or part thereof, as mentioned, especially for an enhanced tolerance to abiotic environmental stress, or increased yield, or an enhanced tolerance to abiotic environmental stress and increased yield.

[0455] Accordingly, in one embodiment, the molecule which activity is to be increased in the process of the invention is the gene product with an activity of described as a “Membrane protein”, preferably it is the molecule of section (a) or (b) of this paragraph.

[0456] In one embodiment, said molecule, which activity is to be increased in the process of the invention and which is the gene product with an activity as described as a “Membrane protein”, is increased Plastidic.

[0457] The sequence of YPL167C from Saccharomyces cerevisiae, e.g. as shown in column 5 of table I, is published (e.g. sequences from S. cerevisiae have been published in Goffeau et al., Science 274 (5287), 546 (1996), sequences from E. coli have been published in Blattner et al., Science 277 (5331), 1453 (1997)), and/or its activity is described as DNA polymerase.

[0458] Accordingly, in one embodiment, the process of the present invention comprises increasing or generating the activity of a gene product with the activity of a “DNA polymerase” from Saccharomyces cerevisiae or its functional equivalent or its homolog, e.g. the increase of
[0459] (a) a gene product of a gene comprising the nucleic acid molecule as shown in column 5 of table I, and being depicted in the same respective line as said YPL167C or a functional equivalent or a homologue thereof as shown depicted in column 7 of table I, preferably a homologue or functional equivalent as shown depicted in column 7 of table I B, and being depicted in the same respective line as said YPL167C; or
[0460] (b) a polypeptide comprising a polypeptide, a consensus sequence or a polypeptide motif as shown depicted in column 5 of table II or column 7 of table IV, and being depicted in the same respective line as said YPL167C or a functional equivalent or a homologue thereof as depicted in column 7 of table II or IV, preferably a homologue or functional equivalent as depicted in column 7 of table II B, and being depicted in the same respective line as said YPL167C,
   as mentioned herein, for an enhanced yield, e.g an improved yield-related trait, e.g. enhanced tolerance to abiotic environmental stress and/or increased yield like biomass as compared to a corresponding, e.g. non-transformed wild type plant cell, plant or part thereof in plant cell, plant or part thereof, as mentioned, especially for an enhanced tolerance to abiotic environmental stress, or increased yield, or an enhanced tolerance to abiotic environmental stress and increased yield.

[0461] Accordingly, in one embodiment, the molecule which activity is to be increased in the process of the invention is the gene product with an activity of described as a “DNA polymerase”, preferably it is the molecule of section (a) or (b) of this paragraph.

[0462] In one embodiment, said molecule, which activity is to be increased in the process of the invention and which is the gene product with an activity as described as a “DNA polymerase”, is increased Cytoplasmic.

[0463] The sequence of YPL223C from Saccharomyces cerevisiae, e.g. as shown in column 5 of table I, is published (e.g. sequences from S. cerevisiae have been published in Goffeau et al., Science 274 (5287), 546 (1996), sequences from E. coli have been published in Blattner et al., Science 277 (5331), 1453 (1997)), and/or its activity is described as GRE1-protein(Hydrophilin).

[0464] Accordingly, in one embodiment, the process of the present invention comprises increasing or generating the activity of a gene product with the activity of a “GRE1-protein(Hydrophilin)” from Saccharomyces cerevisiae or its functional equivalent or its homolog, e.g. the increase of
[0465] (a) a gene product of a gene comprising the nucleic acid molecule as shown in column 5 of table I, and being depicted in the same respective line as said YPL223C or a functional equivalent or a homologue thereof as shown depicted in column 7 of table I, preferably a homologue or functional equivalent as shown depicted in column 7 of table I B, and being depicted in the same respective line as said YPL223C; or
[0466] (b) a polypeptide comprising a polypeptide, a consensus sequence or a polypeptide motif as shown depicted in column 5 of table II or column 7 of table IV, and being depicted in the same respective line as said YPL223C or a functional equivalent or a homologue thereof as depicted in column 7 of table II or IV, preferably a homologue or functional equivalent as depicted in column 7 of table II B, and being depicted in the same respective line as said YPL223C,
   as mentioned herein, for an enhanced yield, e.g an improved yield-related trait, e.g. enhanced tolerance to abiotic environmental stress and/or increased yield like biomass as compared to a corresponding, e.g. non-transformed wild type plant cell, plant or part thereof in plant cell, plant or part thereof, as mentioned, especially for an enhanced tolerance to abiotic environmental stress, or increased yield, or an enhanced tolerance to abiotic environmental stress and increased yield.

[0467] Accordingly, in one embodiment, the molecule which activity is to be increased in the process of the invention is the gene product with an activity of described as a “GRE1-protein(Hydrophilin)”, preferably it is the molecule of section (a) or (b) of this paragraph.

[0468] In one embodiment, said molecule, which activity is to be increased in the process of the invention and which is the gene product with an activity as described as a “GRE1-protein(Hydrophilin)”, is increased Cytoplasmic.

[0469] The sequence of YPL249C-A from Saccharomyces cerevisiae, e.g. as shown in column 5 of table I, is published (e.g. sequences from S. cerevisiae have been published in Goffeau et al., Science 274 (5287), 546 (1996), sequences from E. coli have been published in Blattner et al., Science 277 (5331), 1453 (1997)), and/or its activity is described as 60S ribosomal protein.

[0470] Accordingly, in one embodiment, the process of the present invention comprises increasing or generating the activity of a gene product with the activity of a “60S ribosomal protein” from Saccharomyces cerevisiae or its functional equivalent or its homolog, e.g. the increase of
[0471] (a) a gene product of a gene comprising the nucleic acid molecule as shown in column 5 of table I, and being depicted in the same respective line as said YPL249C-A or a functional equivalent or a homologue thereof as shown depicted in column 7 of table I, preferably a homologue or functional equivalent as shown depicted in column 7 of table I B, and being depicted in the same respective line as said YPL249C-A; or
[0472] (b) a polypeptide comprising a polypeptide, a consensus sequence or a polypeptide motif as shown depicted in column 5 of table II or column 7 of table IV, and being depicted in the same respective line as said YPL249C-A or a functional equivalent or a homologue thereof as depicted in column 7 of table II or IV, preferably a homologue or functional equivalent as depicted in column 7 of table II B, and being depicted in the same respective line as said YPL249C-A,
   as mentioned herein, for an enhanced yield, e.g an improved yield-related trait, e.g. enhanced tolerance to abiotic environmental stress and/or increased yield like biomass as compared to a corresponding, e.g. non-transformed wild type plant cell, plant or part thereof in plant cell, plant or part thereof, as mentioned, especially for an enhanced tolerance to abiotic environmental stress, or increased yield, or an enhanced tolerance to abiotic environmental stress and increased yield.

[0473] Accordingly, in one embodiment, the molecule which activity is to be increased in the process of the invention is the gene product with an activity of described as a “60S ribosomal protein”, preferably it is the molecule of section (a) or (b) of this paragraph.

[0474] In one embodiment, said molecule, which activity is to be increased in the process of the invention and which is the gene product with an activity as described as a “60S ribosomal protein”, is increased Cytoplasmic.

[0475] The sequence of B2426_{—}2 from Escherichia coli, e.g. as shown in column 5 of table I, is published (e.g. sequences from S. cerevisiae have been published in Goffeau et al., Science 274 (5287), 546 (1996), sequences from E. coli have been published in Blattner et al., Science 277 (5331), 1453 (1997)), and/or its activity is described as Short chain dehydrogenase.

[0476] Accordingly, in one embodiment, the process of the present invention comprises increasing or generating the activity of a gene product with the activity of a “Short chain dehydrogenase” from Escherichia coli or its functional equivalent or its homolog, e.g. the increase of
[0477] (a) a gene product of a gene comprising the nucleic acid molecule as shown in column 5 of table I, and being depicted in the same respective line as said B2426_{—}2 or a functional equivalent or a homologue thereof as shown depicted in column 7 of table I, preferably a homologue or functional equivalent as shown depicted in column 7 of table I B, and being depicted in the same respective line as said B2426_{—}2; or
[0478] (b) a polypeptide comprising a polypeptide, a consensus sequence or a polypeptide motif as shown depicted in column 5 of table II or column 7 of table IV, and being depicted in the same respective line as said B2426_{—}2 or a functional equivalent or a homologue thereof as depicted in column 7 of table II or IV, preferably a homologue or functional equivalent as depicted in column 7 of table II B, and being depicted in the same respective line as said B2426_{—}2,
   as mentioned herein, for an enhanced yield, e.g an improved yield-related trait, e.g. enhanced tolerance to abiotic environmental stress and/or increased yield like biomass as compared to a corresponding, e.g. non-transformed wild type plant cell, plant or part thereof in plant cell, plant or part thereof, as mentioned, especially for an enhanced tolerance to abiotic environmental stress, or increased yield, or an enhanced tolerance to abiotic environmental stress and increased yield.

[0479] Accordingly, in one embodiment, the molecule which activity is to be increased in the process of the invention is the gene product with an activity of described as a “Short chain dehydrogenase”, preferably it is the molecule of section (a) or (b) of this paragraph.

[0480] In one embodiment, said molecule, which activity is to be increased in the process of the invention and which is the gene product with an activity as described as a “Short chain dehydrogenase”, is increased Cytoplasmic.

[0481] The sequence of GM02LC13630_{—}2 from Glycine max, e.g. as shown in column 5 of table I, is published (e.g. sequences from S. cerevisiae have been published in Goffeau et al., Science 274 (5287), 546 (1996), sequences from E. coli have been published in Blattner et al., Science 277 (5331), 1453 (1997)), and/or its activity is described as BRICK1-like protein.

[0482] Accordingly, in one embodiment, the process of the present invention comprises increasing or generating the activity of a gene product with the activity of a “BRICK1-like protein” from Glycine max or its functional equivalent or its homolog, e.g. the increase of
[0483] (a) a gene product of a gene comprising the nucleic acid molecule as shown in column 5 of table I, and being depicted in the same respective line as said GM02LC13630_{—}2 or a functional equivalent or a homologue thereof as shown depicted in column 7 of table I, preferably a homologue or functional equivalent as shown depicted in column 7 of table I B, and being depicted in the same respective line as said GM02LC13630_{—}2; or
[0484] (b) a polypeptide comprising a polypeptide, a consensus sequence or a polypeptide motif as shown depicted in column 5 of table II or column 7 of table IV, and being depicted in the same respective line as said GM02LC13630_{—}2 or a functional equivalent or a homologue thereof as depicted in column 7 of table II or IV, preferably a homologue or functional equivalent as depicted in column 7 of table II B, and being depicted in the same respective line as said GM02LC13630_{—}2,
   as mentioned herein, for an enhanced yield, e.g an improved yield-related trait, e.g. enhanced tolerance to abiotic environmental stress and/or increased yield like biomass as compared to a corresponding, e.g. non-transformed wild type plant cell, plant or part thereof in plant cell, plant or part thereof, as mentioned, especially for an enhanced tolerance to abiotic environmental stress, or increased yield, or an enhanced tolerance to abiotic environmental stress and increased yield.

[0485] Accordingly, in one embodiment, the molecule which activity is to be increased in the process of the invention is the gene product with an activity of described as a “BRICK1-like protein”, preferably it is the molecule of section (a) or (b) of this paragraph.

[0486] In one embodiment, said molecule, which activity is to be increased in the process of the invention and which is the gene product with an activity as described as a “BRICK1-like protein”, is increased Cytoplasmic.

[0487] The sequence of YPL167C_{—}2 from Saccharomyces cerevisiae, e.g. as shown in column 5 of table I, is published (e.g. sequences from S. cerevisiae have been published in Goffeau et al., Science 274 (5287), 546 (1996), sequences from E. coli have been published in Blattner et al., Science 277 (5331), 1453 (1997)), and/or its activity is described as YPL167C_{—}2-protein.

[0488] Accordingly, in one embodiment, the process of the present invention comprises increasing or generating the activity of a gene product with the activity of a “YPL167C_{—}2-protein” from Saccharomyces cerevisiae or its functional equivalent or its homolog, e.g. the increase of
[0489] (a) a gene product of a gene comprising the nucleic acid molecule as shown in column 5 of table I, and being depicted in the same respective line as said YPL167C_{—}2 or a functional equivalent or a homologue thereof as shown depicted in column 7 of table I, preferably a homologue or functional equivalent as shown depicted in column 7 of table I B, and being depicted in the same respective line as said YPL167C_{—}2; or
[0490] (b) a polypeptide comprising a polypeptide, a consensus sequence or a polypeptide motif as shown depicted in column 5 of table II or column 7 of table IV, and being depicted in the same respective line as said YPL167C_{—}2 or a functional equivalent or a homologue thereof as depicted in column 7 of table II or IV, preferably a homologue or functional equivalent as depicted in column 7 of table II B, and being depicted in the same respective line as said YPL167C_{—}2,
   as mentioned herein, for an enhanced yield, e.g an improved yield-related trait, e.g. enhanced tolerance to abiotic environmental stress and/or increased yield like biomass as compared to a corresponding, e.g. non-transformed wild type plant cell, plant or part thereof in plant cell, plant or part thereof, as mentioned, especially for an enhanced tolerance to abiotic environmental stress, or increased yield, or an enhanced tolerance to abiotic environmental stress and increased yield.

[0491] Accordingly, in one embodiment, the molecule which activity is to be increased in the process of the invention is the gene product with an activity of described as a “YPL167C_{—}2-protein”, preferably it is the molecule of section (a) or (b) of this paragraph.

[0492] In one embodiment, said molecule, which activity is to be increased in the process of the invention and which is the gene product with an activity as described as a “YPL167C_{—}2-protein”, is increased Cytoplasmic.

[0493] The sequence of YPL249C-A_{—}2 from Saccharomyces cerevisiae, e.g. as shown in column 5 of table I, is published (e.g. sequences from S. cerevisiae have been published in Goffeau et al., Science 274 (5287), 546 (1996), sequences from E. coli have been published in Blattner et al., Science 277 (5331), 1453 (1997)), and/or its activity is described as ORF YPL249c-a.

[0494] Accordingly, in one embodiment, the process of the present invention comprises increasing or generating the activity of a gene product with the activity of a “ORF YPL249c-a” from Saccharomyces cerevisiae or its functional equivalent or its homolog, e.g. the increase of
[0495] (a) a gene product of a gene comprising the nucleic acid molecule as shown in column 5 of table I, and being depicted in the same respective line as said YPL249C-A_{—}2 or a functional equivalent or a homologue thereof as shown depicted in column 7 of table I, preferably a homologue or functional equivalent as shown depicted in column 7 of table I B, and being depicted in the same respective line as said YPL249C-A_{—}2; or
[0496] (b) a polypeptide comprising a polypeptide, a consensus sequence or a polypeptide motif as shown depicted in column 5 of table II or column 7 of table IV, and being depicted in the same respective line as said YPL249C-A_{—}2 or a functional equivalent or a homologue thereof as depicted in column 7 of table II or IV, preferably a homologue or functional equivalent as depicted in column 7 of table II B, and being depicted in the same respective line as said YPL249C-A_{—}2,
   as mentioned herein, for an enhanced yield, e.g an improved yield-related trait, e.g. enhanced tolerance to abiotic environmental stress and/or increased yield like biomass as compared to a corresponding, e.g. non-transformed wild type plant cell, plant or part thereof in plant cell, plant or part thereof, as mentioned, especially for an enhanced tolerance to abiotic environmental stress, or increased yield, or an enhanced tolerance to abiotic environmental stress and increased yield.

[0497] Accordingly, in one embodiment, the molecule which activity is to be increased in the process of the invention is the gene product with an activity of described as a “ORF YPL249c-a”, preferably it is the molecule of section (a) or (b) of this paragraph.

[0498] In one embodiment, said molecule, which activity is to be increased in the process of the invention and which is the gene product with an activity as described as a “ORF YPL249c-a”, is increased Cytoplasmic.

[0499] Surprisingly, it was observed that an increasing or generating of at least one gene conferring an activity selected from the group consisting of 30S ribosomal protein S11, 60S ribosomal protein, Adaptin medium chain homolog APM2, B0252-protein, BRICK1-like protein, Cav1 protein, Chloroplast chaperonin, DNA polymerase, flagellar protein, G2/mitotic-specific cyclin, GRE1-protein(Hydrophilin), Membrane protein, ORF YPL249c-a, RNA polymerase II holoenzyme cyclin-like subunit, Serine/threonine-protein kinase, Short chain dehydrogenase, Sterol-C-methyltransferase, transcription regulator (farR), Ykr015c-protein, and YPL167C_{—}2-protein or of a gene comprising a nucleic acid sequence described in column 5 of table I, in a plant conferred an enhanced yield, e.g an improved yield-related trait, e.g. enhanced tolerance to abiotic environmental stress and/or increased yield like biomass in the transformed plants as compared to a corresponding, e.g. non-transformed, wild type plant, especially an enhanced tolerance to abiotic environmental stress, or an increased yield, or an enhanced tolerance to abiotic environmental stress and increased yield.

[0500] Surprisingly, it was observed that an increasing or generating of at least one gene conferring an activity selected from the group consisting of 30S ribosomal protein S11, 60S ribosomal protein, Adaptin medium chain homolog APM2, B0252-protein, BRICK1-like protein, Cav1 protein, Chloroplast chaperonin, DNA polymerase, flagellar protein, G2/mitotic-specific cyclin, GRE1-protein(Hydrophilin), Membrane protein, ORF YPL249c-a, RNA polymerase II holoenzyme cyclin-like subunit, Serine/threonine-protein kinase, Short chain dehydrogenase, Sterol-C-methyltransferase, transcription regulator (farR), Ykr015c-protein, and YPL167C_{—}2-protein or of a gene comprising a nucleic acid sequence described in column 5 of table I, in A. thaliana conferred an enhanced yield, e.g an improved yield-related trait, e.g. enhanced tolerance to abiotic environmental stress and/or increased yield like biomass in the transformed plants as compared to a corresponding, e.g. non-transformed, wild type plant, especially an enhanced tolerance to abiotic environmental stress, or an increased yield, or an enhanced tolerance to abiotic environmental stress and increased yield.

[0501] In particular, it was observed that increasing or generating the activity of a gene product with the activity of a “Chloroplast chaperonin” encoded by a gene comprising the nucleic acid sequence SEQ ID NO.: 39 in A. thaliana conferred an increased yield, e.g. an increased yield-related trait, for example enhanced tolerance to abiotic environmental stress, for example an increased drought tolerance and/or low temperature tolerance and/or an increased nutrient use efficiency, intrinsic yield and/or another mentioned yield-related trait as compared to wild type control.

[0502] It was further observed that increasing or generating the activity of a gene product with the activity of a “Chloroplast chaperonin” encoded by a gene comprising the nucleic acid sequence SEQ ID NO.: 39 in A. thaliana conferred an increased biomass compared to the wild type control. In particular, it was observed that increasing or generating the activity of a gene product being encoded by a gene comprising the nucleic acid sequence SEQ ID NO.: 39 localized as indicated in table I, column 6, e.g. Cytoplasmic in A. thaliana, for example with the activity of a “Chloroplast chaperonin”, conferred an increased yield, for example biomass increase.

[0503] It was further observed that increasing or generating the activity of a gene product with the activity of a “Chloroplast chaperonin” encoded by a gene comprising the nucleic acid sequence SEQ ID NO. 39 in A. thaliana conferred an increased tolerance to abiotic environmental stress and an increased yield compared with the wild type control.

[0504] In particular, it was observed that increasing or generating the activity of a gene product with the activity of a “30S ribosomal protein S11” encoded by a gene comprising the nucleic acid sequence SEQ ID NO.: 137 in A. thaliana conferred an increased yield, e.g. an increased yield-related trait, for example enhanced tolerance to abiotic environmental stress, for example an increased drought tolerance and/or low temperature tolerance and/or an increased nutrient use efficiency, intrinsic yield and/or another mentioned yield-related trait as compared to wild type control.

[0505] It was further observed that increasing or generating the activity of a gene product with the activity of a “30S ribosomal protein S11” encoded by a gene comprising the nucleic acid sequence SEQ ID NO.: 137 in A. thaliana conferred an increased biomass compared to the wild type control. In particular, it was observed that increasing or generating the activity of a gene product being encoded by a gene comprising the nucleic acid sequence SEQ ID NO.: 137 localized as indicated in table I, column 6, e.g. Cytoplasmic in A. thaliana, for example with the activity of a “30S ribosomal protein S11”, conferred an increased yield, for example biomass increase.

[0506] It was further observed that increasing or generating the activity of a gene product with the activity of a “30S ribosomal protein S11” encoded by a gene comprising the nucleic acid sequence SEQ ID NO. 137 in A. thaliana conferred an increased tolerance to abiotic environmental stress and an increased yield compared with the wild type control.

[0507] In particular, it was observed that increasing or generating the activity of a gene product with the activity of a “Short chain dehydrogenase” encoded by a gene comprising the nucleic acid sequence SEQ ID NO.: 982 in A. thaliana conferred an increased yield, e.g. an increased yield-related trait, for example enhanced tolerance to abiotic environmental stress, for example an increased drought tolerance and/or low temperature tolerance and/or an increased nutrient use efficiency, intrinsic yield and/or another mentioned yield-related trait as compared to wild type control.

[0508] It was further observed that increasing or generating the activity of a gene product with the activity of a “Short chain dehydrogenase” encoded by a gene comprising the nucleic acid sequence SEQ ID NO.: 982 in A. thaliana conferred an increased biomass compared to the wild type control. In particular, it was observed that increasing or generating the activity of a gene product being encoded by a gene comprising the nucleic acid sequence SEQ ID NO.: 982 localized as indicated in table I, column 6, e.g. Cytoplasmic in A. thaliana, for example with the activity of a “Short chain dehydrogenase”, conferred an increased yield, for example biomass increase.

[0509] It was further observed that increasing or generating the activity of a gene product with the activity of a “Short chain dehydrogenase” encoded by a gene comprising the nucleic acid sequence SEQ ID NO. 982 in A. thaliana conferred an increased tolerance to abiotic environmental stress and an increased yield compared with the wild type control.

[0510] In particular, it was observed that increasing or generating the activity of a gene product with the activity of a “B0252-protein” encoded by a gene comprising the nucleic acid sequence SEQ ID NO.: 1225 in A. thaliana conferred an increased yield, e.g. an increased yield-related trait, for example enhanced tolerance to abiotic environmental stress, for example an increased drought tolerance and/or low temperature tolerance and/or an increased nutrient use efficiency, intrinsic yield and/or another mentioned yield-related trait as compared to wild type control.

[0511] It was further observed that increasing or generating the activity of a gene product with the activity of a “B0252-protein” encoded by a gene comprising the nucleic acid sequence SEQ ID NO.: 1225 in A. thaliana conferred an increased biomass compared to the wild type control. In particular, it was observed that increasing or generating the activity of a gene product being encoded by a gene comprising the nucleic acid sequence SEQ ID NO.: 1225 localized as indicated in table I, column 6, e.g. Cytoplasmic in A. thaliana, for example with the activity of a “B0252-protein”, conferred an increased yield, for example biomass increase.

[0512] It was further observed that increasing or generating the activity of a gene product with the activity of a “B0252-protein” encoded by a gene comprising the nucleic acid sequence SEQ ID NO. 1225 in A. thaliana conferred an increased tolerance to abiotic environmental stress and an increased yield compared with the wild type control.

[0513] In particular, it was observed that increasing or generating the activity of a gene product with the activity of a “transcription regulator (farR)” encoded by a gene comprising the nucleic acid sequence SEQ ID NO.: 1327 in A. thaliana conferred an increased yield, e.g. an increased yield-related trait, for example enhanced tolerance to abiotic environmental stress, for example an increased drought tolerance and/or low temperature tolerance and/or an increased nutrient use efficiency, intrinsic yield and/or another mentioned yield-related trait as compared to wild type control.

[0514] It was further observed that increasing or generating the activity of a gene product with the activity of a “transcription regulator (farR)” encoded by a gene comprising the nucleic acid sequence SEQ ID NO.: 1327 in A. thaliana conferred an increased biomass compared to the wild type control. In particular, it was observed that increasing or generating the activity of a gene product being encoded by a gene comprising the nucleic acid sequence SEQ ID NO.: 1327 localized as indicated in table I, column 6, e.g. Cytoplasmic in A. thaliana, for example with the activity of a “transcription regulator (farR)”, conferred an increased yield, for example biomass increase.

[0515] It was further observed that increasing or generating the activity of a gene product with the activity of a “transcription regulator (farR)” encoded by a gene comprising the nucleic acid sequence SEQ ID NO. 1327 in A. thaliana conferred an increased tolerance to abiotic environmental stress and an increased yield compared with the wild type control.

[0516] In particular, it was observed that increasing or generating the activity of a gene product with the activity of a “flagellar protein” encoded by a gene comprising the nucleic acid sequence SEQ ID NO.: 1425 in A. thaliana conferred an increased yield, e.g. an increased yield-related trait, for example enhanced tolerance to abiotic environmental stress, for example an increased drought tolerance and/or low temperature tolerance and/or an increased nutrient use efficiency, intrinsic yield and/or another mentioned yield-related trait as compared to wild type control.

[0517] It was further observed that increasing or generating the activity of a gene product with the activity of a “flagellar protein” encoded by a gene comprising the nucleic acid sequence SEQ ID NO.: 1425 in A. thaliana conferred an increased biomass compared to the wild type control. In particular, it was observed that increasing or generating the activity of a gene product being encoded by a gene comprising the nucleic acid sequence SEQ ID NO.: 1425 localized as indicated in table I, column 6, e.g. Cytoplasmic in A. thaliana, for example with the activity of a “flagellar protein”, conferred an increased yield, for example biomass increase.

[0518] It was further observed that increasing or generating the activity of a gene product with the activity of a “flagellar protein” encoded by a gene comprising the nucleic acid sequence SEQ ID NO. 1425 in A. thaliana conferred an increased tolerance to abiotic environmental stress and an increased yield compared with the wild type control.

[0519] In particular, it was observed that increasing or generating the activity of a gene product with the activity of a “Short chain dehydrogenase” encoded by a gene comprising the nucleic acid sequence SEQ ID NO.: 1449 in A. thaliana conferred an increased yield, e.g. an increased yield-related trait, for example enhanced tolerance to abiotic environmental stress, for example an increased drought tolerance and/or low temperature tolerance and/or an increased nutrient use efficiency, intrinsic yield and/or another mentioned yield-related trait as compared to wild type control.

[0520] It was further observed that increasing or generating the activity of a gene product with the activity of a “Short chain dehydrogenase” encoded by a gene comprising the nucleic acid sequence SEQ ID NO.: 1449 in A. thaliana conferred an increased biomass compared to the wild type control. In particular, it was observed that increasing or generating the activity of a gene product being encoded by a gene comprising the nucleic acid sequence SEQ ID NO.: 1449 localized as indicated in table I, column 6, e.g. Cytoplasmic in A. thaliana, for example with the activity of a “Short chain dehydrogenase”, conferred an increased yield, for example biomass increase.

[0521] It was further observed that increasing or generating the activity of a gene product with the activity of a “Short chain dehydrogenase” encoded by a gene comprising the nucleic acid sequence SEQ ID NO. 1449 in A. thaliana conferred an increased tolerance to abiotic environmental stress and an increased yield compared with the wild type control.

[0522] In particular, it was observed that increasing or generating the activity of a gene product with the activity of a “BRICK1-like protein” encoded by a gene comprising the nucleic acid sequence SEQ ID NO.: 2172 in A. thaliana conferred an increased yield, e.g. an increased yield-related trait, for example enhanced tolerance to abiotic environmental stress, for example an increased drought tolerance and/or low temperature tolerance and/or an increased nutrient use efficiency, intrinsic yield and/or another mentioned yield-related trait as compared to wild type control.

[0523] It was further observed that increasing or generating the activity of a gene product with the activity of a “BRICK1-like protein” encoded by a gene comprising the nucleic acid sequence SEQ ID NO.: 2172 in A. thaliana conferred an increased biomass compared to the wild type control. In particular, it was observed that increasing or generating the activity of a gene product being encoded by a gene comprising the nucleic acid sequence SEQ ID NO.: 2172 localized as indicated in table I, column 6, e.g. Cytoplasmic in A. thaliana, for example with the activity of a “BRICK1-like protein”, conferred an increased yield, for example biomass increase.

[0524] It was further observed that increasing or generating the activity of a gene product with the activity of a “BRICK1-like protein” encoded by a gene comprising the nucleic acid sequence SEQ ID NO. 2172 in A. thaliana conferred an increased tolerance to abiotic environmental stress and an increased yield compared with the wild type control.

[0525] In particular, it was observed that increasing or generating the activity of a gene product with the activity of a “Sterol-C-methyltransferase” encoded by a gene comprising the nucleic acid sequence SEQ ID NO.: 2214 in A. thaliana conferred an increased yield, e.g. an increased yield-related trait, for example enhanced tolerance to abiotic environmental stress, for example an increased drought tolerance and/or low temperature tolerance and/or an increased nutrient use efficiency, intrinsic yield and/or another mentioned yield-related trait as compared to wild type control.

[0526] It was further observed that increasing or generating the activity of a gene product with the activity of a “Sterol-C-methyltransferase” encoded by a gene comprising the nucleic acid sequence SEQ ID NO.: 2214 in A. thaliana conferred an increased biomass compared to the wild type control. In particular, it was observed that increasing or generating the activity of a gene product being encoded by a gene comprising the nucleic acid sequence SEQ ID NO.: 2214 localized as indicated in table I, column 6, e.g. Mitochondrial in A. thaliana, for example with the activity of a “Sterol-C-methyltransferase”, conferred an increased yield, for example biomass increase.

[0527] It was further observed that increasing or generating the activity of a gene product with the activity of a “Sterol-C-methyltransferase” encoded by a gene comprising the nucleic acid sequence SEQ ID NO. 2214 in A. thaliana conferred an increased tolerance to abiotic environmental stress and an increased yield compared with the wild type control.

[0528] In particular, it was observed that increasing or generating the activity of a gene product with the activity of a “Cav1 protein” encoded by a gene comprising the nucleic acid sequence SEQ ID NO.: 2341 in A. thaliana conferred an increased yield, e.g. an increased yield-related trait, for example enhanced tolerance to abiotic environmental stress, for example an increased drought tolerance and/or low temperature tolerance and/or an increased nutrient use efficiency, intrinsic yield and/or another mentioned yield-related trait as compared to wild type control.

[0529] It was further observed that increasing or generating the activity of a gene product with the activity of a “Cav1 protein” encoded by a gene comprising the nucleic acid sequence SEQ ID NO.: 2341 in A. thaliana conferred an increased biomass compared to the wild type control. In particular, it was observed that increasing or generating the activity of a gene product being encoded by a gene comprising the nucleic acid sequence SEQ ID NO.: 2341 localized as indicated in table I, column 6, e.g. Cytoplasmic in A. thaliana, for example with the activity of a “Cav1 protein”, conferred an increased yield, for example biomass increase. It was further observed that increasing or generating the activity of a gene product with the activity of a “Cav1 protein” encoded by a gene comprising the nucleic acid sequence SEQ ID NO. 2341 in A. thaliana conferred an increased tolerance to abiotic environmental stress and an increased yield compared with the wild type control.

[0530] In particular, it was observed that increasing or generating the activity of a gene product with the activity of a “G2/mitotic-specific cyclin” encoded by a gene comprising the nucleic acid sequence SEQ ID NO.: 2345 in A. thaliana conferred an increased yield, e.g. an increased yield-related trait, for example enhanced tolerance to abiotic environmental stress, for example an increased drought tolerance and/or low temperature tolerance and/or an increased nutrient use efficiency, intrinsic yield and/or another mentioned yield-related trait as compared to wild type control.

[0531] It was further observed that increasing or generating the activity of a gene product with the activity of a “G2/mitotic-specific cyclin” encoded by a gene comprising the nucleic acid sequence SEQ ID NO.: 2345 in A. thaliana conferred an increased biomass compared to the wild type control. In particular, it was observed that increasing or generating the activity of a gene product being encoded by a gene comprising the nucleic acid sequence SEQ ID NO.: 2345 localized as indicated in table I, column 6, e.g. Cytoplasmic in A. thaliana, for example with the activity of a “G2/mitotic-specific cyclin”, conferred an increased yield, for example biomass increase.

[0532] It was further observed that increasing or generating the activity of a gene product with the activity of a “G2/mitotic-specific cyclin” encoded by a gene comprising the nucleic acid sequence SEQ ID NO. 2345 in A. thaliana conferred an increased tolerance to abiotic environmental stress and an increased yield compared with the wild type control.

[0533] In particular, it was observed that increasing or generating the activity of a gene product with the activity of a “Adaptin medium chain homolog APM2” encoded by a gene comprising the nucleic acid sequence SEQ ID NO.: 2463 in A. thaliana conferred an increased yield, e.g. an increased yield-related trait, for example enhanced tolerance to abiotic environmental stress, for example an increased drought tolerance and/or low temperature tolerance and/or an increased nutrient use efficiency, intrinsic yield and/or another mentioned yield-related trait as compared to wild type control.

[0534] It was further observed that increasing or generating the activity of a gene product with the activity of a “Adaptin medium chain homolog APM2” encoded by a gene comprising the nucleic acid sequence SEQ ID NO.: 2463 in A. thaliana conferred an increased biomass compared to the wild type control. In particular, it was observed that increasing or generating the activity of a gene product being encoded by a gene comprising the nucleic acid sequence SEQ ID NO.: 2463 localized as indicated in table I, column 6, e.g. Cytoplasmic in A. thaliana, for example with the activity of a “Adaptin medium chain homolog APM2”, conferred an increased yield, for example biomass increase.

[0535] It was further observed that increasing or generating the activity of a gene product with the activity of a “Adaptin medium chain homolog APM2” encoded by a gene comprising the nucleic acid sequence SEQ ID NO. 2463 in A. thaliana conferred an increased tolerance to abiotic environmental stress and an increased yield compared with the wild type control.

[0536] In particular, it was observed that increasing or generating the activity of a gene product with the activity of a “Serine/threonine-protein kinase” encoded by a gene comprising the nucleic acid sequence SEQ ID NO.: 2510 in A. thaliana conferred an increased yield, e.g. an increased yield-related trait, for example enhanced tolerance to abiotic environmental stress, for example an increased drought tolerance and/or low temperature tolerance and/or an increased nutrient use efficiency, intrinsic yield and/or another mentioned yield-related trait as compared to wild type control.

[0537] It was further observed that increasing or generating the activity of a gene product with the activity of a “Serine/threonine-protein kinase” encoded by a gene comprising the nucleic acid sequence SEQ ID NO.: 2510 in A. thaliana conferred an increased biomass compared to the wild type control. In particular, it was observed that increasing or generating the activity of a gene product being encoded by a gene comprising the nucleic acid sequence SEQ ID NO.: 2510 localized as indicated in table I, column 6, e.g. Cytoplasmic in A. thaliana, for example with the activity of a “Serine/threonine-protein kinase”, conferred an increased yield, for example biomass increase.

[0538] It was further observed that increasing or generating the activity of a gene product with the activity of a “Serine/threonine-protein kinase” encoded by a gene comprising the nucleic acid sequence SEQ ID NO. 2510 in A. thaliana conferred an increased tolerance to abiotic environmental stress and an increased yield compared with the wild type control.

[0539] In particular, it was observed that increasing or generating the activity of a gene product with the activity of a “Ykr015c-protein” encoded by a gene comprising the nucleic acid sequence SEQ ID NO.: 2595 in A. thaliana conferred an increased yield, e.g. an increased yield-related trait, for example enhanced tolerance to abiotic environmental stress, for example an increased drought tolerance and/or low temperature tolerance and/or an increased nutrient use efficiency, intrinsic yield and/or another mentioned yield-related trait as compared to wild type control.

[0540] It was further observed that increasing or generating the activity of a gene product with the activity of a “Ykr015c-protein” encoded by a gene comprising the nucleic acid sequence SEQ ID NO.: 2595 in A. thaliana conferred an increased biomass compared to the wild type control. In particular, it was observed that increasing or generating the activity of a gene product being encoded by a gene comprising the nucleic acid sequence SEQ ID NO.: 2595 localized as indicated in table I, column 6, e.g. Cytoplasmic in A. thaliana, for example with the activity of a “Ykr015c-protein”, conferred an increased yield, for example biomass increase.

[0541] It was further observed that increasing or generating the activity of a gene product with the activity of a “Ykr015c-protein” encoded by a gene comprising the nucleic acid sequence SEQ ID NO. 2595 in A. thaliana conferred an increased tolerance to abiotic environmental stress and an increased yield compared with the wild type control.

[0542] In particular, it was observed that increasing or generating the activity of a gene product with the activity of a “RNA polymerase II holoenzyme cyclin-like subunit” encoded by a gene comprising the nucleic acid sequence SEQ ID NO.: 2599 in A. thaliana conferred an increased yield, e.g. an increased yield-related trait, for example enhanced tolerance to abiotic environmental stress, for example an increased drought tolerance and/or low temperature tolerance and/or an increased nutrient use efficiency, intrinsic yield and/or another mentioned yield-related trait as compared to wild type control.

[0543] It was further observed that increasing or generating the activity of a gene product with the activity of a “RNA polymerase II holoenzyme cyclin-like subunit” encoded by a gene comprising the nucleic acid sequence SEQ ID NO.: 2599 in A. thaliana conferred an increased biomass compared to the wild type control. In particular, it was observed that increasing or generating the activity of a gene product being encoded by a gene comprising the nucleic acid sequence SEQ ID NO.: 2599 localized as indicated in table I, column 6, e.g. Cytoplasmic in A. thaliana, for example with the activity of a “RNA polymerase II holoenzyme cyclin-like subunit”, conferred an increased yield, for example biomass increase.

[0544] It was further observed that increasing or generating the activity of a gene product with the activity of a “RNA polymerase II holoenzyme cyclin-like subunit” encoded by a gene comprising the nucleic acid sequence SEQ ID NO. 2599 in A. thaliana conferred an increased tolerance to abiotic environmental stress and an increased yield compared with the wild type control.

[0545] In particular, it was observed that increasing or generating the activity of a gene product with the activity of a “Membrane protein” encoded by a gene comprising the nucleic acid sequence SEQ ID NO.: 2645 in A. thaliana conferred an increased yield, e.g. an increased yield-related trait, for example enhanced tolerance to abiotic environmental stress, for example an increased drought tolerance and/or low temperature tolerance and/or an increased nutrient use efficiency, intrinsic yield and/or another mentioned yield-related trait as compared to wild type control.

[0546] It was further observed that increasing or generating the activity of a gene product with the activity of a “Membrane protein” encoded by a gene comprising the nucleic acid sequence SEQ ID NO.: 2645 in A. thaliana conferred an increased biomass compared to the wild type control. In particular, it was observed that increasing or generating the activity of a gene product being encoded by a gene comprising the nucleic acid sequence SEQ ID NO.: 2645 localized as indicated in table I, column 6, e.g. Plastidic in A. thaliana, for example with the activity of a “Membrane protein”, conferred an increased yield, for example biomass increase.

[0547] It was further observed that increasing or generating the activity of a gene product with the activity of a “Membrane protein” encoded by a gene comprising the nucleic acid sequence SEQ ID NO. 2645 in A. thaliana conferred an increased tolerance to abiotic environmental stress and an increased yield compared with the wild type control.

[0548] In particular, it was observed that increasing or generating the activity of a gene product with the activity of a “DNA polymerase” encoded by a gene comprising the nucleic acid sequence SEQ ID NO.: 2661 in A. thaliana conferred an increased yield, e.g. an increased yield-related trait, for example enhanced tolerance to abiotic environmental stress, for example an increased drought tolerance and/or low temperature tolerance and/or an increased nutrient use efficiency, intrinsic yield and/or another mentioned yield-related trait as compared to wild type control.

[0549] It was further observed that increasing or generating the activity of a gene product with the activity of a “DNA polymerase” encoded by a gene comprising the nucleic acid sequence SEQ ID NO.: 2661 in A. thaliana conferred an increased biomass compared to the wild type control. In particular, it was observed that increasing or generating the activity of a gene product being encoded by a gene comprising the nucleic acid sequence SEQ ID NO.: 2661 localized as indicated in table I, column 6, e.g. Cytoplasmic in A. thaliana, for example with the activity of a “DNA polymerase”, conferred an increased yield, for example biomass increase.

[0550] It was further observed that increasing or generating the activity of a gene product with the activity of a “DNA polymerase” encoded by a gene comprising the nucleic acid sequence SEQ ID NO. 2661 in A. thaliana conferred an increased tolerance to abiotic environmental stress and an increased yield compared with the wild type control.

[0551] In particular, it was observed that increasing or generating the activity of a gene product with the activity of a “GRE1-protein(Hydrophilin)” encoded by a gene comprising the nucleic acid sequence SEQ ID NO.: 2736 in A. thaliana conferred an increased yield, e.g. an increased yield-related trait, for example enhanced tolerance to abiotic environmental stress, for example an increased drought tolerance and/or low temperature tolerance and/or an increased nutrient use efficiency, intrinsic yield and/or another mentioned yield-related trait as compared to wild type control.

[0552] It was further observed that increasing or generating the activity of a gene product with the activity of a “GRE1-protein(Hydrophilin)” encoded by a gene comprising the nucleic acid sequence SEQ ID NO.: 2736 in A. thaliana conferred an increased biomass compared to the wild type control. In particular, it was observed that increasing or generating the activity of a gene product being encoded by a gene comprising the nucleic acid sequence SEQ ID NO.: 2736 localized as indicated in table I, column 6, e.g. Cytoplasmic in A. thaliana, for example with the activity of a “GRE1-protein(Hydrophilin)”, conferred an increased yield, for example biomass increase.

[0553] It was further observed that increasing or generating the activity of a gene product with the activity of a “GRE1-protein(Hydrophilin)” encoded by a gene comprising the nucleic acid sequence SEQ ID NO. 2736 in A. thaliana conferred an increased tolerance to abiotic environmental stress and an increased yield compared with the wild type control.

[0554] In particular, it was observed that increasing or generating the activity of a gene product with the activity of a “60S ribosomal protein” encoded by a gene comprising the nucleic acid sequence SEQ ID NO.: 2742 in A. thaliana conferred an increased yield, e.g. an increased yield-related trait, for example enhanced tolerance to abiotic environmental stress, for example an increased drought tolerance and/or low temperature tolerance and/or an increased nutrient use efficiency, intrinsic yield and/or another mentioned yield-related trait as compared to wild type control.

[0555] It was further observed that increasing or generating the activity of a gene product with the activity of a “60S ribosomal protein” encoded by a gene comprising the nucleic acid sequence SEQ ID NO.: 2742 in A. thaliana conferred an increased biomass compared to the wild type control. In particular, it was observed that increasing or generating the activity of a gene product being encoded by a gene comprising the nucleic acid sequence SEQ ID NO.: 2742 localized as indicated in table I, column 6, e.g. Cytoplasmic in A. thaliana, for example with the activity of a “60S ribosomal protein”, conferred an increased yield, for example biomass increase.

[0556] It was further observed that increasing or generating the activity of a gene product with the activity of a “60S ribosomal protein” encoded by a gene comprising the nucleic acid sequence SEQ ID NO. 2742 in A. thaliana conferred an increased tolerance to abiotic environmental stress and an increased yield compared with the wild type control.

[0557] In particular, it was observed that increasing or generating the activity of a gene product with the activity of a “Short chain dehydrogenase” encoded by a gene comprising the nucleic acid sequence SEQ ID NO.: 2907 in A. thaliana conferred an increased yield, e.g. an increased yield-related trait, for example enhanced tolerance to abiotic environmental stress, for example an increased drought tolerance and/or low temperature tolerance and/or an increased nutrient use efficiency, intrinsic yield and/or another mentioned yield-related trait as compared to wild type control.

[0558] It was further observed that increasing or generating the activity of a gene product with the activity of a “Short chain dehydrogenase” encoded by a gene comprising the nucleic acid sequence SEQ ID NO.: 2907 in A. thaliana conferred an increased biomass compared to the wild type control. In particular, it was observed that increasing or generating the activity of a gene product being encoded by a gene comprising the nucleic acid sequence SEQ ID NO.: 2907 localized as indicated in table I, column 6, e.g. Cytoplasmic in A. thaliana, for example with the activity of a “Short chain dehydrogenase”, conferred an increased yield, for example biomass increase.

[0559] It was further observed that increasing or generating the activity of a gene product with the activity of a “Short chain dehydrogenase” encoded by a gene comprising the nucleic acid sequence SEQ ID NO. 2907 in A. thaliana conferred an increased tolerance to abiotic environmental stress and an increased yield compared with the wild type control.

[0560] In particular, it was observed that increasing or generating the activity of a gene product with the activity of a “BRICK1-like protein” encoded by a gene comprising the nucleic acid sequence SEQ ID NO.: 3632 in A. thaliana conferred an increased yield, e.g. an increased yield-related trait, for example enhanced tolerance to abiotic environmental stress, for example an increased drought tolerance and/or low temperature tolerance and/or an increased nutrient use efficiency, intrinsic yield and/or another mentioned yield-related trait as compared to wild type control.

[0561] It was further observed that increasing or generating the activity of a gene product with the activity of a “BRICK1-like protein” encoded by a gene comprising the nucleic acid sequence SEQ ID NO.: 3632 in A. thaliana conferred an increased biomass compared to the wild type control. In particular, it was observed that increasing or generating the activity of a gene product being encoded by a gene comprising the nucleic acid sequence SEQ ID NO.: 3632 localized as indicated in table I, column 6, e.g. Cytoplasmic in A. thaliana, for example with the activity of a “BRICK1-like protein”, conferred an increased yield, for example biomass increase.

[0562] It was further observed that increasing or generating the activity of a gene product with the activity of a “BRICK1-like protein” encoded by a gene comprising the nucleic acid sequence SEQ ID NO. 3632 in A. thaliana conferred an increased tolerance to abiotic environmental stress and an increased yield compared with the wild type control.

[0563] In particular, it was observed that increasing or generating the activity of a gene product with the activity of a “YPL167C_{—}2-protein” encoded by a gene comprising the nucleic acid sequence SEQ ID NO.: 3676 in A. thaliana conferred an increased yield, e.g. an increased yield-related trait, for example enhanced tolerance to abiotic environmental stress, for example an increased drought tolerance and/or low temperature tolerance and/or an increased nutrient use efficiency, intrinsic yield and/or another mentioned yield-related trait as compared to wild type control.

[0564] It was further observed that increasing or generating the activity of a gene product with the activity of a “YPL167C_{—}2-protein” encoded by a gene comprising the nucleic acid sequence SEQ ID NO.: 3676 in A. thaliana conferred an increased biomass compared to the wild type control. In particular, it was observed that increasing or generating the activity of a gene product being encoded by a gene comprising the nucleic acid sequence SEQ ID NO.: 3676 localized as indicated in table I, column 6, e.g. Cytoplasmic in A. thaliana, for example with the activity of a “YPL167C_{—}2-protein”, conferred an increased yield, for example biomass increase.

[0565] It was further observed that increasing or generating the activity of a gene product with the activity of a “YPL167C_{—}2-protein” encoded by a gene comprising the nucleic acid sequence SEQ ID NO. 3676 in A. thaliana conferred an increased tolerance to abiotic environmental stress and an increased yield compared with the wild type control.

[0566] In particular, it was observed that increasing or generating the activity of a gene product with the activity of a “ORF YPL249c-a” encoded by a gene comprising the nucleic acid sequence SEQ ID NO.: 3698 in A. thaliana conferred an increased yield, e.g. an increased yield-related trait, for example enhanced tolerance to abiotic environmental stress, for example an increased drought tolerance and/or low temperature tolerance and/or an increased nutrient use efficiency, intrinsic yield and/or another mentioned yield-related trait as compared to wild type control.

[0567] It was further observed that increasing or generating the activity of a gene product with the activity of a “ORF YPL249c-a” encoded by a gene comprising the nucleic acid sequence SEQ ID NO.: 3698 in A. thaliana conferred an increased biomass compared to the wild type control. In particular, it was observed that increasing or generating the activity of a gene product being encoded by a gene comprising the nucleic acid sequence SEQ ID NO.: 3698 localized as indicated in table I, column 6, e.g. Cytoplasmic in A. thaliana, for example with the activity of a “ORF YPL249c-a”, conferred an increased yield, for example biomass increase.

[0568] It was further observed that increasing or generating the activity of a gene product with the activity of a “ORF YPL249c-a” encoded by a gene comprising the nucleic acid sequence SEQ ID NO. 3698 in A. thaliana conferred an increased tolerance to abiotic environmental stress and an increased yield compared with the wild type control.

[0569] It was further observed that increasing or generating the activity of a nucleic acid molecule derived from the nucleic acid molecule shown in Table VIIIIa in A. thaliana conferred increased nutrient use efficiency, e.g. an increased the nitrogen use efficiency, compared with the wild type control. Thus, in one embodiment, a nucleic acid molecule indicated in Table VIIIa or its homolog as indicated in Table I or the expression product is used in the method of the present invention to increased nutrient use efficiency, e.g. to increased the nitrogen use efficiency, of the a plant compared with the wild type control. It was further observed that increasing or generating the activity of a nucleic acid molecule derived from the nucleic acid molecule shown in Table VIIIb in A. thaliana conferred increased stress tolerance, e.g. increased low temperature tolerance, compared with the wild type control. Thus, in one embodiment, a nucleic acid molecule indicated in Table VIIIb or its homolog as indicated in Table I or the expression product is used in the method of the present invention to increase stress tolerance, e.g. increase low temperature, of a plant compared with the wild type control.

[0570] It was further observed that increasing or generating the activity of a nucleic acid molecule derived from the nucleic acid molecule shown in Table VIIIc in A. thaliana conferred increased stress tolerance, e.g. increased cycling drought tolerance, compared with the wild type control. Thus, in one embodiment, a nucleic acid molecule indicated in Table VIIIc or its homolog as indicated in Table I or the expression product is used in the method of the present invention to increase stress tolerance, e.g. increase cycling drought tolerance, of a plant compared with the wild type control.

[0571] It was further observed that increasing or generating the activity of a nucleic acid molecule derived from the nucleic acid molecule shown in Table VIlld in A. thaliana conferred increase in intrinsic yield, e.g. increased biomass under standard conditions, e.g. increased biomass under non-deficiency or non-stress conditions, compared with the wild type control. Thus, in one embodiment, a nucleic acid molecule indicated in Table VIIId or its homolog as indicated in Table I or the expression product is used in the method of the present invention to increase intrinsic yield, e.g. to increase yield under standard conditions, e.g. increase biomass under non-deficiency or non-stress conditions, of a plant compared with the wild type control.

[0572] Thus, according to the method of the invention an enhanced yield, e.g an improved yield-related trait, e.g. enhanced tolerance to abiotic environmental stress and/or increased yield like biomass in a plant cell, plant or a part thereof compared to a control or wild type can be achieved.

[0573] The term “expression” refers to the transcription and/or translation of a codogenic gene segment or gene. As a rule, the resulting product is an mRNA or a protein. However, expression products can also include functional RNA such as, for example, antisense, nucleic acids, tRNA, snRNA, rRNA, RNAi, siRNA, ribozymes etc. Expression may be systemic, local or temporal, for example limited to certain cell types, tissues organs or organelles or time periods.

[0574] In one embodiment, the process of the present invention comprises one or more of the following steps
[0575] (a) stabilizing a protein conferring the increased expression of a protein encoded by the nucleic acid molecule of the invention or of the polypeptide of the invention having the herein-mentioned activity selected from the group consisting of 30S ribosomal protein S11, 60S ribosomal protein, Adaptin medium chain homolog APM2, B0252-protein, BRICK1-like protein, Cav1 protein, Chloroplast chaperonin, DNA polymerase, flagellar protein, G2/mitotic-specific cyclin, GRE1-protein(Hydrophilin), Membrane protein, ORF YPL249c-a, RNA polymerase II holoenzyme cyclin-like subunit, Serine/threonine-protein kinase, Short chain dehydrogenase, Sterol-C-methyltransferase, transcription regulator (farR), Ykr015c-protein, and YPL167C_{—}2-protein and conferring an enhanced yield, e.g an improved yield-related trait, e.g. enhanced tolerance to abiotic environmental stress and/or increased yield like biomass as compared to a corresponding, e.g. non-transformed, wild type plant cell, plant or part thereof;
[0576] (b) stabilizing a mRNA conferring the increased expression of a protein encoded by the nucleic acid molecule of the invention or its homolog or of a mRNA encoding the polypeptide of the present invention having the herein-mentioned activity selected from the group consisting of 30S ribosomal protein S11, 60S ribosomal protein, Adaptin medium chain homolog APM2, B0252-protein, BRICK1-like protein, Cav1 protein, Chloroplast chaperonin, DNA polymerase, flagellar protein, G2/mitotic-specific cyclin, GRE1-protein(Hydrophilin), Membrane protein, ORF YPL249c-a, RNA polymerase II holoenzyme cyclin-like subunit, Serine/threonine-protein kinase, Short chain dehydrogenase, Sterol-C-methyltransferase, transcription regulator (farR), Ykr015c-protein, and YPL167C_{—}2-protein and confering an enhanced yield, e.g an improved yield-related trait, e.g. enhanced tolerance to abiotic environmental stress and/or increased yield like biomass as compared to a corresponding, e.g. non-transformed, wild type plant cell, plant or part thereof;
[0577] (c) increasing the specific activity of a protein conferring the increased expression of a protein encoded by the nucleic acid molecule of the invention or of the polypeptide of the present invention or decreasing the inhibitory regulation of the polypeptide of the invention;
[0578] (d) generating or increasing the expression of an endogenous or artificial transcription factor mediating the expression of a protein conferring the increased expression of a protein encoded by the nucleic acid molecule of the invention or of the polypeptide of the invention having the herein-mentioned activity selected from the group consisting of 30S ribosomal protein S11, 60S ribosomal protein, Adaptin medium chain homolog APM2, B0252-protein, BRICK1-like protein, Cav1 protein, Chloroplast chaperonin, DNA polymerase, flagellar protein, G2/mitotic-specific cyclin, GRE1-protein(Hydrophilin), Membrane protein, ORF YPL249c-a, RNA polymerase II holoenzyme cyclin-like subunit, Serine/threonine-protein kinase, Short chain dehydrogenase, Sterol-C-methyltransferase, transcription regulator (farR), Ykr015c-protein, and YPL167C_{—}2-protein and conferring an enhanced yield, e.g an improved yield-related trait, e.g. enhanced tolerance to abiotic environmental stress and/or increased yield like biomass as compared to a corresponding, e.g. non-transformed wild type plant cell, plant or part thereof;
[0579] (e) stimulating activity of a protein conferring the increased expression of a protein encoded by the nucleic acid molecule of the present invention or a polypeptide of the present invention having the herein-mentioned activity selected from the group consisting of 30S ribosomal protein S11, 60S ribosomal protein, Adaptin medium chain homolog APM2, B0252-protein, BRICK1-like protein, Cav1 protein, Chloroplast chaperonin, DNA polymerase, flagellar protein, G2/mitotic-specific cyclin, GRE1-protein(Hydrophilin), Membrane protein, ORF YPL249c-a, RNA polymerase II holoenzyme cyclin-like subunit, Serine/threonine-protein kinase, Short chain dehydrogenase, Sterol-C-methyltransferase, transcription regulator (farR), Ykr015c-protein, and YPL167C_{—}2-protein and conferring an enhanced yield, e.g an improved yield-related trait, e.g. enhanced tolerance to abiotic environmental stress and/or increased yield like biomass as compared to a correspondinge.g. non-transformed wild type plant cell, plant or part thereof by adding one or more exogenous inducing factors to the organism or parts thereof;
[0580] (f) expressing a transgenic gene encoding a protein conferring the increased expression of a polypeptide encoded by the nucleic acid molecule of the present invention or a polypeptide of the present invention, having the herein-mentioned activity selected from the group consisting of 30S ribosomal protein S11, 60S ribosomal protein, Adaptin medium chain homolog APM2, B0252-protein, BRICK1-like protein, Cav1 protein, Chloroplast chaperonin, DNA polymerase, flagellar protein, G2/mitotic-specific cyclin, GRE1-protein(Hydrophilin), Membrane protein, ORF YPL249c-a, RNA polymerase II holoenzyme cyclin-like subunit, Serine/threonine-protein kinase, Short chain dehydrogenase, Sterol-C-methyltransferase, transcription regulator (farR), Ykr015c-protein, and YPL167C_{—}2-protein and conferring an enhanced yield, e.g an improved yield-related trait, e.g. enhanced tolerance to abiotic environmental stress and/or increased yield like biomass as compared to a corresponding, e.g. non-transformed, wild type plant cell, plant or part thereof; and/or
[0581] (g) increasing the copy number of a gene conferring the increased expression of a nucleic acid molecule encoding a polypeptide encoded by the nucleic acid molecule of the invention or the polypeptide of the invention having the herein-mentioned activity selected from the group consisting of 30S ribosomal protein S11, 60S ribosomal protein, Adaptin medium chain homolog APM2, B0252-protein, BRICK1-like protein, Cav1 protein, Chloroplast chaperonin, DNA polymerase, flagellar protein, G2/mitotic-specific cyclin, GRE1-protein(Hydrophilin), Membrane protein, ORF YPL249c-a, RNA polymerase II holoenzyme cyclin-like subunit, Serine/threonine-protein kinase, Short chain dehydrogenase, Sterol-C-methyltransferase, transcription regulator (farR), Ykr015c-protein, and YPL167C_{—}2-protein and conferring an enhanced yield, e.g an improved yield-related trait, e.g. enhanced tolerance to abiotic environmental stress and/or increased yield like biomass as compared to a corresponding, e.g. non-transformed, wild type plant cell, plant or part thereof;
[0582] (h) increasing the expression of the endogenous gene encoding the polypeptide of the invention or its homolog by adding positive expression or removing negative expression elements, e.g. homologous recombination can be used to either introduce positive regulatory elements like for plants the 35S enhancer into the promoter or to remove repressor elements form regulatory regions. Further gene conversion methods can be used to disrupt repressor elements or to enhance to activity of positive elements-positive elements can be randomly introduced in plants by T-DNA or transposon mutagenesis and lines can be identified in which the positive elements have been integrated near to a gene of the invention, the expression of which is thereby enhanced;
[0583] and/or
[0584] (i) modulating growth conditions of the plant in such a manner, that the expression or activity of the gene encoding the protein of the invention or the protein itself is enhanced;
[0585] (j) selecting of organisms with especially high activity of the proteins of the invention from natural or from mutagenesis resources and breeding them into the target organisms, e.g. the elite crops.

[0586] Preferably, said mRNA is the nucleic acid molecule of the present invention and/or the protein conferring the increased expression of a protein encoded by the nucleic acid molecule of the present invention alone or linked to a transit nucleic acid sequence or transit peptide encoding nucleic acid sequence or the polypeptide having the herein mentioned activity, e.g. conferring an enhanced yield, e.g an improved yield-related trait, e.g. enhanced tolerance to abiotic environmental stress and/or increased yield like biomass as compared to a corresponding, e.g. non-transformed, wild type plant cell, plant or part thereof after increasing the expression or activity of the encoded polypeptide or having the activity of a polypeptide having an activity as the protein as shown in table II column 3 or its homolog.

[0587] In general, the amount of mRNA or polypeptide in a cell or a compartment of an organism correlates with the amount of encoded protein and thus with the overall activity of the encoded protein in said volume. Said correlation is not always linear, the activity in the volume is dependent on the stability of the molecules or the presence of activating or inhibiting co-factors. Further, product and educt inhibition of enzymes are well known and described in textbooks, e.g. Stryer, Biochemistry.

[0588] In general, the amount of mRNA, polynucleotide or nucleic acid molecule in a cell or a compartment of an organism correlates with the amount of encoded protein and thus with the overall activity of the encoded protein in said volume. Said correlation is not always linear, the activity in the volume is dependent on the stability of the molecules, the degradation of the molecules or the presence of activating or inhibiting co-factors. Further, product and educt inhibition of enzymes are well known, e.g. Zinser et al. “Enzyminhibitoren”/“Enzyme inhibitors”.

[0589] The activity of the abovementioned proteins and/or polypeptides encoded by the nucleic acid molecule of the present invention can be increased in various ways. For example, the activity in an organism or in a part thereof, like a cell, is increased via increasing the gene product number, e.g. by increasing the expression rate, like introducing a stronger promoter, or by increasing the stability of the mRNA expressed, thus increasing the translation rate, and/or increasing the stability of the gene product, thus reducing the proteins decayed. Further, the activity or turnover of enzymes can be influenced in such a way that a reduction or increase of the reaction rate or a modification (reduction or increase) of the affinity to the substrate results, is reached. A mutation in the catalytic centre of an polypeptide of the invention, e.g. as enzyme, can modulate the turn over rate of the enzyme, e.g. a knock out of an essential amino acid can lead to a reduced or completely knock out activity of the enzyme, or the deletion or mutation of regulator binding sites can reduce a negative regulation like a feedback inhibition (or a substrate inhibition, if the substrate level is also increased). The specific activity of an enzyme of the present invention can be increased such that the turn over rate is increased or the binding of a co-factor is improved. Improving the stability of the encoding mRNA or the protein can also increase the activity of a gene product. The stimulation of the activity is also under the scope of the term “increased activity”.

[0590] Moreover, the regulation of the abovementioned nucleic acid sequences may be modified so that gene expression is increased. This can be achieved advantageously by means of heterologous regulatory sequences or by modifying, for example mutating, the natural regulatory sequences which are present. The advantageous methods may also be combined with each other.

[0591] In general, an activity of a gene product in an organism or part thereof, in particular in a plant cell or organelle of a plant cell, a plant, or a plant tissue or a part thereof or in a microorganism can be increased by increasing the amount of the specific encoding mRNA or the corresponding protein in said organism or part thereof. “Amount of protein or mRNA” is understood as meaning the molecule number of polypeptides or mRNA molecules in an organism, especially a plant, a tissue, a cell or a cell compartment. “Increase” in the amount of a protein means the quantitative increase of the molecule number of said protein in an organism, especially a plant, a tissue, a cell or a cell compartment such as an organelle like a plastid or mitochondria or part thereof—for example by one of the methods described herein below—in comparison to a wild type, control or reference.

[0592] The increase in molecule number amounts preferably to at least 1%, preferably to more than 10%, more preferably to 30% or more, especially preferably to 50%, 70% or more, very especially preferably to 100%, most preferably to 500% or more. However, a de novo expression is also regarded as subject of the present invention.

[0593] A modification, i.e. an increase, can be caused by endogenous or exogenous factors. For example, an increase in activity in an organism or a part thereof can be caused by adding a gene product or a precursor or an activator or an agonist to the media or nutrition or can be caused by introducing said subjects into a organism, transient or stable. Furthermore such an increase can be reached by the introduction of the inventive nucleic acid sequence or the encoded protein in the correct cell compartment for example into the nucleus or cytoplasm respectively or into plastids either by transformation and/or targeting. For the purposes of the description of the present invention, the term “cytoplasmic” shall indicate, that the nucleic acid of the invention is expressed without the addition of an non-natural transit peptide encoding sequence. A non-natural transient peptide encoding sequence is a sequence which is not a natural part of a nucleic acid of the invention but is rather added by molecular manipulation steps as for example described in the example under “plastid targeted expression”. Therefore the term “cytoplasmic” shall not exclude a targeted localisation to any cell compartment for the products of the inventive nucleic acid sequences by their naturally occurring sequence properties.

[0594] In one embodiment the enhancement of the yield, e.g an improved yield-related trait, e.g. enhanced tolerance to abiotic environmental stress and/or increased yield like biomass as compared to a corresponding, e.g. non-transformed, wild type plant cell in the plant or a part thereof, e.g. in a cell, a tissue, a organ, an organelle, the cytoplasm etc., is achieved by increasing the endogenous level of the polypeptide of the invention. Accordingly, in an embodiment of the present invention, the present invention relates to a process wherein the gene copy number of a gene encoding the polynucleotide or nucleic acid molecule of the invention is increased. Further, the endogenous level of the polypeptide of the invention can for example be increased by modifying the transcriptional or translational regulation of the polypeptide.

[0595] In one embodiment the enhanced yield, e.g an improved yield-related trait, e.g. enhanced tolerance to abiotic environmental stress and/or increased yield like biomass of the plant or part thereof can be altered by targeted or random mutagenesis of the endogenous genes of the invention. For example homologous recombination can be used to either introduce positive regulatory elements like for plants the 35S enhancer into the promoter or to remove repressor elements form regulatory regions. In addition gene conversion like methods described by Kochevenko and Willmitzer (Plant Physiol. 132 (1), 174 (2003)) and citations therein can be used to disrupt repressor elements or to enhance to activity of positive regulatory elements.

[0596] Furthermore positive elements can be randomly introduced in (plant) genomes by T-DNA or transposon mutagenesis and lines can be screened for, in which the positive elements have been integrated near to a gene of the invention, the expression of which is thereby enhanced. The activation of plant genes by random integrations of enhancer elements has been described by Hayashi et al. (Science 258,1350 (1992)) or Weigel et al. (Plant Physiol. 122, 1003 (2000)) and others cited therein.

[0597] Reverse genetic strategies to identify insertions (which eventually carrying the activation elements) near in genes of interest have been described for various cases e.g. Krysan et al. (Plant Cell 11, 2283 (1999)); Sessions et al. (Plant Cell 14, 2985 (2002)); Young et al. (Plant Physiol. 125, 513 (2001)); Koprek et al. (Plant J. 24, 253 (2000)); Jeon et al. (Plant J. 22, 561 (2000)); Tissier et al. (Plant Cell 11, 1841(1999)); Speulmann et al. (Plant Cell 11, 1853 (1999)). Briefly material from all plants of a large T-DNA or transposon mutagenised plant population is harvested and genomic DNA prepared. Then the genomic DNA is pooled following specific architectures as described for example in Krysan et al. (Plant Cell 11, 2283 (1999)). Pools of genomic DNA are then screened by specific multiplex PCR reactions detecting the combination of the insertional mutagen (e.g. T-DNA or Transposon) and the gene of interest. Therefore PCR reactions are run on the DNA pools with specific combinations of T-DNA or transposon border primers and gene specific primers. General rules for primer design can again be taken from Krysan et al. (Plant Cell 11, 2283 (1999)). ReScreening of lower levels DNA pools lead to the identification of individual plants in which the gene of interest is activated by the insertional mutagen.

[0598] The enhancement of positive regulatory elements or the disruption or weakening of negative regulatory elements can also be achieved through common mutagenesis techniques: The production of chemically or radiation mutated populations is a common technique and known to the skilled worker. Methods for plants are described by Koorneef et al. (Mutat Res. Mar. 93 (1) (1982)) and the citations therein and by Lightner and Caspar in “Methods in Molecular Biology” Vol. 82. These techniques usually induce point mutations that can be identified in any known gene using methods such as TILLING (Colbert et al., Plant Physiol, 126, (2001)).

[0599] Accordingly, the expression level can be increased if the endogenous genes encoding a polypeptide conferring an increased expression of the polypeptide of the present invention, in particular genes comprising the nucleic acid molecule of the present invention, are modified via homologous recombination, Tilling approaches or gene conversion. It also possible to add as mentioned herein targeting sequences to the inventive nucleic acid sequences.

[0600] Regulatory sequences, if desired, in addition to a target sequence or part thereof can be operatively linked to the coding region of an endogenous protein and control its transcription and translation or the stability or decay of the encoding mRNA or the expressed protein. In order to modify and control the expression, promoter, UTRs, splicing sites, processing signals, polyadenylation sites, terminators, enhancers, repressors, post transcriptional or posttranslational modification sites can be changed, added or amended. For example, the activation of plant genes by random integrations of enhancer elements has been described by Hayashi et al. (Science 258, 1350(1992)) or Weigel et al. (Plant Physiol. 122, 1003 (2000)) and others cited therein. For example, the expression level of the endogenous protein can be modulated by replacing the endogenous promoter with a stronger transgenic promoter or by replacing the endogenous 3′UTR with a 3′UTR, which provides more stability without amending the coding region. Further, the transcriptional regulation can be modulated by introduction of an artificial transcription factor as described in the examples. Alternative promoters, terminators and UTR are described below.

[0601] The activation of an endogenous polypeptide having above-mentioned activity, e.g. having the activity of a protein as shown in table II, column 3 or of the polypeptide of the invention, e.g. conferring the enhancement of yield, e.g an improved yield-related trait, e.g. enhanced tolerance to abiotic environmental stress and/or increased yield like biomass as compared to a corresponding, e.g. non-transformed, wild type plant cell, plant or part thereof after increase of expression or activity in the cytoplasm and/or in an organelle like a plastid, can also be increased by introducing a synthetic transcription factor, which binds close to the coding region of the gene encoding the protein as shown in table II, column 3 and activates its transcription. A chimeric zinc finger protein can be constructed, which comprises a specific DNA-binding domain and an activation domain as e.g. the VP16 domain of Herpes Simplex virus. The specific binding domain can bind to the regulatory region of the gene encoding the protein as shown in table II, column 3. The expression of the chimeric transcription factor in a organism, in particular in a plant, leads to a specific expression of the protein as shown in table II, column 3. The methods thereto a known to a skilled person and/or disclosed e.g. in WO01/52620, Oriz, Proc. Natl. Acad. Sci. USA, 99, 13290 (2002) or Guan, Proc. Natl. Acad. Sci. USA 99, 13296 (2002).

[0602] In one further embodiment of the process according to the invention, organisms are used in which one of the abovementioned genes, or one of the abovementioned nucleic acids, is mutated in a way that the activity of the encoded gene products is less influenced by cellular factors, or not at all, in comparison with the unmutated proteins. For example, well known regulation mechanism of enzymic activity are substrate inhibition or feed back regulation mechanisms. Ways and techniques for the introduction of substitution, deletions and additions of one or more bases, nucleotides or amino acids of a corresponding sequence are described herein below in the corresponding paragraphs and the references listed there, e.g. in Sambrook et al., Molecular Cloning, Cold Spring Habour, N.Y., 1989. The person skilled in the art will be able to identify regulation domains and binding sites of regulators by comparing the sequence of the nucleic acid molecule of the present invention or the expression product thereof with the state of the art by computer software means which comprise algorithms for the identifying of binding sites and regulation domains or by introducing into a nucleic acid molecule or in a protein systematically mutations and assaying for those mutations which will lead to an increased specific activity or an increased activity per volume, in particular per cell.

[0603] It can therefore be advantageous to express in an organism a nucleic acid molecule of the invention or a polypeptide of the invention derived from a evolutionary distantly related organism, as e.g. using a prokaryotic gene in a eukaryotic host, as in these cases the regulation mechanism of the host cell may not weaken the activity (cellular or specific) of the gene or its expression product.

[0604] The mutation is introduced in such a way that the enhanced tolerance to abiotic environmental stress and/or yield increase are not adversely affected.

[0605] Less influence on the regulation of a gene or its gene product is understood as meaning a reduced regulation of the enzymatic activity leading to an increased specific or cellular activity of the gene or its product. An increase of the enzymatic activity is understood as meaning an enzymatic activity, which is increased by at least 10%, advantageously at least 20, 30 or 40%, especially advantageously by at least 50, 60 or 70% in comparison with the starting organism. This leads to an enhanced yield, e.g an improved yield-related trait, e.g. enhanced tolerance to abiotic environmental stress and/or increased yield like biomass as compared to a corresponding, e.g. non-transformed, wild type plant cell, plant or part thereof.

[0606] The invention provides that the above methods can be performed such that yield of a plant is increased, or the tolerance to abiotic environmental stress is increased, or both, wherein particularly the yield of a plant (e.g. biomass yield) is increased. In a further embodiment the invention provides that the above methods can be performed such that yield-related traits are increased. In another embodiment the invention provides that the above methods can be performed such that the yield is increased in the absence of nutrient deficiencies as well as the absence of stress conditions. In a further embodiment the invention provides that the above methods can be performed such that the nutrient use efficiency, particularly the nitrogen use efficiency, and the yield, in the absence of nutrient deficiencies as well as the absence of stress conditions, is increased. In a preferred embodiment the invention provides that the above methods can be performed such that the tolerance to abiotic stress, particularly the tolerance to low temperature and/or water use efficiency, and at the same time, the nutrient use efficiency, particularly the nitrogen use efficiency, and the yield in the absence of nutrient deficiencies as well as the absence of stress conditions, is increased.

[0607] The invention is not limited to specific nucleic acids, specific polypeptides, specific cell types, specific host cells, specific conditions or specific methods etc. as such, but may vary and numerous modifications and variations therein will be apparent to those skilled in the art. It is also to be understood that the terminology used herein is for the purpose of describing specific embodiments only and is not intended to be limiting.

[0608] The present invention also relates to isolated nucleic acids comprising a nucleic acid molecule selected from the group consisting of:
[0609] (a) a nucleic acid molecule encoding the polypeptide shown in column 7 of table II B, application no.1;
[0610] (b) a nucleic acid molecule shown in column 7 of table I B, application no.1;
[0611] (c) a nucleic acid molecule, which, as a result of the degeneracy of the genetic code, can be derived from a polypeptide sequence depicted in column 5 or 7 of table II, application no.1, and confers an enhanced yield, e.g an improved yield-related trait, e.g. enhanced tolerance to abiotic environmental stress and/or increased yield like biomass as compared to a corresponding, e.g. non-transformed, wild type plant cell, a plant or a part thereof;
[0612] (d) a nucleic acid molecule having at least 30% identity, preferably at least 40%, 50%, 60%, 70%, 75%, 80%, 85%, 90%, 95%, 96%, 97%, 98%, 99%, 99,.%, with the nucleic acid molecule sequence of a polynucleotide comprising the nucleic acid molecule shown in column 5 or 7 of table I, application no.1, and confers an enhanced yield, e.g an improved yield-related trait, e.g. enhanced tolerance to abiotic environmental stress and/or increased yield like biomass as compared to a corresponding, e.g. non-transformed, wild type plant cell, a plant or a part thereof;
[0613] (e) a nucleic acid molecule encoding a polypeptide having at least 30% identity, preferably at least 40%, 50%, 60%, 70%, 75%, 80%, 85%, 90%, 95%, 96%, 97%, 98%, 99%, 99.5%, with the amino acid sequence of the polypeptide encoded by the nucleic acid molecule of (a), (b), (c) or (d) and having the activity represented by a nucleic acid molecule comprising a polynucleotide as depicted in column 5 of table I, application no.1, and confers an enhanced yield, e.g an improved yield-related trait, e.g. enhanced tolerance to abiotic environmental stress and/or increased yield like biomass as compared to a corresponding, e.g. non-transformed, wild type plant cell, a plant or a part thereof;
[0614] (f) nucleic acid molecule which hybridizes with a nucleic acid molecule of (a), (b), (c), (d) or (e) under stringent hybridization conditions and confers an enhanced yield, e.g an improved yield-related trait, e.g. enhanced tolerance to abiotic environmental stress and/or increased yield like biomass as compared to a corresponding, e.g. non-transformed, wild type plant cell, a plant or a part thereof;
[0615] (g) a nucleic acid molecule encoding a polypeptide which can be isolated with the aid of monoclonal or polyclonal antibodies made against a polypeptide encoded by one of the nucleic acid molecules of (a), (b), (c), (d), (e) or (f) and having the activity represented by the nucleic acid molecule comprising a polynucleotide as depicted in column 5 of table I, application no.1;
[0616] (h) a nucleic acid molecule encoding a polypeptide comprising the consensus sequence or one or more polypeptide motifs as shown in column 7 of table IV, application no.1, and preferably having the activity represented by a nucleic acid molecule comprising a polynucleotide as depicted in column 5 of table II or IV, application no.1;
[0617] (i) a nucleic acid molecule encoding a polypeptide having the activity represented by a protein as depicted in column 5 of table II, application no.1, and confers an enhanced yield, e.g an improved yield-related trait, e.g. enhanced tolerance to abiotic environmental stress and/or increased yield like biomass as compared to a corresponding, e.g. non-transformed, wild type plant cell, a plant or a part thereof;
[0618] (j) nucleic acid molecule which comprises a polynucleotide, which is obtained by amplifying a cDNA library or a genomic library using the primers in column 7 of table III, application no.1, which do not start at their 5′-end with the nucleotides ATA and preferably having the activity represented by a nucleic acid molecule comprising a polynucleotide as depicted in column 5 of table II or IV, application no.1;
[0619] and
[0620] (k) a nucleic acid molecule which is obtainable by screening a suitable nucleic acid library, especially a cDNA library and/or a genomic library, under stringent hybridization conditions with a probe comprising a complementary sequence of a nucleic acid molecule of (a) or (b) or with a fragment thereof, having at least 15 nt, preferably 20 nt, 30 nt, 50 nt, 100 nt, 200 nt, 500 nt, 750 nt or 1000 nt of a nucleic acid molecule complementary to a nucleic acid molecule sequence characterized in (a) to (e) and encoding a polypeptide having the activity represented by a protein comprising a polypeptide as depicted in column 5 of table II, application no.1;
   whereby the nucleic acid molecule according to (a),(b), (c), (d), (e), (f), (g), (h), (i), (j) and (k) is at least in one or more nucleotides different from the sequence depicted in column 5 or 7 of table I A, application no.1, and preferably which encodes a protein which differs at least in one or more amino acids from the protein sequences depicted in column 5 or 7 of table II A, application no.1.

[0621] In one embodiment the invention relates to homologs of the aforementioned sequences, which can be isolated advantageously from yeast, fungi, viruses, algae, bacteria, such as Acetobacter (subgenus Acetobacter) aceti; Acidithiobacillus ferrooxidans; Acinetobacter sp.; Actinobacillus sp; Aeromonas salmonicida; Agrobacterium tumefaciens; Aquifex aeolicus; Arcanobacterium pyogenes; Aster yellows phytoplasma; Bacillus sp.; Bifidobacterium sp.; Borrelia burgdorferi; Brevibacterium linens; Brucella melitensis; Buchnera sp.; Butyrivibrio fibrisolvens; Campylobacter jejuni; Caulobacter crescentus; Chlamydia sp.; Chlamydophila sp.; Chlorobium limicola; Citrobacter rodentium; Clostridium sp.; Comamonas testosteroni; Corynebacterium sp.; Coxiella burnetii; Deinococcus radiodurans; Dichelobacter nodosus; Edwardsiella ictaluri; Enterobacter sp.; Erysipelothrix rhusiopathiae; E. coli; Flavobacterium sp.; Francisella tularensis; Frankia sp. CpI1; Fusobacterium nucleatum; Geobacillus stearothermophilus; Gluconobacter oxydans; Haemophilus sp.; Helicobacter pylori; Klebsiella pneumoniae; Lactobacillus sp.; Lactococcus lactis; Listeria sp.; Mannheimia haemolytica; Mesorhizobium loti; Methylophaga thalassica; Microcystis aeruginosa; Microscilla sp. PRE1; Moraxella sp. TA144; Mycobacterium sp.; Mycoplasma sp.; Neisseria sp.; Nitrosomonas sp.; Nostoc sp. PCC 7120; Novosphingobium aromaticivorans; Oenococcus oeni; Pantoea citrea; Pasteurella multocida; Pediococcus pentosaceus; Phormidium foveolarum; Phytoplasma sp.; Plectonema boryanum; Prevotella ruminicola; Propionibacterium sp.; Proteus vulgaris; Pseudomonas sp.; Ralstonia sp.; Rhizobium sp.; Rhodococcus equi; Rhodothermus marinus; Rickettsia sp.; Riemerella anatipestifer; Ruminococcus flavefaciens; Salmonella sp.; Selenomonas ruminantium; Serratia entomophila; Shigella sp.; Sinorhizobium meliloti; Staphylococcus sp.; Streptococcus sp.; Streptomyces sp.; Synechococcus sp.; Synechocystis sp. PCC 6803; Thermotoga maritima; Treponema sp.; Ureaplasma urealyticum; Vibrio cholerae; Vibrio parahaemolyticus; Xylella fastidiosa; Yersinia sp.; Zymomonas mobilis, preferably Salmonella sp. or E. coli or plants, preferably from yeasts such as from the genera Saccharomyces, Pichia, Candida, Hansenula, Torulopsis or Schizosaccharomyces

or plants such as A. thaliana, maize, wheat, rye, oat, triticale, rice, barley, soybean, peanut, cotton, borage, sunflower, linseed, primrose, rapeseed, canola and turnip rape, manihot, pepper, sunflower, tagetes, solanaceous plant such as potato, tobacco, eggplant and tomato, Vicia species, pea, alfalfa, bushy plants such as coffee, cacao, tea, Salix species, trees such as oil palm, coconut, perennial grass, such as ryegrass and fescue, and forage crops, such as alfalfa and clover and from spruce, pine or fir for example. More preferably homologs of aforementioned sequences can be isolated from S. cerevisiae, E. coli or Synechocystis sp. or plants, preferably Brassica napus, Glycine max, Zea mays, cotton or Oryza sativa.

[0622] The proteins of the present invention are preferably produced by recombinant DNA techniques. For example, a nucleic acid molecule encoding the protein is cloned into an expression vector, for example in to a binary vector, the expression vector is introduced into a host cell, for example the A. thaliana wild type NASC N906 or any other plant cell as described in the examples see below, and the protein is expressed in said host cell. Examples for binary vectors are pBIN19, pBI101, pBinAR, pGPTV, pCAMBIA, pBIB-HYG, pBecks, pGreen or pPZP (Hajukiewicz, P. et al., Plant Mol. Biol. 25, 989 (1994), and Hellens et al, Trends in Plant Science 5, 446 (2000)).

[0623] In one embodiment the protein of the present invention is preferably produced in a compartment of the cell, more preferably in the plastids. Ways of introducing nucleic acids into plastids and producing proteins in this compartment are known to the person skilled in the art have been also described in this application. In one embodiment, the polypeptide of the invention is a protein localized after expression as indicated in column 6 of table II, e.g. nontargeted, mitochondrial or plastidic, for example it is fused to a transit peptide as decribed above for plastidic localisation.

[0624] In another embodiment the protein of the present invention is preferably produced in the cytoplasm of the cell. Ways of producing proteins in the cytoplasm are known to the person skilled in the art. Ways of producing proteins without artificial targeting are known to the person skilled in the art.

[0625] Advantageously, the nucleic acid sequences according to the invention or the gene construct together with at least one reporter gene are cloned into an expression cassette, which is introduced into the organism via a vector or directly into the genome. This reporter gene should allow easy detection via a growth, fluorescence, chemical, bioluminescence or tolerance assay or via a photometric measurement. Examples of reporter genes which may be mentioned are antibiotic- or herbicide-tolerance genes, hydrolase genes, fluorescence protein genes, bioluminescence genes, sugar or nucleotide metabolic genes or biosynthesis genes such as the Ura3 gene, the IIv2 gene, the luciferase gene, the β-galactosidase gene, the gfp gene, the 2-desoxyglucose-6-phosphate phosphatase gene, the β-glucuronidase gene, β-lactamase gene, the neomycin phosphotransferase gene, the hygromycin phosphotransferase gene, a mutated acetohydroxyacid synthase (AHAS) gene (also known as acetolactate synthase (ALS) gene), a gene for a D-amino acid metabolizing enzyme or the BASTA (=gluphosinate-tolerance) gene. These genes permit easy measurement and quantification of the transcription activity and hence of the expression of the genes. In this way genome positions may be identified which exhibit differing productivity.

[0626] In a preferred embodiment a nucleic acid construct, for example an expression cassette, comprises upstream, i.e. at the 5′ end of the encoding sequence, a promoter and downstream, i.e. at the 3′ end, a polyadenylation signal and optionally other regulatory elements which are operably linked to the intervening encoding sequence with one of the nucleic acids of SEQ ID NO as depicted in table I, column 5 and 7. By an operable linkage is meant the sequential arrangement of promoter, encoding sequence, terminator and optionally other regulatory elements in such a way that each of the regulatory elements can fulfill its function in the expression of the encoding sequence in due manner. In one embodiment the sequences preferred for operable linkage are targeting sequences for ensuring subcellular localization in plastids. However, targeting sequences for ensuring subcellular localization in the mitochondrion, in the endoplasmic reticulum (=ER), in the nucleus, in oil corpuscles or other compartments may also be employed as well as translation promoters such as the 5′ lead sequence in tobacco mosaic virus (Gallie et al., Nucl. Acids Res. 15 8693 (1987)).

[0627] A nucleic acid construct, for example an expression cassette may, for example, contain a constitutive promoter or a tissue-specific promoter (preferably the USP or napin promoter) the gene to be expressed and the ER retention signal. For the ER retention signal the KDEL amino acid sequence (lysine, aspartic acid, glutamic acid, leucine) or the KKX amino acid sequence (lysine-lysine-X-stop, wherein X means every other known amino acid) is preferably employed.

[0628] For expression in a host organism, for example a plant, the expression cassette is advantageously inserted into a vector such as by way of example a plasmid, a phage or other DNA which allows optimal expression of the genes in the host organism. Examples of suitable plasmids are: in E. coli pLG338, pACYC184, pBR series such as e.g. pBR322, pUC series such as pUC18 or pUC19, M113mp series, pKC30, pRep4, pHS1, pHS2, pPLc236, pMBL24, pLG200, pUR290, pIN-III¹¹³-B1, λgt11 or pBdCI; in Streptomyces pIJ101, pIJ364, pIJ702 or pIJ361; in Bacillus pUB110, pC194 or pBD214; in Corynebacterium pSA77 or pAJ667; in fungi pALS1, pIL2 or pBB116; other advantageous fungal vectors are described by Romanos M. A. et al., Yeast 8, 423 (1992) and by van den Hondel, C. A. M. J. J. et al. [(1991) “Heterologous gene expression in filamentous fungi”] as well as in “More Gene Manipulations” in “Fungi” in Bennet J. W. & Lasure L. L., eds., pp. 396-428, Academic Press, San Diego, and in “Gene transfer systems and vector development for filamentous fungi” [van den Hondel, C. A. M. J. J. & Punt, P. J. (1991) in: Applied Molecular Genetics of Fungi, Peberdy, J. F. et al., eds., pp. 1-28, Cambridge University Press: Cambridge]. Examples of advantageous yeast promoters are 2pM, pAG-1, YEp6, YEp13 or pEMBLYe23. Examples of algal or plant promoters are pLGV23, pGHlac+, pBIN19, pAK2004, pVKH or pDH51 (see Schmidt, R. and Willmitzer, L., Plant Cell Rep. 7, 583 (1988))). The vectors identified above or derivatives of the vectors identified above are a small selection of the possible plasmids. Further plasmids are well known to those skilled in the art and may be found, for example, in “Cloning Vectors” (Eds. Pouwels P. H. et al. Elsevier, Amsterdam-New York-Oxford, 1985, ISBN 0 444 904018). Suitable plant vectors are described inter alia in “Methods in Plant Molecular Biology and Biotechnology” (CRC Press, Ch. 6/7, pp. 71-119). Advantageous vectors are known as shuttle vectors or binary vectors which replicate in E. coli and Agrobacterium.

[0629] By vectors is meant with the exception of plasmids all other vectors known to those skilled in the art such as by way of example phages, viruses such as SV40, CMV, baculovirus, adenovirus, transposons, IS elements, phasmids, phagemids, cosmids, linear or circular DNA. These vectors can be replicated autonomously in the host organism or be chromosomally replicated, chromosomal replication being preferred.

[0630] In a further embodiment of the vector the expression cassette according to the invention may also advantageously be introduced into the organisms in the form of a linear DNA and be integrated into the genome of the host organism by way of heterologous or homologous recombination. This linear DNA may be composed of a linearized plasmid or only of the expression cassette as vector or the nucleic acid sequences according to the invention.

[0631] In a further advantageous embodiment the nucleic acid sequence according to the invention can also be introduced into an organism on its own.

[0632] If in addition to the nucleic acid sequence according to the invention further genes are to be introduced into the organism, all together with a reporter gene in a single vector or each single gene with a reporter gene in a vector in each case can be introduced into the organism, whereby the different vectors can be introduced simultaneously or successively.

[0633] The vector advantageously contains at least one copy of the nucleic acid sequences according to the invention and/or the expression cassette (=gene construct) according to the invention.

[0634] The invention further provides an isolated recombinant expression vector comprising a nucleic acid encoding a polypeptide as depicted in table II, column 5 or 7, wherein expression of the vector in a host cell results in enhanced tolerance to abiotic environmental stress and/or yield as compared to a wild type variety of the host cell.

[0635] As used herein, the term “vector” refers to a nucleic acid molecule capable of transporting another nucleic acid to which it has been linked. One type of vector is a “plasmid”, which refers to a circular double stranded DNA loop into which additional DNA segments can be ligated. Another type of vector is a viral vector, wherein additional DNA segments can be ligated into the viral genome. Certain vectors are capable of autonomous replication in a host cell into which they are introduced (e.g. bacterial vectors having a bacterial origin of replication and episomal mammalian vectors). Other vectors (e.g. non-episomal mammalian vectors) are integrated into the genome of a host cell or a organelle upon introduction into the host cell, and thereby are replicated along with the host or organelle genome. Moreover, certain vectors are capable of directing the expression of genes to which they are operatively linked. Such vectors are referred to herein as “expression vectors.” In general, expression vectors of utility in recombinant DNA techniques are often in the form of plasmids. In the present specification, “plasmid” and “vector” can be used interchangeably as the plasmid is the most commonly used form of vector. However, the invention is intended to include such other forms of expression vectors, such as viral vectors (e.g., replication defective retroviruses, adenoviruses, and adeno-associated viruses), which serve equivalent functions.

[0636] The recombinant expression vectors of the invention comprise a nucleic acid of the invention in a form suitable for expression of the nucleic acid in a host cell, which means that the recombinant expression vectors include one or more regulatory sequences, selected on the basis of the host cells to be used for expression, which is operatively linked to the nucleic acid sequence to be expressed. As used herein with respect to a recombinant expression vector, “operatively linked” is intended to mean that the nucleotide sequence of interest is linked to the regulatory sequence(s) in a manner which allows for expression of the nucleotide sequence (e.g. in an in vitro transcription/translation system or in a host cell when the vector is introduced into the host cell). The term “regulatory sequence” is intended to include promoters, enhancers, and other expression control elements (e.g. polyadenylation signals). Such regulatory sequences are described, for example, in Goeddel, Gene Expression Technology: Methods in Enzymology 185, Academic Press, San Diego, Calif. (1990), and Gruber and Crosby, in: Methods in Plant Molecular Biology and Biotechnology, eds. Glick and Thompson, Chapter 7, 89-108, CRC Press; Boca Raton, Fla., including the references therein. Regulatory sequences include those that direct constitutive expression of a nucleotide sequence in many types of host cells and those that direct expression of the nucleotide sequence only in certain host cells or under certain conditions. It will be appreciated by those skilled in the art that the design of the expression vector can depend on such factors as the choice of the host cell to be transformed, the level of expression of polypeptide desired, etc. The expression vectors of the invention can be introduced into host cells to thereby produce polypeptides or peptides, including fusion polypeptides or peptides, encoded by nucleic acids as described herein (e.g., YIPs, mutant forms of YIPs, fusion polypeptides, “Yield Related Proteins” or “YIPs” etc.).

[0637] The recombinant expression vectors of the invention can be designed for expression of the polypeptide of the invention in plant cells. For example, YIP genes can be expressed in plant cells (see Schmidt R., and Willmitzer L., Plant Cell Rep. 7 (1988); Plant Molecular Biology and Biotechnology, C Press, Boca Raton, Fla., Chapter 6/7, p. 71-119 (1993); White F. F., Jenes B. et al., Techniques for Gene Transfer, in: Transgenic Plants, Vol. 1, Engineering and Utilization, eds. Kung and Wu R., 128-43, Academic Press: 1993; Potrykus, Annu. Rev. Plant Physiol. Plant Molec. Biol. 42, 205 (1991) and references cited therein). Suitable host cells are discussed further in Goeddel, Gene Expression Technology: Methods in Enzymology 185, Academic Press: San Diego, Calif. (1990). Alternatively, the recombinant expression vector can be transcribed and translated in vitro, for example using T7 promoter regulatory sequences and T7 polymerase.

[0638] Expression of polypeptides in prokaryotes is most often carried out with vectors containing constitutive or inducible promoters directing the expression of either fusion or non-fusion polypeptides. Fusion vectors add a number of amino acids to a polypeptide encoded therein, usually to the amino terminus of the recombinant polypeptide but also to the C-terminus or fused within suitable regions in the polypeptides. Such fusion vectors typically serve three purposes: 1) to increase expression of a recombinant polypeptide; 2) to increase the solubility of a recombinant polypeptide; and 3) to aid in the purification of a recombinant polypeptide by acting as a ligand in affinity purification. Often, in fusion expression vectors, a proteolytic cleavage site is introduced at the junction of the fusion moiety and the recombinant polypeptide to enable separation of the recombinant polypeptide from the fusion moiety subsequent to purification of the fusion polypeptide. Such enzymes, and their cognate recognition sequences, include Factor Xa, thrombin, and enterokinase.

[0639] By way of example the plant expression cassette can be installed in the pRT transformation vector ((a) Toepfer et al., Methods Enzymol. 217, 66 (1993), (b) Toepfer et al., Nucl. Acids. Res. 15, 5890 (1987)).

[0640] Alternatively, a recombinant vector (=expression vector) can also be transcribed and translated in vitro, e.g. by using the T7 promoter and the T7 RNA polymerase.

[0641] Expression vectors employed in prokaryotes frequently make use of inducible systems with and without fusion proteins or fusion oligopeptides, wherein these fusions can ensue in both N-terminal and C-terminal manner or in other useful domains of a protein. Such fusion vectors usually have the following purposes: 1) to increase the RNA expression rate; 2) to increase the achievable protein synthesis rate; 3) to increase the solubility of the protein; 4) or to simplify purification by means of a binding sequence usable for affinity chromatography. Proteolytic cleavage points are also frequently introduced via fusion proteins, which allow cleavage of a portion of the fusion protein and purification. Such recognition sequences for proteases are recognized, e.g. factor Xa, thrombin and enterokinase.

[0642] Typical advantageous fusion and expression vectors are pGEX (Pharmacia Biotech Inc; Smith D. B. and Johnson K. S., Gene 67, 31 (1988)), pMAL (New England Biolabs, Beverly, Mass.) and pRIT5 (Pharmacia, Piscataway, N.J.) which contains glutathione S-transferase (GST), maltose binding protein or protein A.

[0643] In one embodiment, the coding sequence of the polypeptide of the invention is cloned into a pGEX expression vector to create a vector encoding a fusion polypeptide comprising, from the N-terminus to the C-terminus, GST-thrombin cleavage site-X polypeptide. The fusion polypeptide can be purified by affinity chromatography using glutathione-agarose resin. Recombinant YIP unfused to GST can be recovered by cleavage of the fusion polypeptide with thrombin.

[0644] Other examples of E. coli expression vectors are pTrc (Amann et al., Gene 69, 301 (1988)) and pET vectors (Studier et al., Gene Expression Technology: Methods in Enzymology 185, Academic Press, San Diego, Calif. (1990) 60-89; Stratagene, Amsterdam, The Netherlands).

[0645] Target gene expression from the pTrc vector relies on host RNA polymerase transcription from a hybrid trp-lac fusion promoter. Target gene expression from the pET 11d vector relies on transcription from a T7 gn10-lac fusion promoter mediated by a co-expressed viral RNA polymerase (T7 gn1). This viral polymerase is supplied by host strains BL21(DE3) or HMS174(DE3) from a resident I prophage harboring a T7 gn1 gene under the transcriptional control of the lacUV 5 promoter.

[0646] In a preferred embodiment of the present invention, the YIPs are expressed in plants and plants cells such as unicellular plant cells (e.g. algae) (see Falciatore et al., Marine Biotechnology 1 (3), 239 (1999) and references therein) and plant cells from higher plants (e.g., the spermatophytes, such as crop plants). A nucleic acid molecule coding for YIP as depicted in table II, column 5 or 7 may be “introduced” into a plant cell by any means, including transfection, transformation or transduction, electroporation, particle bombardment, agroinfection, and the like. One transformation method known to those of skill in the art is the dipping of a flowering plant into an Agrobacteria solution, wherein the Agrobacteria contains the nucleic acid of the invention, followed by breeding of the transformed gametes.

[0647] Other suitable methods for transforming or transfecting host cells including plant cells can be found in Sambrook et al., Molecular Cloning: A Laboratory Manual. 2^{nd}, ed., Cold Spring Harbor Laboratory, Cold Spring Harbor Laboratory Press, Cold Spring Harbor, N.Y., 1989, and other laboratory manuals such as Methods in Molecular Biology, 1995, Vol. 44, Agrobacterium protocols, ed: Gartland and Davey, Humana Press, Totowa, N.J. As increased tolerance to abiotic environmental stress and/or yield is a general trait wished to be inherited into a wide variety of plants like maize, wheat, rye, oat, triticale, rice, barley, soybean, peanut, cotton, rapeseed and canola, manihot, pepper, sunflower and tagetes, solanaceous plants like potato, tobacco, eggplant, and tomato, Vicia species, pea, alfalfa, bushy plants (coffee, cacao, tea), Salix species, trees (oil palm, coconut), perennial grasses, and forage crops, these crop plants are also preferred target plants for a genetic engineering as one further embodiment of the present invention. Forage crops include, but are not limited to Wheatgrass, Canarygrass, Bromegrass, Wildrye Grass, Bluegrass, Orchardgrass, Alfalfa, Salfoin, Birdsfoot Trefoil, Alsike Clover, Red Clover and Sweet Clover.

[0648] In one embodiment of the present invention, transfection of a nucleic acid molecule coding for YIP as depicted in table II, column 5 or 7 into a plant is achieved by Agrobacterium mediated gene transfer. Agrobacterium mediated plant transformation can be performed using for example the GV3101(pMP90) (Koncz and Schell, Mol. Gen. Genet. 204, 383 (1986)) or LBA4404 (Clontech) Agrobacterium tumefaciens strain. Transformation can be performed by standard transformation and regeneration techniques (Deblaere et al., Nucl. Acids Res. 13, 4777 (1994), Gelvin, Stanton B. and Schilperoort Robert A, Plant Molecular Biology Manual, 2^{nd} Ed.—Dordrecht : Kluwer Academic Publ., 1995.—in Sect., Ring-buc Zentrale Signatur: BT11-P ISBN 0-7923-2731-4; Glick Bernard R., Thompson John E., Methods in Plant Molecular Biology and Biotechnology, Boca Raton: CRC Press, 1993 360 S., ISBN 0-8493-5164-2). For example, rapeseed can be transformed via cotyledon or hypocotyl transformation (Moloney et al., Plant Cell Report 8, 238 (1989); De Block et al., Plant Physiol. 91, 694 (1989)). Use of antibiotics for Agrobacterium and plant selection depends on the binary vector and the Agrobacterium strain used for transformation. Rapeseed selection is normally performed using kanamycin as selectable plant marker. Agrobacterium mediated gene transfer to flax can be performed using, for example, a technique described by Mlynarova et al., Plant Cell Report 13, 282 (1994). Additionally, transformation of soybean can be performed using for example a technique described in European Patent No. 424 047, U.S. Pat. No. 5,322,783, European Patent No. 397 687, U.S. Pat. No. 5,376,543 or U.S. Pat. No. 5,169,770. Transformation of maize can be achieved by particle bombardment, polyethylene glycol mediated DNA uptake or via the silicon carbide fiber technique. (See, for example, Freeling and Walbot “The maize handbook” Springer Verlag: New York (1993) ISBN 3-540-97826-7). A specific example of maize transformation is found in U.S. Pat. No. 5,990,387, and a specific example of wheat transformation can be found in PCT Application No. WO 93/07256.

[0649] According to the present invention, the introduced nucleic acid molecule coding for YIP as depicted in table II, column 5 or 7 may be maintained in the plant cell stably if it is incorporated into a non-chromosomal autonomous replicon or integrated into the plant chromosomes or organelle genome. Alternatively, the introduced YIP may be present on an extra-chromosomal non-replicating vector and be transiently expressed or transiently active.

[0650] In one embodiment, a homologous recombinant microorganism can be created wherein the YIP is integrated into a chromosome, a vector is prepared which contains at least a portion of a nucleic acid molecule coding for YIP as depicted in table II, column 5 or 7 into which a deletion, addition, or substitution has been introduced to thereby alter, e.g., functionally disrupt, the YIP gene. Preferably, the YIP gene is a yeast, E. coli gene, but it can be a homolog from a related plant or even from a mammalian or insect source. The vector can be designed such that, upon homologous recombination, the endogenous nucleic acid molecule coding for YIP as depicted in table II, column 5 or 7 is mutated or otherwise altered but still encodes a functional polypeptide (e.g., the upstream regulatory region can be altered to thereby alter the expression of the endogenous YIP). In a preferred embodiment the biological activity of the protein of the invention is increased upon homologous recombination. To create a point mutation via homologous recombination, DNA-RNA hybrids can be used in a technique known as chimeraplasty (Cole-Strauss et al., Nucleic Acids Research 27 (5),1323 (1999) and Kmiec, Gene Therapy American Scientist. 87 (3), 240 (1999)). Homologous recombination procedures in Physcomitrella patens are also well known in the art and are contemplated for use herein.

[0651] Whereas in the homologous recombination vector, the altered portion of the nucleic acid molecule coding for YIP as depicted in table II, column 5 or 7 is flanked at its 5′ and 3′ ends by an additional nucleic acid molecule of the YIP gene to allow for homologous recombination to occur between the exogenous YIP gene carried by the vector and an endogenous YIP gene, in a microorganism or plant. The additional flanking YIP nucleic acid molecule is of sufficient length for successful homologous recombination with the endogenous gene. Typically, several hundreds of base pairs up to kilobases of flanking DNA (both at the 5′ and 3′ ends) are included in the vector. See, e.g., Thomas K. R., and Capecchi M. R., Cell 51, 503 (1987) for a description of homologous recombination vectors or Strepp et al., PNAS, 95 (8), 4368 (1998) for cDNA based recombination in Physcomitrella patens. The vector is introduced into a microorganism or plant cell (e.g. via polyethylene glycol mediated DNA), and cells in which the introduced YIP gene has homologously recombined with the endogenous YIP gene are selected using art-known techniques.

[0652] Whether present in an extra-chromosomal non-replicating vector or a vector that is integrated into a chromosome, the nucleic acid molecule coding for YIP as depicted in table II, column 5 or 7 preferably resides in a plant expression cassette. A plant expression cassette preferably contains regulatory sequences capable of driving gene expression in plant cells that are operatively linked so that each sequence can fulfill its function, for example, termination of transcription by polyadenylation signals. Preferred polyadenylation signals are those originating from Agrobacterium tumefaciens t-DNA such as the gene 3 known as octopine synthase of the Ti-plasmid pTiACH5 (Gielen et al., EMBO J. 3, 835 (1984)) or functional equivalents thereof but also all other terminators functionally active in plants are suitable. As plant gene expression is very often not limited on transcriptional levels, a plant expression cassette preferably contains other operatively linked sequences like translational enhancers such as the overdrive-sequence containing the 5′-untranslated leader sequence from tobacco mosaic virus enhancing the polypeptide per RNA ratio (Gallie et al., Nucl. Acids Research 15, 8693 (1987)). Examples of plant expression vectors include those detailed in: Becker D. et al., Plant Mol. Biol. 20, 1195 (1992); and Bevan M. W., Nucl. Acid. Res. 12, 8711 (1984); and “Vectors for Gene Transfer in Higher Plants” in: Transgenic Plants, Vol. 1, Engineering and Utilization, eds. Kung and Wu R., Academic Press, 1993, S. 15-38.

[0653] “Transformation” is defined herein as a process for introducing heterologous DNA into a plant cell, plant tissue, or plant. It may occur under natural or artificial conditions using various methods well known in the art. Transformation may rely on any known method for the insertion of foreign nucleic acid sequences into aprokaryotic or eukaryotic host cell. The method is selected based on the host cell being transformed and may include, but is not limited to, viral infection, electroporation, lipofection, and particle bombardment. Such “transformed” cells include stably transformed cells in which the inserted DNA is capable of replication either as an autonomously replicating plasmid or as part of the host chromosome. They also include cells which transiently express the inserted DNA or RNA for limited periods of time. Transformed plant cells, plant tissue, or plants are understood to encompass not only the end product of a transformation process, but also transgenic progeny thereof.

[0654] The terms “transformed,” “transgenic,” and “recombinant” refer to a host organism such as a bacterium or a plant into which a heterologous nucleic acid molecule has been introduced. The nucleic acid molecule can be stably integrated into the genome of the host or the nucleic acid molecule can also be present as an extrachromosomal molecule. Such an extrachromosomal molecule can be auto-replicating. Transformed cells, tissues, or plants are understood to encompass not only the end product of a transformation process, but also transgenic progeny thereof. A “non-transformed”, “non-transgenic” or “non-recombinant” host refers to a wild-type organism, e.g. a bacterium or plant, which does not contain the heterologous nucleic acid molecule.

[0655] A “transgenic plant”, as used herein, refers to a plant which contains a foreign nucleotide sequence inserted into either its nuclear genome or organelle genome. It encompasses further the offspring generations i.e. the T1-, T2- and consecutively generations or BC1-, BC2- and consecutively generation as well as crossbreeds thereof with non-transgenic or other transgenic plants.

[0656] The host organism (=transgenic organism) advantageously contains at least one copy of the nucleic acid according to the invention and/or of the nucleic acid construct according to the invention.

[0657] In principle all plants can be used as host organism. Preferred transgenic plants are, for example, selected from the families Aceraceae, Anacardiaceae, Apiaceae, Asteraceae, Brassicaceae, Cactaceae, Cucurbitaceae, Euphorbiaceae, Fabaceae, Malvaceae, Nymphaeaceae, Papaveraceae, Rosaceae, Salicaceae, Solanaceae, Arecaceae, Bromeliaceae, Cyperaceae, Iridaceae, Liliaceae, Orchidaceae, Gentianaceae, Labiaceae, Magnoliaceae, Ranunculaceae, Carifolaceae, Rubiaceae, Scrophulariaceae, Caryophyllaceae, Ericaceae, Polygonaceae, Violaceae, Juncaceae or Poaceae and preferably from a plant selected from the group of the families Apiaceae, Asteraceae, Brassicaceae, Cucurbitaceae, Fabaceae, Papaveraceae, Rosaceae, Solanaceae, Liliaceae or Poaceae. Preferred are crop plants such as plants advantageously selected from the group of the genus peanut, oilseed rape, canola, sunflower, safflower, olive, sesame, hazelnut, almond, avocado, bay, pumpkin/squash, linseed, soya, pistachio, borage, maize, wheat, rye, oats, sorghum and millet, triticale, rice, barley, cassava, potato, sugarbeet, egg plant, alfalfa, and perennial grasses and forage plants, oil palm, vegetables (brassicas, root vegetables, tuber vegetables, pod vegetables, fruiting vegetables, onion vegetables, leafy vegetables and stem vegetables), buckwheat, Jerusalem artichoke, broad bean, vetches, lentil, dwarf bean, lupin, clover and Lucerne for mentioning only some of them.

[0658] In one embodiment of the invention transgenic plants are selected from the group comprising cereals, soybean, rapeseed (including oil seed rape, especially canola and winter oil seed rape), cotton sugarcane and potato, especially corn, soy, rapeseed (including oil seed rape, especially canola and winter oil seed rape), cotton, wheat and rice.

[0659] In another embodiment of the invention the transgenic plant is a gymnosperm plant, especially a spruce, pine or fir.

[0660] In one prefered embodiment, the host plant is selected from the families Aceraceae, Anacardiaceae, Apiaceae, Asteraceae, Brassicaceae, Cactaceae, Cucurbitaceae, Euphorbiaceae, Fabaceae, Malvaceae, Nymphaeaceae, Papaveraceae, Rosaceae, Salicaceae, Solanaceae, Arecaceae, Bromeliaceae, Cyperaceae, Iridaceae, Liliaceae, Orchidaceae, Gentianaceae, Labiaceae, Magnoliaceae, Ranunculaceae, Carifolaceae, Rubiaceae, Scrophulariaceae, Caryophyllaceae, Ericaceae, Polygonaceae, Violaceae, Juncaceae or Poaceae and preferably from a plant selected from the group of the families Apiaceae, Asteraceae, Brassicaceae, Cucurbitaceae, Fabaceae, Papaveraceae, Rosaceae, Solanaceae, Liliaceae or Poaceae. Preferred are crop plants and in particular plants mentioned herein above as host plants such as the families and genera mentioned above for example preferred the species Anacardium occidentale, Calendula officinalis, Carthamus tinctorius, Cichorium intybus, Cynara scolymus, Helianthus annus, Tagetes lucida, Tagetes erecta, Tagetes tenuifolia; Daucus carota; Corylus avellana, Corylus colurna, Borago officinalis; Brassica napus, Brassica rapa ssp., Sinapis arvensis Brassica juncea, Brassica juncea var. juncea, Brassica juncea var. crispifolia, Brassica juncea var. foliosa, Brassica nigra, Brassica sinapioides, Melanosinapis communis, Brassica oleracea, Arabidopsis thaliana, Anana comosus, Ananas ananas, Bromelia comosa, Carica papaya, Cannabis sative, Ipomoea batatus, Ipomoea pandurata, Convolvulus batatas, Convolvulus tiliaceus, Ipomoea fastigiate, Ipomoea tiliacea, Ipomoea triloba, Convolvulus panduratus, Beta vulgaris, Beta vulgaris var. altissima, Beta vulgaris var. vulgaris, Beta maritima, Beta vulgaris var. perennis, Beta vulgaris var. conditiva, Beta vulgaris var. esculents, Cucurbita maxima, Cucurbita mixta, Cucurbita pepo, Cucurbita moschata, Olea europaea, Manihot utilissima, Janipha manihot, Jatropha manihot, Manihot aipil, Manihot dulcis, Manihot manihot, Manihot melanobasis, Manihot esculenta, Ricinus communis, Pisum sativum, Pisum arvense, Pisum humile, Medicago sativa, Medicago falcata, Medicago varia, Glycine max Dolichos soja, Glycine gracilis, Glycine hispida, Phaseolus max, Soja hispida, Soja max, Cocos nucifera, Pelargonium grossularioides, Oleum cocoas, Laurus nobilis, Persea americana, Arachis hypogaea, Linum usitatissimum, Linum humile, Linum austriacum, Linum bienne, Linum angustifolium, Linum catharticum, Linum flavum, Linum grandiflorum, Adenolinum grandiflorum, Linum lewisii, Linum narbonense, Linum perenne, Linum perenne var. lewisii, Linum pratense, Linum trigynum, Punica granatum, Gossypium hirsutum, Gossypium arboreum, Gossypium barbadense, Gossypium herbaceum, Gossypium thurberi, Musa nana, Musa acuminata, Musa paradisiaca, Musa spp., Elaeis guineensis, Papaver orientale, Papaver rhoeas, Papaver dubium, Sesamum indicum, Piper aduncum, Piper amalago, Piper angustifolium, Piper auritum, Piper betel, Piper cubeba, Piper longum, Piper nigrum, Piper retrofractum, Artanthe adunca, Artanthe elongata, Peperomia elongata, Piper elongatum, Steffensia elongata, Hordeum vulgare, Hordeum jubatum, Hordeum murinum, Hordeum secalinum, Hordeum distichon Hordeum aegiceras, Hordeum hexastichon, Hordeum hexastichum, Hordeum irregulare, Hordeum sativum, Hordeum secalinum, Avena sativa, Avena fatua, Avena byzantina, Avena fatua var. sativa, Avena hybrida, Sorghum bicolor, Sorghum halepense, Sorghum saccharatum, Sorghum vulgare, Andropogon drummondii, Holcus bicolor, Holcus sorghum, Sorghum aethiopicum, Sorghum arundinaceum, Sorghum caffrorum, Sorghum cernuum, Sorghum dochna, Sorghum drummondii, Sorghum durra, Sorghum guineense, Sorghum lanceolatum, Sorghum nervosum, Sorghum saccharatum, Sorghum subglabrescens, Sorghum verticilliflorum, Sorghum vulgare, Holcus halepensis, Sorghum miliaceum millet, Panicum militaceum, Zea mays, Triticum aestivum, Triticum durum, Triticum turgidum, Triticum hybernum, Triticum macha, Triticum sativum or Triticum vulgare, Cofea spp., Coffea arabica, Coffea canephora, Coffea liberica, Capsicum annuum, Capsicum annuum var. glabriusculum, Capsicum frutescens, Capsicum annuum, Nicotiana tabacum, Solanum tuberosum, Solanum melongena, Lycopersicon esculentum, Lycopersicon lycopersicum, Lycopersicon pyriforme, Solanum integrifolium, Solanum lycopersicum Theobroma cacao or Camellia sinensis.

[0661] Anacardiaceae such as the genera Pistacia, Mangifera, Anacardium e.g. the species Pistacia vera [pistachios, Pistazie], Mangifer indica [Mango] or Anacardium occidentale [Cashew]; Asteraceae such as the genera Calendula, Carthamus, Centaurea, Cichorium, Cynara, Helianthus, Lactuca, Locusta, Tagetes, Valeriana e.g. the species Calendula officinalis [Marigold], Carthamus tinctorius [safflower], Centaurea cyanus [cornflower], Cichorium intybus [blue daisy], Cynara scolymus [Artichoke], Helianthus annus [sunflower], Lactuca sativa, Lactuca crispa, Lactuca esculenta, Lactuca scariola L. ssp. sativa, Lactuca scariola L. var. integrate, Lactuca scariola L. var. integrifolia, Lactuca sativa subsp. romana, Locusta communis, Valeriana locusta [lettuce], Tagetes lucida, Tagetes erecta or Tagetes tenuifolia [Marigold]; Apiaceae such as the genera Daucus e.g. the species Daucus carota [carrot]; Betulaceae such as the genera Corylus e.g. the species Corylus avellana or Corylus colurna [hazelnut]; Boraginaceae such as the genera Borago e.g. the species Borago officinalis [borage]; Brassicaceae such as the genera Brassica, Melanosinapis, Sinapis, Arabadopsis e.g. the species Brassica napus, Brassica rapa ssp. [canola, oilseed rape, turnip rape], Sinapis arvensis Brassica juncea, Brassica juncea var. juncea, Brassica juncea var. crispifolia, Brassica juncea var. foliosa, Brassica nigra, Brassica sinapioides, Melanosinapis communis [mustard], Brassica oleracea [fodder beet] or Arabidopsis thaliana; Bromeliaceae such as the genera Anana, Bromelia e.g. the species Anana comosus, Ananas ananas or Bromelia comosa [pineapple]; Caricaceae such as the genera Carica e.g. the species Carica papaya [papaya]; Cannabaceae such as the genera Cannabis e.g. the species Cannabis sative [hemp], Convolvulaceae such as the genera Ipomea, Convolvulus e.g. the species Ipomoea batatus, Ipomoea pandurata, Convolvulus batatas, Convolvulus tiliaceus, Ipomoea fastigiata, Ipomoea tiliacea, Ipomoea triloba or Convolvulus panduratus [sweet potato, Man of the Earth, wild potato], Chenopodiaceae such as the genera Beta, i.e. the species Beta vulgaris, Beta vulgaris var. altissima, Beta vulgaris var. Vulgaris, Beta maritima, Beta vulgaris var. perennis, Beta vulgaris var. conditiva or Beta vulgaris var. esculenta [sugar beet]; Cucurbitaceae such as the genera Cucubita e.g. the species Cucurbita maxima, Cucurbita mixta, Cucurbita pepo or Cucurbita moschata [pumpkin, squash]; Elaeagnaceae such as the genera Elaeagnus e.g. the species Olea europaea [olive]; Ericaceae such as the genera Kalmia e.g. the species Kalmia latifolia, Kalmia angustifolia, Kalmia microphylla, Kalmia polifolia, Kalmia occidentalis, Cistus chamaerhodendros or Kalmia lucida [American laurel, broad-leafed laurel, calico bush, spoon wood, sheep laurel, alpine laurel, bog laurel, western bog-laurel, swamp-laurel]; Euphorbiaceae such as the genera Manihot, Janipha, Jatropha, Ricinus e.g. the species Manihot utilissima, Janipha manihot, Jatropha manihot, Manihot aipil, Manihot dulcis, Manihot manihot, Manihot melanobasis, Manihot esculenta [manihot, arrowroot, tapioca, cassava] or Ricinus communis [castor bean, Castor Oil Bush, Castor Oil Plant, Palma Christi, Wonder Tree]; Fabaceae such as the genera Pisum, Albizia, Cathormion, Feuillea, Inga, Pithecolobium, Acacia, Mimosa, Medicajo, Glycine, Dolichos, Phaseolus, Soja e.g. the species Pisum sativum, Pisum arvense, Pisum humile [pea], Albizia berteriana, Albizia julibrissin, Albizia lebbeck, Acacia berteriana, Acacia littoralis, Albizia berteriana, Albizzia berteriana, Cathormion berteriana, Feuillea berteriana, Inga fragrans, Pithecellobium berterianum, Pithecellobium fragrans, Pithecolobium berterianum, Pseudalbizzia berteriana, Acacia julibrissin, Acacia nemu, Albizia nemu, Feuilleea julibrissin, Mimosa julibrissin, Mimosa speciosa, Sericanrda julibrissin, Acacia lebbeck, Acacia macrophylla, Albizia lebbek, Feuilleea lebbeck, Mimosa lebbeck, Mimosa speciosa [bastard logwood, silk tree, East Indian Walnut], Medicago sativa, Medicago falcata, Medicago varia [alfalfa] Glycine max Dolichos soja, Glycine gracilis, Glycine hispida, Phaseolus max, Soja hispida or Soja max [soybean]; Geraniaceae such as the genera Pelargonium, Cocos, Oleum e.g. the species Cocos nucifera, Pelargonium grossularioides or Oleum cocois [coconut]; Gramineae such as the genera Saccharum e.g. the species Saccharum officinarum; Juglandaceae such as the genera Juglans, Wallia e.g. the species Juglans regia, Juglans ailanthifolia, Juglans sieboldiana, Juglans cinerea, Wallia cinerea, Juglans bixbyi, Juglans californica, Juglans hindsii, Juglans intermedia, Juglans jamaicensis, Juglans major, Juglans microcarpa, Juglans nigra or Wallia nigra [walnut, black walnut, common walnut, persian walnut, white walnut, butternut, black walnut]; Lauraceae such as the genera Persea, Laurus e.g. the species laurel Laurus nobilis [bay, laurel, bay laurel, sweet bay], Persea americana Persea americana, Persea gratissima or Persea persea [avocado]; Leguminosae such as the genera Arachis e.g. the species Arachis hypogaea [peanut]; Linaceae such as the genera Linum, Adenolinum e.g. the species Linum usitatissimum, Linum humile, Linum austriacum, Linum bienne, Linum angustifolium, Linum catharticum, Linum flavum, Linum grandiflorum, Adenolinum grandiflorum, Linum lewisii, Linum narbonense, Linum perenne, Linum perenne var. lewisii, Linum pratense or Linum trigynum [flax, linseed]; Lythrarieae such as the genera Punica e.g. the species Punica granatum [pomegranate]; Malvaceae such as the genera Gossypium e.g. the species Gossypium hirsutum, Gossypium arboreum, Gossypium barbadense, Gossypium herbaceum or Gossypium thurberi [cotton]; Musaceae such as the genera Musa e.g. the species Musa nana, Musa acuminata, Musa paradisiaca, Musa spp. [banana]; Onagraceae such as the genera Camissonia, Oenothera e.g. the species Oenothera biennis or Camissonia brevipes [primrose, evening primrose]; Palmae such as the genera Elacis e.g. the species Elaeis guineensis [oil plam]; Papaveraceae such as the genera Papaver e.g. the species Papaver orientale, Papaver rhoeas, Papaver dubium [poppy, oriental poppy, corn poppy, field poppy, shirley poppies, field poppy, long-headed poppy, long-pod poppy]; Pedaliaceae such as the genera Sesamum e.g. the species Sesamum indicum [sesame]; Piperaceae such as the genera Piper, Artanthe, Peperomia, Steffensia e.g. the species Piper aduncum, Piper amalago, Piper angustifolium, Piper auritum, Piper betel, Piper cubeba, Piper longum, Piper nigrum, Piper retrofractum, Artanthe adunca, Artanthe elongata, Peperomia elongata, Piper elongatum, Steffensia elongata. [Cayenne pepper, wild pepper]; Poaceae such as the genera Hordeum, Secale, Avena, Sorghum, Andropogon, Holcus, Panicum, Oryza, Zea, Triticum e.g. the species Hordeum vulgare, Hordeum jubatum, Hordeum murinum, Hordeum secalinum, Hordeum distichon Hordeum aegiceras, Hordeum hexastichon, Hordeum hexastichum, Hordeum irregulare, Hordeum sativum, Hordeum secalinum [barley, pearl barley, foxtail barley, wall barley, meadow barley], Secale cereale [rye], Avena sativa, Avena fatua, Avena byzantina, Avena fatua var. sativa, Avena hybrida [oat], Sorghum bicolor, Sorghum halepense, Sorghum saccharatum, Sorghum vulgare, Andropogon drummondii, Holcus bicolor, Holcus sorghum, Sorghum aethiopicum, Sorghum arundinaceum, Sorghum caffrorum, Sorghum cernuum, Sorghum dochna, Sorghum drummondii, Sorghum durra, Sorghum guineense, Sorghum lanceolatum, Sorghum nervosum, Sorghum saccharatum, Sorghum subglabrescens, Sorghum verticilliflorum, Sorghum vulgare, Holcus halepensis, Sorghum miliaceum millet, Panicum militaceum [Sorghum, millet], Oryza sativa, Oryza latifolia [rice], Zea mays [corn, maize] Triticum aestivum, Triticum durum, Triticum turgidum, Triticum hybernum, Triticum macha, Triticum sativum or Triticum vulgare [wheat, bread wheat, common wheat], Proteaceae such as the genera Macadamia e.g. the species Macadamia intergrifolia [macadamia]; Rubiaceae such as the genera Coffea e.g. the species Cofea spp., Coffea arabica, Coffea canephora or Coffea liberica [coffee]; Scrophulariaceae such as the genera Verbascum e.g. the species Verbascum blattaria, Verbascum chaixii, Verbascum densiflorum, Verbascum lagurus, Verbascum longifolium, Verbascum lychnitis, Verbascum nigrum, Verbascum olympicum, Verbascum phlomoides, Verbascum phoenicum, Verbascum pulverulentum or Verbascum thapsus [mullein, white moth mullein, nettle-leaved mullein, dense-flowered mullein, silver mullein, long-leaved mullein, white mullein, dark mullein, greek mullein, orange mullein, purple mullein, hoary mullein, great mullein]; Solanaceae such as the genera Capsicum, Nicotiana, Solanum, Lycopersicon e.g. the species Capsicum annuum, Capsicum annuum var. glabriusculum, Capsicum frutescens [pepper], Capsicum annuum [paprika], Nicotiana tabacum, Nicotiana alata, Nicotiana attenuata, Nicotiana glauca, Nicotiana langsdorffii, Nicotiana obtusifolia, Nicotiana quadrivalvis, Nicotiana repanda, Nicotiana rustica, Nicotiana sylvestris [tobacco], Solanum tuberosum [potato], Solanum melongena [egg-plant] (Lycopersicon esculentum, Lycopersicon lycopersicum, Lycopersicon pyriforme, Solanum integrifolium or Solanum lycopersicum [tomato]; Sterculiaceae such as the genera Theobroma e.g. the species Theobroma cacao [cacao]; Theaceae such as the genera Camellia e.g. the species Camellia sinensis) [tea].

[0662] The introduction of the nucleic acids according to the invention, the expression cassette or the vector into organisms, plants for example, can in principle be done by all of the methods known to those skilled in the art. The introduction of the nucleic acid sequences gives rise to recombinant or transgenic organisms.

[0663] Unless otherwise specified, the terms “polynucleotides”, “nucleic acid” and “nucleic acid molecule” as used herein are interchangeably. Unless otherwise specified, the terms “peptide”, “polypeptide” and “protein” are interchangeably in the present context. The term “sequence” may relate to polynucleotides, nucleic acids, nucleic acid molecules, peptides, polypeptides and proteins, depending on the context in which the term “sequence” is used. The terms “gene(s)”, “polynucleotide”, “nucleic acid sequence”, “nucleotide sequence”, or “nucleic acid molecule(s)” as used herein refers to a polymeric form of nucleotides of any length, either ribonucleotides or deoxyribonucleotides. The terms refer only to the primary structure of the molecule.

[0664] Thus, the terms “gene(s)”, “polynucleotide”, “nucleic acid sequence”, “nucleotide sequence”, or “nucleic acid molecule(s)” as used herein include double- and single-stranded DNA and RNA. They also include known types of modifications, for example, methylation, “caps”, substitutions of one or more of the naturally occurring nucleotides with an analog. Preferably, the DNA or RNA sequence of the invention comprises a coding sequence encoding the herein defined polypeptide.

[0665] The genes of the invention, coding for an activity selected from the group consisting of 30S ribosomal protein S11, 60S ribosomal protein, Adaptin medium chain homolog APM2, B0252-protein, BRICK1-like protein, Cav1 protein, Chloroplast chaperonin, DNA polymerase, flagellar protein, G2/mitotic-specific cyclin, GRE1-protein(Hydrophilin), Membrane protein, ORF YPL249c-a, RNA polymerase II holoenzyme cyclin-like subunit, Serine/threonine-protein kinase, Short chain dehydrogenase, Sterol-C-methyltransferase, transcription regulator (farR), Ykr015c-protein, and YPL167C_{—}2-protein are also called “YIP gene”.

[0666] A “coding sequence” is a nucleotide sequence, which is transcribed into mRNA and/or translated into a polypeptide when placed under the control of appropriate regulatory sequences. The boundaries of the coding sequence are determined by a translation start codon at the 5′-terminus and a translation stop codon at the 3′-terminus. A coding sequence can include, but is not limited to mRNA, cDNA, recombinant nucleotide sequences or genomic DNA, while introns may be present as well under certain circumstances.

[0667] The transfer of foreign genes into the genome of a plant is called transformation. In doing this the methods described for the transformation and regeneration of plants from plant tissues or plant cells are utilized for transient or stable transformation. Suitable methods are protoplast transformation by poly(ethylene glycol)-induced DNA up-take, the “biolistic” method using the gene cannon—referred to as the particle bombardment method, electroporation, the incubation of dry embryos in DNA solution, microinjection and gene transfer mediated by Agrobacterium. Said methods are described by way of example in Jenes B. et al., Techniques for Gene Transfer, in: Transgenic Plants, Vol. 1, Engineering and Utilization, eds. Kung S. D and Wu R., Academic Press (1993) 128-143 and in Potrykus, Annu. Rev. Plant Physiol. Plant Molec. Biol. 42, 205 (1991). The nucleic acids or the construct to be expressed is preferably cloned into a vector which is suitable for transforming Agrobacterium tumefaciens, for example pBin19 (Bevan et al., Nucl. Acids Res. 12, 8711 (1984)). Agrobacteria transformed by such a vector can then be used in known manner for the transformation of plants, in particular of crop plants such as by way of example tobacco plants, for example by bathing bruised leaves or chopped leaves in an agrobacterial solution and then culturing them in suitable media. The transformation of plants by means of Agrobacterium tumefaciens is described, for example, by Höfgen and Willmitzer in Nucl. Acid Res. 16, 9877 (1988) or is known inter alia from White F. F., Vectors for Gene Transfer in Higher Plants; in Transgenic Plants, Vol. 1, Engineering and Utilization, eds. Kung S. D. and Wu R., Academic Press, 1993, pp. 15-38.

[0668] Agrobacteria transformed by an expression vector according to the invention may likewise be used in known manner for the transformation of plants such as test plants like Arabidopsis or crop plants such as cereal crops, corn, oats, rye, barley, wheat, soybean, rice, cotton, sugar beet, canola, sunflower, flax, hemp, potatoes, tobacco, tomatoes, carrots, paprika, oilseed rape, tapioca, cassava, arrowroot, tagetes, alfalfa, lettuce and the various tree, nut and vine species, in particular oil-containing crop plants such as soybean, peanut, castor oil plant, sunflower, corn, cotton, flax, oilseed rape, coconut, oil palm, safflower (Carthamus tinctorius) or cocoa bean, or in particular corn, wheat, soybean, rice, cotton and canola, e.g. by bathing bruised leaves or chopped leaves in an agrobacterial solution and then culturing them in suitable media.

[0669] The genetically modified plant cells may be regenerated by all of the methods known to those skilled in the art. Appropriate methods can be found in the publications referred to above by Kung S. D. and Wu R., Potrykus or Höfgen and Willmitzer.

[0670] Accordingly, a further aspect of the invention relates to transgenic organisms transformed by at least one nucleic acid sequence, expression cassette or vector according to the invention as well as cells, cell cultures, tissue, parts—such as, for example, leaves, roots, etc. in the case of plant organisms—or reproductive material derived from such organisms. The terms “host organism”,“host cell”,“recombinant (host) organism” and “transgenic (host) cell” are used here interchangeably. Of course these terms relate not only to the particular host organism or the particular target cell but also to the descendants or potential descendants of these organisms or cells. Since, due to mutation or environmental effects certain modifications may arise in successive generations, these descendants need not necessarily be identical with the parental cell but nevertheless are still encompassed by the term as used here.

[0671] For the purposes of the invention “transgenic” or “recombinant” means with regard for example to a nucleic acid sequence, an expression cassette (=gene construct, nucleic acid construct) or a vector containing the nucleic acid sequence according to the invention or an organism transformed by the nucleic acid sequences, expression cassette or vector according to the invention all those constructions produced by genetic engineering methods in which either
[0672] (a) the nucleic acid sequence depicted in table I, application no.1, column 5 or 7 or its derivatives or parts thereof; or
[0673] (b) a genetic control sequence functionally linked to the nucleic acid sequence described under (a), for example a 3′- and/or 5′-genetic control sequence such as a promoter or terminator, or
[0674] (c) (a) and (b);
   are not found in their natural, genetic environment or have been modified by genetic engineering methods, wherein the modification may by way of example be a substitution, addition, deletion, inversion or insertion of one or more nucleotide residues. Natural genetic environment means the natural genomic or chromosomal locus in the organism of origin or inside the host organism or presence in a genomic library. In the case of a genomic library the natural genetic environment of the nucleic acid sequence is preferably retained at least in part. The environment borders the nucleic acid sequence at least on one side and has a sequence length of at least 50 bp, preferably at least 500 bp, particularly preferably at least 1,000 bp, most particularly preferably at least 5,000 bp. A naturally occurring expression cassette—for example the naturally occurring combination of the natural promoter of the nucleic acid sequence according to the invention with the corresponding gene—turns into a transgenic expression cassette when the latter is modified by unnatural, synthetic (“artificial”) methods such as by way of example a mutagenesis. Appropriate methods are described by way of example in U.S. Pat. No. 5,565,350 or WO 00/15815.

[0675] Suitable organisms or host organisms for the nucleic acid, expression cassette or vector according to the invention are advantageously in principle all organisms, which are suitable for the expression of recombinant genes as described above. Further examples which may be mentioned are plants such as Arabidopsis, Asteraceae such as Calendula or crop plants such as soybean, peanut, castor oil plant, sunflower, flax, corn, cotton, flax, oilseed rape, coconut, oil palm, safflower (Carthamus tinctorius) or cocoa bean.

[0676] In one embodiment of the invention host plants for the nucleic acid, expression cassette or vector according to the invention are selected from the group comprising corn, soy, oil seed rape (including canola and winter oil seed rape), cotton, wheat and rice.

[0677] A further object of the invention relates to the use of a nucleic acid construct, e.g. an expression cassette, containing DNA sequences encoding polypeptides shown in table II or DNA sequences hybridizing therewith for the transformation of plant cells, tissues or parts of plants.

[0678] In doing so, depending on the choice of promoter, the sequences shown in table I can be expressed specifically in the leaves, in the seeds, the nodules, in roots, in the stem or other parts of the plant. Those transgenic plants overproducing sequences as depicted in table I, the reproductive material thereof, together with the plant cells, tissues or parts thereof are a further object of the present invention.

[0679] The expression cassette or the nucleic acid sequences or construct according to the invention containing sequences according to table I can, moreover, also be employed for the transformation of the organisms identified by way of example above such as bacteria, yeasts, filamentous fungi and plants.

[0680] Within the framework of the present invention, enhanced tolerance to abiotic environmental stress and/or yield means, for example, the artificially acquired trait of enhanced tolerance to abiotic environmental stress and/or yield due to functional over expression of polypeptide sequences of table II encoded by the corresponding nucleic acid molecules as depicted in table I, column 5 or 7 and/or homologs in the organisms according to the invention, advantageously in the transgenic plants according to the invention, by comparison with the nongenetically modified initial plants at least for the duration of at least one plant generation.

[0681] A constitutive expression of the polypeptide sequences of table II, encoded by the corresponding nucleic acid molecule as depicted in table I, column 5 or 7 and/or homologs is, moreover, advantageous. On the other hand, however, an inducible expression may also appear desirable. Expression of the polypeptide sequences of the invention can be either direct to the cytoplasm or the organelles, preferably the plastids of the host cells, preferably the plant cells.

[0682] The efficiency of the expression of the sequences of the of table II, encoded by the corresponding nucleic acid molecule as depicted in table I, column 5 or 7 and/or homologs can be determined, for example, in vitro by shoot meristem propagation. In addition, an expression of the sequences of table II, encoded by the corresponding nucleic acid molecule as depicted in table I, column 5 or 7 and/or homologs modified in nature and level and its effect on the metabolic pathways performance can be tested on test plants in greenhouse trials.

[0683] An additional object of the invention comprises transgenic organisms such as transgenic plants transformed by an expression cassette containing sequences of as depicted in table I, column 5 or 7 according to the invention or DNA sequences hybridizing therewith, as well as transgenic cells, tissue, parts and reproduction material of such plants. Particular preference is given in this case to transgenic crop plants such as by way of example barley, wheat, rye, oats, corn, soybean, rice, cotton, sugar beet, oilseed rape and canola, sunflower, flax, hemp, thistle, potatoes, tobacco, tomatoes, tapioca, cassava, arrow-root, alfalfa, lettuce and the various tree, nut and vine species.

[0684] In one embodiment of the invention transgenic plants transformed by an expression cassette containing sequences of as depicted in table I, column 5 or 7 according to the invention or DNA sequences hybridizing therewith are selected from the group comprising corn, soy, oil seed rape (including canola and winter oil seed rape), cotton, wheat and rice.

[0685] For the purposes of the invention plants are mono- and dicotyledonous plants, mosses or algae, especially plants, for example in one embodiment monocotyledonous plants, or for example in another embodiment dicotyledonous plants. A further refinement according to the invention are transgenic plants as described above which contain a nucleic acid sequence or construct according to the invention or a expression cassette according to the invention.

[0686] However, transgenic also means that the nucleic acids according to the invention are located at their natural position in the genome of an organism, but that the sequence, e.g. the coding sequence or a regulatory sequence, for example the promoter sequence, has been modified in comparison with the natural sequence. Preferably, transgenic/recombinant is to be understood as meaning the transcription of one or more nucleic acids or molecules of the invention and being shown in table I, occurs at a non-natural position in the genome. In one embodiment, the expression of the nucleic acids or molecules is homologous. In another embodiment, the expression of the nucleic acids or molecules is heterologous. This expression can be transiently or of a sequence integrated stably into the genome.

[0687] The term “transgenic plants” used in accordance with the invention also refers to the progeny of a transgenic plant, for example the T1, T2, T3 and subsequent plant generations or the BC-1, BC2, BC3 and subsequent plant generations. Thus, the transgenic plants according to the invention can be raised and selfed or crossed with other individuals in order to obtain further transgenic plants according to the invention. Transgenic plants may also be obtained by propagating transgenic plant cells vegetatively. The present invention also relates to transgenic plant material, which can be derived from a transgenic plant population according to the invention. Such material includes plant cells and certain tissues, organs and parts of plants in all their manifestations, such as seeds, leaves, anthers, fibers, tubers, roots, root hairs, stems, embryo, calli, cotyledons, petioles, harvested material, plant tissue, reproductive tissue and cell cultures, which are derived from the actual transgenic plant and/or can be used for bringing about the transgenic plant.

[0688] Any transformed plant obtained according to the invention can be used in a conventional breeding scheme or in vitro plant propagation to produce more transformed plants with the same characteristics and/or can be used to introduce the same characteristic in other varieties of the same or related species. Such plants are also part of the invention. Seeds obtained from the transformed plants genetically also contain the same characteristic and are part of the invention. As mentioned before, the present invention is in principle applicable to any plant and crop that can be transformed with any of the transformation method known to those skilled in the art.

[0689] Advantageous inducible plant promoters are by way of example the PRP1 promoter (Ward et al., Plant. Mol. Biol. 22361 (1993)), a promoter inducible by benzenesulfonamide (EP 388 186), a promoter inducible by tetracycline (Gatz et al., Plant J. 2, 397 (1992)), a promoter inducible by salicylic acid (WO 95/19443), a promoter inducible by abscisic acid (EP 335 528) and a promoter inducible by ethanol or cyclohexanone (WO 93/21334). Other examples of plant promoters which can advantageously be used are the promoter of cytoplasmic FBPase from potato, the ST-LSI promoter from potato (Stockhaus et al., EMBO J. 8, 2445 (1989)), the promoter of phosphoribosyl pyrophosphate amidotransferase from Glycine max (see also gene bank accession number U87999) or a nodiene-specific promoter as described in EP 249 676.

[0690] Particular advantageous are those promoters which ensure expression upon onset of abiotic stress conditions. Particular advantageous are those promoters which ensure expression upon onset of low temperature conditions, e.g. at the onset of chilling and/or freezing temperatures as defined hereinabove, e.g. for the expression of nucleic acid molecules as shown in table VIIIb. Advantageous are those promoters which ensure expression upon conditions of limited nutrient availability, e.g. the onset of limited nitrogen sources in case the nitrogen of the soil or nutrient is exhausted, e.g. for the expression of the nucleic acid molecules or their gene products as shown in table VIIIa. Particular advantageous are those promoters which ensure expression upon onset of water deficiency, as defined hereinabove, e.g. for the expression of the nucleic acid molecules or their gene products as shown in table VIIIc. Particular advantageous are those promoters which ensure expression upon onset of standard growth conditions, e.g. under condition without stress and deficient nutrient provision, e.g. for the expression of the nucleic acid molecules or their gene products as shown in table VIIId.

[0691] Such promoters are known to the person skilled in the art or can be isolated from genes which are induced under the conditions mentioned above.

[0692] In one embodiment, seed-specific promoters may be used for monocotyledonous or dicotyledonous plants.

[0693] In principle all natural promoters with their regulation sequences can be used like those named above for the expression cassette according to the invention and the method according to the invention. Over and above this, synthetic promoters may also advantageously be used.

[0694] In the preparation of an expression cassette various DNA fragments can be manipulated in order to obtain a nucleotide sequence, which usefully reads in the correct direction and is equipped with a correct reading frame. To connect the DNA fragments (=nucleic acids according to the invention) to one another adaptors or linkers may be attached to the fragments.

[0695] The promoter and the terminator regions can usefully be provided in the transcription direction with a linker or polylinker containing one or more restriction points for the insertion of this sequence. Generally, the linker has 1 to 10, mostly 1 to 8, preferably 2 to 6, restriction points. In general the size of the linker inside the regulatory region is less than 100 bp, frequently less than 60 bp, but at least 5 bp. The promoter may be both native or homologous as well as foreign or heterologous to the host organism, for example to the host plant. In the 5′-3′ transcription direction the expression cassette contains the promoter, a DNA sequence which shown in table I and a region for transcription termination. Different termination regions can be exchanged for one another in any desired fashion.

[0696] As also used herein, the terms “nucleic acid” and “nucleic acid molecule” are intended to include DNA molecules (e.g. cDNA or genomic DNA) and RNA molecules (e.g. mRNA) and analogs of the DNA or RNA generated using nucleotide analogs. This term also encompasses untranslated sequence located at both the 3′ and 5′ ends of the coding region of the gene—at least about 1000 nucleotides of sequence upstream from the 5′ end of the coding region and at least about 200 nucleotides of sequence downstream from the 3′ end of the coding region of the gene. The nucleic acid molecule can be single-stranded or double-stranded, but preferably is double-stranded DNA.

[0697] An “isolated” nucleic acid molecule is one that is substantially separated from other nucleic acid molecules, which are present in the natural source of the nucleic acid. That means other nucleic acid molecules are present in an amount less than 5% based on weight of the amount of the desired nucleic acid, preferably less than 2% by weight, more preferably less than 1% by weight, most preferably less than 0.5% by weight. Preferably, an “isolated” nucleic acid is free of some of the sequences that naturally flank the nucleic acid (i.e., sequences located at the 5′ and 3′ ends of the nucleic acid) in the genomic DNA of the organism from which the nucleic acid is derived. For example, in various embodiments, the isolated Yield Increase Protein (YIP) encoding nucleic acid molecule can contain less than about 5 kb, 4 kb, 3 kb, 2 kb, 1 kb, 0.5 kb or 0.1 kb of nucleotide sequences which naturally flank the nucleic acid molecule in genomic DNA of the cell from which the nucleic acid is derived. Moreover, an “isolated” nucleic acid molecule, such as a cDNA molecule, can be free from some of the other cellular material with which it is naturally associated, or culture medium when produced by recombinant techniques, or chemical precursors or other chemicals when chemically synthesized.

[0698] A nucleic acid molecule of the present invention, e.g., a nucleic acid molecule encoding an YIP or a portion thereof which confers enhanced yield, e.g an improved yield-related trait, e.g. enhanced tolerance to abiotic environmental stress and/or increased yield like biomass in plants, can be isolated using standard molecular biological techniques and the sequence information provided herein. For example, an A. thaliana YIP encoding cDNA can be isolated from a A. thaliana c-DNA library or a Synechocystis sp., Brassica napus, Glycine max, Zea mays or Oryza sativa YIP encoding cDNA can be isolated from a Synechocystis sp., Brassica napus, Glycine max, Zea mays or Oryza sativa c-DNA library respectively using all or portion of one of the sequences shown in table I. Moreover, a nucleic acid molecule encompassing all or a portion of one of the sequences of table I can be isolated by the polymerase chain reaction using oligonucleotide primers designed based upon this sequence. For example, mRNA can be isolated from plant cells (e.g., by the guanidinium-thiocyanate extraction procedure of Chirgwin et al., Biochemistry 18, 5294 (1979)) and cDNA can be prepared using reverse transcriptase (e.g., Moloney MLV reverse transcriptase, available from Gibco/BRL, Bethesda, Md.; or AMV reverse transcriptase, available from Seikagaku America, Inc., St. Petersburg, Fla.). Synthetic oligonucleotide primers for polymerase chain reaction amplification can be designed based upon one of the nucleotide sequences shown in table I. A nucleic acid molecule of the invention can be amplified using cDNA or, alternatively, genomic DNA, as a template and appropriate oligonucleotide primers according to standard PCR amplification techniques. The nucleic acid molecule so amplified can be cloned into an appropriate vector and characterized by DNA sequence analysis. Furthermore, oligonucleotides corresponding to a YIP encoding nucleotide sequence can be prepared by standard synthetic techniques, e.g., using an automated DNA synthesizer.

[0699] In a preferred embodiment, an isolated nucleic acid molecule of the invention comprises one of the nucleotide sequences shown in table I encoding the YIP (i.e., the “coding region”), as well as 5′ untranslated sequences and 3′ untranslated sequences.

[0700] Moreover, the nucleic acid molecule of the invention can comprise only a portion of the coding region of one of the sequences of the nucleic acid of table I, for example, a fragment which can be used as a probe or primer or a fragment encoding a biologically active portion of a YIP.

[0701] Portions of proteins encoded by the YIP encoding nucleic acid molecules of the invention are preferably biologically active portions described herein. As used herein, the term “biologically active portion of” a YIP is intended to include a portion, e.g. a domain/motif, of Yield Increase Protein that participates in an enhanced tolerance to abiotic stress and/or increased yield in a plant. To determine whether a YIP, or a biologically active portion thereof, results in an enhanced tolerance to abiotic stress efficiency and/or increased yield in a plant, an analysis of a plant comprising the YIP may be performed. Such analysis methods are well known to those skilled in the art, as detailed in the Examples. More specifically, nucleic acid fragments encoding biologically active portions of a YIP can be prepared by isolating a portion of one of the sequences of the nucleic acid of table I expressing the encoded portion of the YIP or peptide (e.g., by recombinant expression in vitro) and assessing the activity of the encoded portion of the YIP or peptide.

[0702] Biologically active portions of a YIP are encompassed by the present invention and include peptides comprising amino acid sequences derived from the amino acid sequence of a YIP encoding gene, or the amino acid sequence of a protein homologous to a YIP, which include fewer amino acids than a full length YIP or the full length protein which is homologous to a YIP, and exhibits at least some enzymatic or biological activity of a YIP. Typically, biologically active portions (e.g., peptides which are, for example, 5, 10, 15, 20, 30, 35, 36, 37, 38, 39, 40, 50, 100 or more amino acids in length) comprise a domain or motif with at least one activity of a YIP. Moreover, other biologically active portions in which other regions of the protein are deleted, can be prepared by recombinant techniques and evaluated for one or more of the activities described herein. Preferably, the biologically active portions of a YIP include one or more selected domains/motifs or portions thereof having biological activity.

[0703] The term “biological active portion” or “biological activity” means a polypeptide as depicted in table II, column 3 or a portion of said polypeptide which still has at least 10% or 20%, preferably 30%, 40%, 50% or 60%, especially preferably 70%, 75%, 80%, 90% or 95% of the enzymatic or biological activity of the natural or starting enzyme or protein.

[0704] In the process according to the invention nucleic acid sequences can be used, which, if appropriate, contain synthetic, non-natural or modified nucleotide bases, which can be incorporated into DNA or RNA. Said synthetic, non-natural or modified bases can for example increase the stability of the nucleic acid molecule outside or inside a cell. The nucleic acid molecules of the invention can contain the same modifications as aforementioned.

[0705] As used in the present context the term “nucleic acid molecule” may also encompass the untranslated sequence located at the 3′ and at the 5′ end of the coding gene region, for example at least 500, preferably 200, especially preferably 100, nucleotides of the sequence upstream of the 5′ end of the coding region and at least 100, preferably 50, especially preferably 20, nucleotides of the sequence downstream of the 3′ end of the coding gene region. It is often advantageous only to choose the coding region for cloning and expression purposes.

[0706] Preferably, the nucleic acid molecule used in the process according to the invention or the nucleic acid molecule of the invention is an isolated nucleic acid molecule.

[0707] An “isolated” polynucleotide or nucleic acid molecule is separated from other polynucleotides or nucleic acid molecules, which are present in the natural source of the nucleic acid molecule. An isolated nucleic acid molecule may be a chromosomal fragment of several kb, or preferably, a molecule only comprising the coding region of the gene. Accordingly, an isolated nucleic acid molecule of the invention may comprise chromosomal regions, which are adjacent 5′ and 3′ or further adjacent chromosomal regions, but preferably comprises no such sequences which naturally flank the nucleic acid molecule sequence in the genomic or chromosomal context in the organism from which the nucleic acid molecule originates (for example sequences which are adjacent to the regions encoding the 5′- and 3′-UTRs of the nucleic acid molecule). In various embodiments, the isolated nucleic acid molecule used in the process according to the invention may, for example comprise less than approximately 5 kb, 4 kb, 3 kb, 2 kb, 1 kb, 0.5 kb or 0.1 kb nucleotide sequences which naturally flank the nucleic acid molecule in the genomic DNA of the cell from which the nucleic acid molecule originates.

[0708] The nucleic acid molecules used in the process, for example the polynucleotide of the invention or of a part thereof can be isolated using molecular-biological standard techniques and the sequence information provided herein. Also, for example a homologous sequence or homologous, conserved sequence regions at the DNA or amino acid level can be identified with the aid of comparison algorithms. The former can be used as hybridization probes under standard hybridization techniques (for example those described in Sambrook et al., Molecular Cloning: A Laboratory Manual. 2nd Ed., Cold Spring Harbor Laboratory, Cold Spring Harbor Laboratory Press, Cold Spring Harbor, N.Y., 1989) for isolating further nucleic acid sequences useful in this process.

[0709] A nucleic acid molecule encompassing a complete sequence of the nucleic acid molecules used in the process, for example the polynucleotide of the invention, or a part thereof may additionally be isolated by polymerase chain reaction, oligonucleotide primers based on this sequence or on parts thereof being used. For example, a nucleic acid molecule comprising the complete sequence or part thereof can be isolated by polymerase chain reaction using oligonucleotide primers which have been generated on the basis of this very sequence. For example, mRNA can be isolated from cells (for example by means of the guanidinium thiocyanate extraction method of Chirgwin et al., Biochemistry 18, 5294(1979)) and cDNA can be generated by means of reverse transcriptase (for example Moloney MLV reverse transcriptase, available from Gibco/BRL, Bethesda, Md., or AMV reverse transcriptase, obtainable from Seikagaku America, Inc., St.Petersburg, Fla.).

[0710] Synthetic oligonucleotide primers for the amplification, e.g. as shown in table III, column 7, by means of polymerase chain reaction can be generated on the basis of a sequence shown herein, for example the sequence shown in table I, columns 5 and 7 or the sequences derived from table II, columns 5 and 7.

[0711] Moreover, it is possible to identify conserved protein by carrying out protein sequence alignments with the polypeptide encoded by the nucleic acid molecules of the present invention, in particular with the sequences encoded by the nucleic acid molecule shown in column 5 or 7 of table I, from which conserved regions, and in turn, degenerate primers can be derived.

[0712] Conserved regions are those, which show a very little variation in the amino acid in one particular position of several homologs from different origin. The consensus sequence and polypeptide motifs shown in column 7 of table IV, are derived from said alignments. Moreover, it is possible to identify conserved regions from various organisms by carrying out protein sequence alignments with the polypeptide encoded by the nucleic acid of the present invention, in particular with the sequences encoded by the polypeptide molecule shown in column 5 or 7 of table II, from which conserved regions, and in turn, degenerate primers can be derived.

[0713] In one advantageous embodiment, in the method of the present invention the activity of a polypeptide is increased comprising or consisting of a consensus sequence or a polypeptide motif shown in table IV, column 7 and in one another embodiment, the present invention relates to a polypeptide comprising or consisting of a consensus sequence or a polypeptide motif shown in table IV, column 7 whereby less than 20, preferably less than 15 or 10, preferably less than 9, 8, 7, or 6, more preferred less than 5 or 4, even more preferred less then 3, even more preferred less then 2, even more preferred 0 of the amino acids positions indicated can be replaced by any amino acid. In one embodiment not more than 15%, preferably 10%, even more preferred 5%, 4%, 3%, or 2%, most preferred 1% or 0% of the amino acid position indicated by a letter are/is replaced another amino acid. In one embodiment less than 20, preferably less than 15 or 10, preferably less than 9, 8, 7, or 6, more preferred less than 5 or 4, even more preferred less than 3, even more preferred less than 2, even more preferred 0 amino acids are inserted into a consensus sequence or protein motif.

[0714] The consensus sequence was derived from a multiple alignment of the sequences as listed in table II. The letters represent the one letter amino acid code and indicate that the amino acids are conserved in at least 80% of the aligned proteins. The letter X stands for amino acids, which are not conserved in at least 80% of the sequences. In one example, in the cases where only a small selected subset of amino acids are possible at a certain position these amino acids are given in brackets. The number of given X indicates the distances between conserved amino acid residues, e.g. Y-x(21,23)-F means that conserved tyrosine and phenylalanine residues are separated from each other by minimum 21 and maximum 23 amino acid residues in all investigated sequences.

[0715] Conserved domains were identified from all sequences and are described using a subset of the standard Prosite notation, e.g. the pattern Y-x(21,23)-[FW] means that a conserved tyrosine is separated by minimum 21 and maximum 23 amino acid residues from either a phenylalanine or tryptophane.

[0716] Conserved patterns were identified with the software tool MEME version 3.5.1 or manually. MEME was developed by Timothy L. Bailey and Charles Elkan, Dept. of Computer Science and Engeneering, University of California, San Diego, USA and is described by Timothy L. Bailey and Charles Elkan (Fitting a mixture model by expectation maximization to discover motifs in biopolymers, Proceedings of the Second International Conference on Intelligent Systems for Molecular Biology, pp. 28-36, AAAI Press, Menlo Park, Calif., 1994). The source code for the stand-alone program is public available from the San Diego Supercomputer center (http://meme.sdsc.edu).

[0717] For identifying common motifs in all sequences with the software tool MEME, the following settings were used: -maxsize 500000, -nmotifs 15, -evt 0.001, -maxw 60, -distance 1e-3, -minsites number of sequences used for the analysis. Input sequences for MEME were non-aligned sequences in Fasta format. Other parameters were used in the default settings in this software version.

[0718] Prosite patterns for conserved domains were generated with the software tool Pratt version 2.1 or manually. Pratt was developed by Inge Jonassen, Dept. of Informatics, University of Bergen, Norway and is described by Jonassen et al. (I. Jonassen, J. F. Collins and D. G. Higgins, Finding flexible patterns in unaligned protein sequences, Protein Science 4 (1995), pp. 1587-1595; I. Jonassen, Efficient discovery of conserved patterns using a pattern graph, Submitted to CABIOS Febr. 1997]. The source code (ANSI C) for the stand-alone program is public available, e.g. at established bioinformatic centres like EBI (European Bioinformatics Institute).

[0719] For generating patterns with the software tool Pratt, following settings were used: PL (max Pattern Length): 100, PN (max Nr of Pattern Symbols): 100, PX (max Nr of consecutive x's): 30, FN (max Nr of flexible spacers): 5, FL (max Flexibility): 30, FP (max Flex.Product): 10, ON (max number patterns): 50. Input sequences for Pratt were distinct regions of the protein sequences exhibiting high similarity as identified from software tool MEME. The minimum number of sequences, which have to match the generated patterns (CM, min Nr of Seqs to Match) was set to at least 80% of the provided sequences. Parameters not mentioned here were used in their default settings.

[0720] The Prosite patterns of the conserved domains can be used to search for protein sequences matching this pattern. Various established Bioinformatics centres provide public internet portals for using those patterns in database searches (e.g. PIR (Protein Information Resource, located at Georgetown University Medical Center) or ExPASy (Expert Protein Analysis System)). Alternatively, stand-alone software is available, like the program Fuzzpro, which is part of the EMBOSS software package. For example, the program Fuzzpro not only allows to search for an exact pattern-protein match but also allows to set various ambiguities in the performed search.

[0721] The alignment was performed with the software ClustalW (version 1.83) and is described by Thompson et al. (Nucleic Acids Research 22, 4673 (1994)). The source code for the stand-alone program is public available from the European Molecular Biology Laboratory; Heidelberg, Germany. The analysis was performed using the default parameters of ClustalW v1.83 (gap open penalty: 10.0; gap extension penalty: 0.2; protein matrix: Gonnet; protein/DNA endgap: −1; protein/DNA gapdist: 4).

[0722] Degenerated primers can then be utilized by PCR for the amplification of fragments of novel proteins having above-mentioned activity, e.g. conferring the enhanced yield, e.g an improved yield-related trait, e.g. enhanced tolerance to abiotic environmental stress and/or increased yield like biomass as compared to a corresponding, e.g. non-transformed, wild type plant cell, plant or part thereof after increasing the expression or activity or having the activity of a protein as shown in table II, column 3 or further functional homologs of the polypeptide of the invention from other organisms.

[0723] These fragments can then be utilized as hybridization probe for isolating the complete gene sequence. As an alternative, the missing 5′ and 3′ sequences can be isolated by means of RACE-PCR. A nucleic acid molecule according to the invention can be amplified using cDNA or, as an alternative, genomic DNA as template and suitable oligonucleotide primers, following standard PCR amplification techniques. The nucleic acid molecule amplified thus can be cloned into a suitable vector and characterized by means of DNA sequence analysis. Oligonucleotides, which correspond to one of the nucleic acid molecules used in the process can be generated by standard synthesis methods, for example using an automatic DNA synthesizer.

[0724] Nucleic acid molecules which are advantageously for the process according to the invention can be isolated based on their homology to the nucleic acid molecules disclosed herein using the sequences or part thereof as hybridization probe and following standard hybridization techniques under stringent hybridization conditions. In this context, it is possible to use, for example, isolated nucleic acid molecules of at least 15, 20, 25, 30, 35, 40, 50, 60 or more nucleotides, preferably of at least 15, 20 or 25 nucleotides in length which hybridize under stringent conditions with the above-described nucleic acid molecules, in particular with those which encompass a nucleotide sequence of the nucleic acid molecule used in the process of the invention or encoding a protein used in the invention or of the nucleic acid molecule of the invention. Nucleic acid molecules with 30, 50, 100, 250 or more nucleotides may also be used.

[0725] The term “homology” means that the respective nucleic acid molecules or encoded proteins are functionally and/or structurally equivalent. The nucleic acid molecules that are homologous to the nucleic acid molecules described above and that are derivatives of said nucleic acid molecules are, for example, variations of said nucleic acid molecules which represent modifications having the same biological function, in particular encoding proteins with the same or substantially the same biological function. They may be naturally occurring variations, such as sequences from other plant varieties or species, or mutations. These mutations may occur naturally or may be obtained by mutagenesis techniques. The allelic variations may be naturally occurring allelic variants as well as synthetically produced or genetically engineered variants. Structurally equivalents can, for example, be identified by testing the binding of said polypeptide to antibodies or computer based predictions. Structurally equivalent have the similar immunological characteristic, e.g. comprise similar epitopes.

[0726] By “hybridizing” it is meant that such nucleic acid molecules hybridize under conventional hybridization conditions, preferably under stringent conditions such as described by, e.g., Sambrook (Molecular Cloning; A Laboratory Manual, 2^{nd} Edition, Cold Spring Harbor Laboratory Press, Cold Spring Harbor, N.Y. (1989)) or in Current Protocols in Molecular Biology, John Wiley & Sons, N. Y. (1989), 6.3.1-6.3.6.

[0727] According to the invention, DNA as well as RNA molecules of the nucleic acid of the invention can be used as probes. Further, as template for the identification of functional homologues Northern blot assays as well as Southern blot assays can be performed. The Northern blot assay advantageously provides further information about the expressed gene product: e.g. expression pattern, occurrence of processing steps, like splicing and capping, etc. The Southern blot assay provides additional information about the chromosomal localization and organization of the gene encoding the nucleic acid molecule of the invention.

[0728] A preferred, non-limiting example of stringent hybridisation conditions are hybridizations in 6× sodium chloride/sodium citrate (=SSC) at approximately 45° C., followed by one or more wash steps in 0.2×SSC, 0.1% SDS at 50 to 65° C., for example at 50° C., 55° C. or 60° C. The skilled worker knows that these hybridization conditions differ as a function of the type of the nucleic acid and, for example when organic solvents are present, with regard to the temperature and concentration of the buffer. The temperature under “standard hybridization conditions” differs for example as a function of the type of the nucleic acid between 42° C. and 58° C., preferably between 45° C. and 50° C. in an aqueous buffer with a concentration of 0.1×, 0.5×, 1×, 2×, 3×, 4× or 5×SSC (pH 7.2). If organic solvent(s) is/are present in the abovementioned buffer, for example 50% formamide, the temperature under standard conditions is approximately 40° C., 42° C. or 45° C. The hybridization conditions for DNA:DNA hybrids are preferably for example 0.1×SSC and 20° C., 25° C., 30° C., 35° C., 40° C. or 45° C., preferably between 30° C. and 45° C. The hybridization conditions for DNA:RNA hybrids are preferably for example 0.1×SSC and 30° C., 35° C., 40° C., 45° C., 50° C. or 55° C., preferably between 45° C. and 55° C. The abovementioned hybridization temperatures are determined for example for a nucleic acid approximately 100 by (=base pairs) in length and a G+C content of 50% in the absence of formamide. The skilled worker knows to determine the hybridization conditions required with the aid of textbooks, for example the ones mentioned above, or from the following textbooks: Sambrook et al., “Molecular Cloning”, Cold Spring Harbor Laboratory, 1989; Hames and Higgins (Ed.) 1985, “Nucleic Acids Hybridization: A Practical Approach”, IRL Press at Oxford University Press, Oxford; Brown (Ed.) 1991, “Essential Molecular Biology: A Practical Approach”, IRL Press at Oxford University Press, Oxford.

[0729] A further example of one such stringent hybridization condition is hybridization at 4×SSC at 65° C., followed by a washing in 0.1×SSC at 65° C. for one hour. Alternatively, an exemplary stringent hybridization condition is in 50% formamide, 4×SSC at 42° C. Further, the conditions during the wash step can be selected from the range of conditions delimited by low-stringency conditions (approximately 2×SSC at 50° C.) and high-stringency conditions (approximately 0.2×SSC at 50° C., preferably at 65° C.) (20×SSC: 0.3 M sodium citrate, 3 M NaCl, pH 7.0). In addition, the temperature during the wash step can be raised from low-stringency conditions at room temperature, approximately 22° C., to higher-stringency conditions at approximately 65° C. Both of the parameters salt concentration and temperature can be varied simultaneously, or else one of the two parameters can be kept constant while only the other is varied. Denaturants, for example formamide or SDS, may also be employed during the hybridization. In the presence of 50% formamide, hybridization is preferably effected at 42° C. Relevant factors like 1) length of treatment, 2) salt conditions, 3) detergent conditions, 4) competitor DNA, 5) temperature and 6) probe selection can be combined case by case so that not all possibilities can be mentioned herein.

[0730] Thus, in a preferred embodiment, Northern blots are prehybridized with Rothi-Hybri-Quick buffer (Roth, Karlsruhe) at 68° C. for 2 h. Hybridzation with radioactive labelled probe is done overnight at 68° C. Subsequent washing steps are performed at 68° C. with 1×SSC.

[0731] For Southern blot assays the membrane is prehybridized with Rothi-Hybri-Quick buffer (Roth, Karlsruhe) at 68° C. for 2 h. The hybridzation with radioactive labelled probe is conducted over night at 68° C. Subsequently the hybridization buffer is discarded and the filter shortly washed using 2×SSC; 0.1% SDS. After discarding the washing buffer new 2×SSC; 0.1% SDS buffer is added and incubated at 68° C. for 15 minutes. This washing step is performed twice followed by an additional washing step using 1×SSC; 0.1% SDS at 68° C. for 10 min.

[0732] Some examples of conditions for DNA hybridization (Southern blot assays) and wash step are shown herein below:
[0733] (1) Hybridization conditions can be selected, for example, from the following conditions:

[0734] (a) 4×SSC at 65° C.,

[0735] (b) 6×SSC at 45° C.,

[0736] (c) 6×SSC, 100 mg/ml denatured fragmented fish sperm DNA at 68° C.,

[0737] (d) 6×SSC, 0.5% SDS, 100 mg/ml denatured salmon sperm DNA at 68° C.,

[0738] (e) 6×SSC, 0.5% SDS, 100 mg/ml denatured fragmented salmon sperm DNA, 50% formamide at 42° C.,

[0739] (f) 50% formamide, 4×SSC at 42° C.,

[0740] (g) 50% (v/v) formamide, 0.1% bovine serum albumin, 0.1% Ficoll, 0.1% polyvinylpyrrolidone, 50 mM sodium phosphate buffer pH 6.5, 750 mM NaCl, 75 mM sodium citrate at 42° C.,

[0741] (h) 2× or 4×SSC at 50° C. (low-stringency condition), or

[0742] (i) 30 to 40% formamide, 2× or 4×SSC at 42° C. (low-stringency condition).
[0743] (2) Wash steps can be selected, for example, from the following conditions:

[0744] (a) 0.015 M NaCl/0.0015 M sodium citrate/0.1% SDS at 50° C.

[0745] (b) 0.1×SSC at 65° C.

[0746] (c) 0.1×SSC, 0.5% SDS at 68° C.

[0747] (d) 0.1×SSC, 0.5% SDS, 50% formamide at 42° C.

[0748] (e) 0.2×SSC, 0.1% SDS at 42° C.

[0749] (f) 2×SSC at 65° C. (low-stringency condition).

[0750] Polypeptides having above-mentioned activity, i.e. conferring increased yield, e.g an improved yield-related trait, e.g. enhanced tolerance to abiotic environmental stress and/or increased yield like biomass as compared to a corresponding, e.g. non-transformed, wild type plant cell, plant or part thereof, derived from other organisms, can be encoded by other DNA sequences which hybridize to the sequences shown in table I, columns 5 and 7 under relaxed hybridization conditions and which code on expression for peptides conferring the enhanced cold tolerance. and/or increased yield, as compared to a corresponding, e.g. non-transformed, wild type plant cell, plant or part thereof.

[0751] Further, some applications have to be performed at low stringency hybridization conditions, without any consequences for the specificity of the hybridization. For example, a Southern blot analysis of total DNA could be probed with a nucleic acid molecule of the present invention and washed at low stringency (55° C. in 2× SSPE, 0.1% SDS). The hybridization analysis could reveal a simple pattern of only genes encoding polypeptides of the present invention or used in the process of the invention, e.g. having the herein-mentioned activity of enhancing the tolerance to abiotic environmental stress and/or increasing the yield as compared to a corresponding, e.g. non-transformed, wild type plant cell, plant or part thereof. A further example of such low-stringent hybridization conditions is 4×SSC at 50° C. or hybridization with 30 to 40% formamide at 42° C. Such molecules comprise those which are fragments, analogues or derivatives of the polypeptide of the invention or used in the process of the invention and differ, for example, by way of amino acid and/or nucleotide deletion(s), insertion(s), substitution (s), addition(s) and/or recombination (s) or any other modification(s) known in the art either alone or in combination from the above-described amino acid sequences or their underlying nucleotide sequence(s). However, it is preferred to use high stringency hybridization conditions.

[0752] Hybridization should advantageously be carried out with fragments of at least 5, 10, 15, 20, 25, 30, 35 or 40 bp, advantageously at least 50, 60, 70 or 80 bp, preferably at least 90, 100 or 110 bp. Most preferably are fragments of at least 15, 20, 25 or 30 bp. Preferably are also hybridizations with at least 100 bp or 200, very especially preferably at least 400 bp in length. In an especially preferred embodiment, the hybridization should be carried out with the entire nucleic acid sequence with conditions described above.

[0753] The terms “fragment”, “fragment of a sequence” or “part of a sequence” mean a truncated sequence of the original sequence referred to. The truncated sequence (nucleic acid or protein sequence) can vary widely in length; the minimum size being a sequence of sufficient size to provide a sequence with at least a comparable function and/or activity of the original sequence referred to or hybidizing with the nucleic acid molecule of the invention or used in the process of the invention under stringend conditions, while the maximum size is not critical. In some applications, the maximum size usually is not substantially greater than that required to provide the desired activity and/or function(s) of the original sequence.

[0754] Typically, the truncated amino acid sequence will range from about 5 to about 310 amino acids in length. More typically, however, the sequence will be a maximum of about 250 amino acids in length, preferably a maximum of about 200 or 100 amino acids. It is usually desirable to select sequences of at least about 10, 12 or 15 amino acids, up to a maximum of about 20 or 25 amino acids.

[0755] The term “epitope” relates to specific immunoreactive sites within an antigen, also known as antigenic determinates. These epitopes can be a linear array of monomers in a polymeric composition—such as amino acids in a protein—or consist of or comprise a more complex secondary or tertiary structure. Those of skill will recognize that immunogens (i.e., substances capable of eliciting an immune response) are antigens; however, some antigen, such as haptens, are not immunogens but may be made immunogenic by coupling to a carrier molecule. The term “antigen” includes references to a substance to which an antibody can be generated and/or to which the antibody is specifically immunoreactive.

[0756] In one embodiment the present invention relates to a epitope of the polypeptide of the present invention or used in the process of the present invention and confers an enhanced tolerance to abiotic environmental stress and/or an increased yield as compared to a corresponding, e.g. non-transformed, wild type plant cell, plant or part thereof.

[0757] The term “one or several amino acids” relates to at least one amino acid but not more than that number of amino acids, which would result in a homology of below 50% identity. Preferably, the identity is more than 70% or 80%, more preferred are 85%, 90%, 91%, 92%, 93%, 94% or 95%, even more preferred are 96%, 97%, 98%, or 99% identity.

[0758] Further, the nucleic acid molecule of the invention comprises a nucleic acid molecule, which is a complement of one of the nucleotide sequences of above mentioned nucleic acid molecules or a portion thereof. A nucleic acid molecule which is complementary to one of the nucleotide sequences shown in table I, columns 5 and 7 is one which is sufficiently complementary to one of the nucleotide sequences shown in table I, columns 5 and 7 such that it can hybridize to one of the nucleotide sequences shown in table I, columns 5 and 7, thereby forming a stable duplex. Preferably, the hybridization is performed under stringent hybrization conditions. However, a complement of one of the herein disclosed sequences is preferably a sequence complement thereto according to the base pairing of nucleic acid molecules well known to the skilled person. For example, the bases A and G undergo base pairing with the bases T and U or C, resp. and visa versa. Modifications of the bases can influence the base-pairing partner.

[0759] The nucleic acid molecule of the invention comprises a nucleotide sequence which is at least about 30%, 35%, 40% or 45%, preferably at least about 50%, 55%, 60% or 65%, more preferably at least about 70%, 80%, or 90%, and even more preferably at least about 95%, 97%, 98%, 99% or more homologous to a nucleotide sequence shown in table I, columns 5 and 7, or a portion thereof and preferably has above mentioned activity, in particular having a tolerance to abiotic environmental stress enhancing activity and/or yield increasing activity after increasing the acitivity or an activity of a gene product as shown in table II, column 3 by for example expression either in the cytsol or in an organelle such as a plastid or mitochondria or both, preferably in plastids.

[0760] The nucleic acid molecule of the invention comprises a nucleotide sequence which hybridizes, preferably hybridizes under stringent conditions as defined herein, to one of the nucleotide sequences shown in table I, columns 5 and 7, or a portion thereof and encodes a protein having above-mentioned activity, e.g. conferring an enhanced yield, e.g an improved yield-related trait, e.g. enhanced tolerance to abiotic environmental stress and/or increased yield like biomass as compared to a corresponding, e.g. non-transformed, wild type plant cell, plant or part thereof by for example expression either in the cytsol or in an organelle such as a plastid or mitochondria or both, preferably in plastids, and optionally, the activity selected from the group consisting of 30S ribosomal protein S11, 60S ribosomal protein, Adaptin medium chain homolog APM2, B0252-protein, BRICK1-like protein, Cav1 protein, Chloroplast chaperonin, DNA polymerase, flagellar protein, G2/mitotic-specific cyclin, GRE1-protein(Hydrophilin), Membrane protein, ORF YPL249c-a, RNA polymerase II holoenzyme cyclin-like subunit, Serine/threonine-protein kinase, Short chain dehydrogenase, Sterol-C-methyltransferase, transcription regulator (farR), Ykr015c-protein, and YPL167C_{—}2-protein.

[0761] Moreover, the nucleic acid molecule of the invention can comprise only a portion of the coding region of one of the sequences shown in table I, columns 5 and 7, for example a fragment which can be used as a probe or primer or a fragment encoding a biologically active portion of the polypeptide of the present invention or of a polypeptide used in the process of the present invention, i.e. having above-mentioned activity, e.g.conferring an enhanced tolerance to abiotic environmental stress and/or yield as compared to a corresponding, e.g. non-transformed, wild type plant cell, plant or part thereof f its activity is increased by for example expression either in the cytsol or in an organelle such as a plastid or mitochondria or both, preferably in plastids. The nucleotide sequences determined from the cloning of the present protein-according-to-the-invention-encoding gene allows for the generation of probes and primers designed for use in identifying and/or cloning its homologues in other cell types and organisms. The probe/primer typically comprises substantially purified oligonucleotide. The oligonucleotide typically comprises a region of nucleotide sequence that hybridizes under stringent conditions to at least about 12, 15 preferably about 20 or 25, more preferably about 40, 50 or 75 consecutive nucleotides of a sense strand of one of the sequences set forth, e.g., in table I, columns 5 and 7, an anti-sense sequence of one of the sequences, e.g., set forth in table I, columns 5 and 7, or naturally occurring mutants thereof. Primers based on a nucleotide of invention can be used in PCR reactions to clone homologues of the polypeptide of the invention or of the polypeptide used in the process of the invention, e.g. as the primers described in the examples of the present invention, e.g. as shown in the examples. A PCR with the primers shown in table III, column 7 will result in a fragment of the gene product as shown in table II, column 3.

[0762] Primer sets are interchangable. The person skilled in the art knows to combine said primers to result in the desired product, e.g. in a full length clone or a partial sequence. Probes based on the sequences of the nucleic acid molecule of the invention or used in the process of the present invention can be used to detect transcripts or genomic sequences encoding the same or homologous proteins. The probe can further comprise a label group attached thereto, e.g. the label group can be a radioisotope, a fluorescent compound, an enzyme, or an enzyme co-factor. Such probes can be used as a part of a genomic marker test kit for identifying cells which express an polypepetide of the invention or used in the process of the present invention, such as by measuring a level of an encoding nucleic acid molecule in a sample of cells, e.g., detecting mRNA levels or determining, whether a genomic gene comprising the sequence of the polynucleotide of the invention or used in the processs of the present invention has been mutated or deleted.

[0763] The nucleic acid molecule of the invention encodes a polypeptide or portion thereof which includes an amino acid sequence which is sufficiently homologous to the amino acid sequence shown in table II, columns 5 and 7 such that the protein or portion thereof maintains the ability to participate in the enhancement of tolerance to abiotic environmental stress and/or increase of yield as compared to a corresponding, e.g. non-transformed, wild type plant cell, plant or part thereof, in particular increasing the activity as mentioned above or as described in the examples in plants is comprised.

[0764] As used herein, the language “sufficiently homologous” refers to proteins or portions thereof which have amino acid sequences which include a minimum number of identical or equivalent amino acid residues (e.g., an amino acid residue which has a similar side chain as an amino acid residue in one of the sequences of the polypeptide of the present invention) to an amino acid sequence shown in table II, columns 5 and 7 such that the protein or portion thereof is able to participate in the enhanced tolerance to abiotic environmental stress and/or increase of yield as compared to a corresponding, e.g. non-transformed, wild type plant cell, plant or part thereof. For examples having the activity of a protein as shown in table II, column 3 and as described herein.

[0765] In one embodiment, the nucleic acid molecule of the present invention comprises a nucleic acid that encodes a portion of the protein of the present invention. The protein is at least about 30%, 35%, 40%, 45% or 50%, preferably at least about 55%, 60%, 65% or 70%, and more preferably at least about 75%, 80%, 85%, 90%, 91%, 92%, 93% or 94% and most preferably at least about 95%, 97%, 98%, 99% or more homologous to an entire amino acid sequence of table II, columns 5 and 7 and having above-mentioned activity, e.g. conferring an enhanced yield, e.g an improved yield-related trait, e.g. enhanced tolerance to abiotic environmental stress and/or increased yield like biomass as compared to a corresponding, e.g. non-transformed, wild type plant cell, plant or part thereof by for example expression either in the cytsol or in an organelle such as a plastid or mitochondria or both, preferably in plastids.

[0766] Portions of proteins encoded by the nucleic acid molecule of the invention are preferably biologically active, preferably having above-mentioned annotated activity, e.g. conferring an enhanced tolerance to abiotic environmental stress and/or increase in yield as compared to a corresponding, e.g. non-transformed, wild type plant cell, plant or part thereof after increase of activity.

[0767] As mentioned herein, the term “biologically active portion” is intended to include a portion, e.g., a domain/motif, that confers an enhanced tolerance to abiotic environmental stress and/or increase in yield as compared to a corresponding, e.g. non-transformed, wild type plant cell, plant or part thereof or has an immunological activity such that it is binds to an antibody binding specifially to the polypeptide of the present invention or a polypeptide used in the process of the present invention for an enhanced yield, e.g an improved yield-related trait, e.g. enhanced tolerance to abiotic environmental stress and/or increased yield like biomass as compared to a corresponding, e.g. non-transformed, wild type plant cell, plant or part thereof.

[0768] The invention further relates to nucleic acid molecules that differ from one of the nucleotide sequences shown in table I A, columns 5 and 7 (and portions thereof) due to degeneracy of the genetic code and thus encode a polypeptide of the present invention, in particular a polypeptide having above mentioned activity, e.g. as that polypeptides depicted by the sequence shown in table II, columns 5 and 7 or the functional homologues. Advantageously, the nucleic acid molecule of the invention comprises, or in an other embodiment has, a nucleotide sequence encoding a protein comprising, or in an other embodiment having, an amino acid sequence shown in table II, columns 5 and 7 or the functional homologues. In a still further embodiment, the nucleic acid molecule of the invention encodes a full length protein which is substantially homologous to an amino acid sequence shown in table II, columns 5 and 7 or the functional homologues. However, in a preferred embodiment, the nucleic acid molecule of the present invention does not consist of the sequence shown in table I, preferably table IA, columns 5 and 7.

[0769] In addition, it will be appreciated by those skilled in the art that DNA sequence polymorphisms that lead to changes in the amino acid sequences may exist within a population. Such genetic polymorphism in the gene encoding the polypeptide of the invention or comprising the nucleic acid molecule of the invention may exist among individuals within a population due to natural variation.

[0770] As used herein, the terms “gene” and “recombinant gene” refer to nucleic acid molecules comprising an open reading frame encoding the polypeptide of the invention or comprising the nucleic acid molecule of the invention or encoding the polypeptide used in the process of the present invention, preferably from a crop plant or from a microorgansim useful for the method of the invention. Such natural variations can typically result in 1 to 5% variance in the nucleotide sequence of the gene. Any and all such nucleotide variations and resulting amino acid polymorphisms in genes encoding a polypeptide of the invention or comprising a the nucleic acid molecule of the invention that are the result of natural variation and that do not alter the functional activity as described are intended to be within the scope of the invention.

[0771] Nucleic acid molecules corresponding to natural variants homologues of a nucleic acid molecule of the invention, which can also be a cDNA, can be isolated based on their homology to the nucleic acid molecules disclosed herein using the nucleic acid molecule of the invention, or a portion thereof, as a hybridization probe according to standard hybridization techniques under stringent hybridization conditions.

[0772] Accordingly, in another embodiment, a nucleic acid molecule of the invention is at least 15, 20, 25 or 30 nucleotides in length. Preferably, it hybridizes under stringent conditions to a nucleic acid molecule comprising a nucleotide sequence of the nucleic acid molecule of the present invention or used in the process of the present invention, e.g. comprising the sequence shown in table I, columns 5 and 7. The nucleic acid molecule is preferably at least 20, 30, 50, 100, 250 or more nucleotides in length.

[0773] The term “hybridizes under stringent conditions” is defined above. In one embodiment, the term “hybridizes under stringent conditions” is intended to describe conditions for hybridization and washing under which nucleotide sequences at least 30%, 40%, 50% or 65% identical to each other typically remain hybridized to each other. Preferably, the conditions are such that sequences at least about 70%, more preferably at least about 75% or 80%, and even more preferably at least about 85%, 90% or 95% or more identical to each other typically remain hybridized to each other.

[0774] Preferably, nucleic acid molecule of the invention that hybridizes under stringent conditions to a sequence shown in table I, columns 5 and 7 corresponds to a naturally-occurring nucleic acid molecule of the invention. As used herein, a “naturally-occurring” nucleic acid molecule refers to an RNA or DNA molecule having a nucleotide sequence that occurs in nature (e.g., encodes a natural protein). Preferably, the nucleic acid molecule encodes a natural protein having above-mentioned activity, e.g. conferring increased yield, e.g an improved yield-related trait, e.g. enhanced tolerance to abiotic environmental stress and/or increased yield like biomass after increasing the expression or activity thereof or the activity of a protein of the invention or used in the process of the invention by for example expression the nucleic acid sequence of the gene product in the cytsol and/or in an organelle such as a plastid or mitochondria, preferably in plastids.

[0775] In addition to naturally-occurring variants of the sequences of the polypeptide or nucleic acid molecule of the invention as well as of the polypeptide or nucleic acid molecule used in the process of the invention that may exist in the population, the skilled artisan will further appreciate that changes can be introduced by mutation into a nucleotide sequence of the nucleic acid molecule encoding the polypeptide of the invention or used in the process of the present invention, thereby leading to changes in the amino acid sequence of the encoded said polypeptide, without altering the functional ability of the polypeptide, preferably not decreasing said activity.

[0776] For example, nucleotide substitutions leading to amino acid substitutions at “non-essential” amino acid residues can be made in a sequence of the nucleic acid molecule of the invention or used in the process of the invention, e.g. shown in table I, columns 5 and 7.

[0777] A “non-essential” amino acid residue is a residue that can be altered from the wild-type sequence of one without altering the activity of said polypeptide, whereas an “essential” amino acid residue is required for an activity as mentioned above, e.g. leading to an enhancement of tolerance to abiotic environmental stress and/or increase of yield as compared to a corresponding, e.g. non-transformed, wild type plant cell, plant or part thereof in an organism after an increase of activity of the polypeptide. Other amino acid residues, however, (e.g., those that are not conserved or only semi-conserved in the domain having said activity) may not be essential for activity and thus are likely to be amenable to alteration without altering said activity.

[0778] Further, a person skilled in the art knows that the codon usage between organisms can differ. Therefore, he may adapt the codon usage in the nucleic acid molecule of the present invention to the usage of the organism or the cell compartment for example of the plastid or mitochondria in which the polynucleotide or polypeptide is expressed.

[0779] Accordingly, the invention relates to nucleic acid molecules encoding a polypeptide having above-mentioned activity, in an organisms or parts thereof by for example expression either in the cytsol or in an organelle such as a plastid or mitochondria or both, preferably in plastids that contain changes in amino acid residues that are not essential for said activity. Such polypeptides differ in amino acid sequence from a sequence contained in the sequences shown in table II, columns 5 and 7 yet retain said activity described herein. The nucleic acid molecule can comprise a nucleotide sequence encoding a polypeptide, wherein the polypeptide comprises an amino acid sequence at least about 50% identical to an amino acid sequence shown in table II, columns 5 and 7 and is capable of participation in the enhancement of tolerance to abiotic environmental stress and/or increase of yield as compared to a corresponding, e.g. non-transformed, wild type plant cell, plant or part thereof after increasing its activity, e.g. its expression by for example expression either in the cytsol or in an organelle such as a plastid or mitochondria or both, preferably in plastids. Preferably, the protein encoded by the nucleic acid molecule is at least about 60% identical to the sequence shown in table II, columns 5 and 7, more preferably at least about 70% identical to one of the sequences shown in table II, columns 5 and 7, even more preferably at least about 80%, 90%, 95% homologous to the sequence shown in table II, columns 5 and 7, and most preferably at least about 96%, 97%, 98%, or 99% identical to the sequence shown in table II, columns 5 and 7.

[0780] To determine the percentage homology (=identity, herein used interchangeably) of two amino acid sequences or of two nucleic acid molecules, the sequences are written one underneath the other for an optimal comparison (for example gaps may be inserted into the sequence of a protein or of a nucleic acid in order to generate an optimal alignment with the other protein or the other nucleic acid).

[0781] The amino acid residues or nucleic acid molecules at the corresponding amino acid positions or nucleotide positions are then compared. If a position in one sequence is occupied by the same amino acid residue or the same nucleic acid molecule as the corresponding position in the other sequence, the molecules are homologous at this position (i.e. amino acid or nucleic acid “homology” as used in the present context corresponds to amino acid or nucleic acid “identity”. The percentage homology between the two sequences is a function of the number of identical positions shared by the sequences (i.e. % homology=number of identical positions/total number of positions×100). The terms “homology” and “identity” are thus to be considered as synonyms.

[0782] For the determination of the percentage homology (=identity) of two or more amino acids or of two or more nucleotide sequences several computer software programs have been developed. The homology of two or more sequences can be calculated with for example the software fasta, which presently has been used in the version fasta 3 (W. R. Pearson and D. J. Lipman, PNAS 85, 2444(1988); W. R. Pearson, Methods in Enzymology 183, 63 (1990); W. R. Pearson and D. J. Lipman, PNAS 85, 2444 (1988); W. R. Pearson, Enzymology 183, 63 (1990)). Another useful program for the calculation of homologies of different sequences is the standard blast program, which is included in the Biomax pedant software (Biomax, Munich, Federal Republic of Germany). This leads unfortunately sometimes to suboptimal results since blast does not always include complete sequences of the subject and the querry. Nevertheless as this program is very efficient it can be used for the comparison of a huge number of sequences. The following settings are typically used for such a comparisons of sequences:

[0783] -p Program Name [String]; -d Database [String]; default=nr; -i Query File [File In]; default=stdin; -e Expectation value (E) [Real]; default=10.0; -m alignment view options: 0=pairwise; 1=query-anchored showing identities; 2=query-anchored no identities; 3=flat query-anchored, show identities; 4=flat query-anchored, no identities; 5=query-anchored no identities and blunt ends; 6=flat query-anchored, no identities and blunt ends; 7=XML Blast output; 8=tabular; 9 tabular with comment lines [Integer]; default=0; -o BLAST report Output File [File Out] Optional; default=stdout; -F Filter query sequence (DUST with blastn, SEG with others) [String]; default=T; -G Cost to open a gap (zero invokes default behavior) [Integer]; default=0; -E Cost to extend a gap (zero invokes default behavior) [Integer]; default=0; -X X dropoff value for gapped alignment (in bits) (zero invokes default behavior); blastn 30, megablast 20, tblastx 0, all others 15 [Integer]; default=0; -I Show GI's in deflines [T/F]; default=F; -q Penalty for a nucleotide mismatch (blastn only) [Integer]; default=-3; -r Reward for a nucleotide match (blastn only) [Integer]; default=1; -v Number of database sequences to show one-line descriptions for (V) [Integer]; default=500; -b Number of database sequence to show alignments for (B) [Integer]; default=250; -f Threshold for extending hits, default if zero; blastp 11, blastn 0, blastx 12, tblastn 13; tblastx 13, megablast 0 [Integer]; default=0; -g Perfom gapped alignment (not available with tblastx) [T/F]; default=T; -Q Query Genetic code to use [Integer]; default=1; -D DB Genetic code (for tblast[nx] only) [Integer]; default=1; -a Number of processors to use [Integer]; default=1; -O SeqAlign file [File Out] Optional; -J Believe the query defline [T/F]; default=F; -M Matrix [String]; default=BLOSUM62; -W Word size, default if zero (blastn 11, megablast 28, all others 3) [Integer]; default=0; -z Effective length of the database (use zero for the real size) [Real]; default=0; -K Number of best hits from a region to keep (off by default, if used a value of 100 is recommended) [Integer]; default=0; -P 0 for multiple hit, 1 for single hit [Integer]; default=0; -Y Effective length of the search space (use zero for the real size) [Real]; default=0; -S Query strands to search against database (for blast[nx], and tblastx); 3 is both, 1 is top, 2 is bottom [Integer]; default=3; -T Produce HTML output [T/F]; default=F; -I Restrict search of database to list of GI's [String] Optional; -U Use lower case filtering of FASTA sequence [T/F] Optional; default=F; -y X dropoff value for ungapped extensions in bits (0.0 invokes default behavior); blastn 20, megablast 10, all others 7 [Real]; default=0.0; -Z X dropoff value for final gapped alignment in bits (0.0 invokes default behavior); blastn/megablast 50, tblastx 0, all others 25 [Integer]; default=0; -R PSI-TBLASTN checkpoint file [File In] Optional; -n MegaBlast search [T/F]; default=F; -L Location on query sequence [String] Optional; -A Multiple Hits window size, default if zero (blastn/megablast 0, all others 40 [Integer]; default=0; -w Frame shift penalty (OOF algorithm for blastx) [Integer]; default=0; -t Length of the largest intron allowed in tblastn for linking HSPs (0 disables linking) [Integer]; default=0.

[0784] Results of high quality are reached by using the algorithm of Needleman and Wunsch or Smith and Waterman. Therefore programs based on said algorithms are preferred. Advantageously the comparisons of sequences can be done with the program PileUp (J. Mol. Evolution., 25, 351 (1987), Higgins et al., CABIOS 5, 151 (1989)) or preferably with the programs “Gap” and “Needle”, which are both based on the algorithms of Needleman and Wunsch (J. Mol. Biol. 48; 443 (1970)), and “BestFit”, which is based on the algorithm of Smith and Waterman (Adv. Appl. Math. 2; 482 (1981)). “Gap” and “BestFit” are part of the GCG software-package (Genetics Computer Group, 575 Science Drive, Madison, Wis., USA 53711 (1991); Altschul et al., (Nucleic Acids Res. 25, 3389 (1997)), “Needle” is part of the The European Molecular Biology Open Software Suite (EMBOSS) (Trends in Genetics 16 (6), 276 (2000)). Therefore preferably the calculations to determine the percentages of sequence homology are done with the programs “Gap” or “Needle” over the whole range of the sequences. The following standard adjustments for the comparison of nucleic acid sequences were used for “Needle”: matrix: EDNAFULL, Gap_penalty: 10.0, Extend_penalty: 0.5. The following standard adjustments for the comparison of nucleic acid sequences were used for “Gap”: gap weight: 50, length weight: 3, average match: 10.000, average mismatch: 0.000.

[0785] For example a sequence, which has 80% homology with sequence SEQ ID NO: 39 at the nucleic acid level is understood as meaning a sequence which, upon comparison with the sequence SEQ ID NO: 39 by the above program “Needle” with the above parameter set, has a 80% identity.

[0786] Homology between two polypeptides is understood as meaning the identity of the amino acid sequence over in each case the entire sequence length which is calculated by comparison with the aid of the above program “Needle” using Matrix: EBLOSUM62, Gap_penalty: 8.0, Extend_penalty: 2.0.

[0787] For example a sequence which has a 80% homology with sequence SEQ ID NO: 40 at the protein level is understood as meaning a sequence which, upon comparison with the sequence SEQ ID NO: 40 by the above program “Needle” with the above parameter set, has a 80% identity.

[0788] Functional equivalents derived from the nucleic acid sequence as shown in table I, columns 5 and 7 according to the invention by substitution, insertion or deletion have at least 30%, 35%, 40%, 45% or 50%, preferably at least 55%, 60%, 65% or 70% by preference at least 80%, especially preferably at least 85% or 90%, 91%, 92%, 93% or 94%, very especially preferably at least 95%, 97%, 98% or 99% homology with one of the polypeptides as shown in table II, columns 5 and 7 according to the invention and encode polypeptides having essentially the same properties as the polypeptide as shown in table II, columns 5 and 7.

[0789] Functional equivalents derived from one of the polypeptides as shown in table II, columns 5 and 7 according to the invention by substitution, insertion or deletion have at least 30%, 35%, 40%, 45% or 50%, preferably at least 55%, 60%, 65% or 70% by preference at least 80%, especially preferably at least 85% or 90%, 91%, 92%, 93% or 94%, very especially preferably at least 95%, 97%, 98% or 99% homology with one of the polypeptides as shown in table II, columns 5 and 7 according to the invention and having essentially the same properties as the polypeptide as shown in table II, columns 5 and 7.

[0790] “Essentially the same properties” of a functional equivalent is above all understood as meaning that the functional equivalent has above mentioned acitivty, by for example expression either in the cytsol or in an organelle such as a plastid or mitochondria or both, preferably in plastids while increasing the amount of protein, activity or function of said functional equivalent in an organism, e.g. a microorgansim, a plant or plant tissue or animal tissue, plant or animal cells or a part of the same.

[0791] A nucleic acid molecule encoding an homologous to a protein sequence of table II, columns 5 and 7 can be created by introducing one or more nucleotide substitutions, additions or deletions into a nucleotide sequence of the nucleic acid molecule of the present invention, in particular of table I, columns 5 and 7 such that one or more amino acid substitutions, additions or deletions are introduced into the encoded protein. Mutations can be introduced into the encoding sequences of table I, columns 5 and 7 by standard techniques, such as site-directed mutagenesis and PCR-mediated mutagenesis.

[0792] Preferably, conservative amino acid substitutions are made at one or more predicted non-essential amino acid residues. A “conservative amino acid substitution” is one in which the amino acid residue is replaced with an amino acid residue having a similar side chain. Families of amino acid residues having similar side chains have been defined in the art. These families include amino acids with basic side chains (e.g., lysine, arginine, histidine), acidic side chains (e.g., aspartic acid, glutamic acid), uncharged polar side chains (e.g., glycine, asparagine, glutamine, serine, threonine, tyrosine, cysteine), nonpolar side chains (e.g., alanine, valine, leucine, isoleucine, proline, phenylalanine, methionine, tryptophane), beta-branched side chains (e.g., threonine, valine, isoleucine) and aromatic side chains (e.g., tyrosine, phenylalanine, tryptophane, histidine).

[0793] Thus, a predicted nonessential amino acid residue in a polypeptide of the invention or a polypeptide used in the process of the invention is preferably replaced with another amino acid residue from the same family. Alternatively, in another embodiment, mutations can be introduced randomly along all or part of a coding sequence of a nucleic acid molecule of the invention or used in the process of the invention, such as by saturation mutagenesis, and the resultant mutants can be screened for activity described herein to identify mutants that retain or even have increased above mentioned activity, e.g. conferring an enhanced yield, e.g an improved yield-related trait, e.g. enhanced tolerance to abiotic environmental stress and/or increased yield like biomass as compared to a corresponding, e.g. non-transformed, wild type plant cell, plant or part thereof.

[0794] Following mutagenesis of one of the sequences as shown herein, the encoded protein can be expressed recombinantly and the activity of the protein can be determined using, for example, assays described herein (see Examples).

[0795] The highest homology of the nucleic acid molecule used in the process according to the invention was found for the following database entries by Gap search.

[0796] Homologues of the nucleic acid sequences used, with the sequence shown in table I, columns 5 and 7, comprise also allelic variants with at least approximately 30%, 35%, 40% or 45% homology, by preference at least approximately 50%, 60% or 70%, more preferably at least approximately 90%, 91%, 92%, 93%, 94% or 95% and even more preferably at least approximately 96%, 97%, 98%, 99% or more homology with one of the nucleotide sequences shown or the abovementioned derived nucleic acid sequences or their homologues, derivatives or analogues or parts of these. Allelic variants encompass in particular functional variants which can be obtained by deletion, insertion or substitution of nucleotides from the sequences shown, preferably from table I, columns 5 and 7, or from the derived nucleic acid sequences, the intention being, however, that the enzyme activity or the biological activity of the resulting proteins synthesized is advantageously retained or increased.

[0797] In one embodiment of the present invention, the nucleic acid molecule of the invention or used in the process of the invention comprises the sequences shown in any of the table I, columns 5 and 7. It is preferred that the nucleic acid molecule comprises as little as possible other nucleotides not shown in any one of table I, columns 5 and 7. In one embodiment, the nucleic acid molecule comprises less than 500, 400, 300, 200, 100, 90, 80, 70, 60, 50 or 40 further nucleotides. In a further embodiment, the nucleic acid molecule comprises less than 30, 20 or 10 further nucleotides. In one embodiment, the nucleic acid molecule use in the process of the invention is identical to the sequences shown in table I, columns 5 and 7.

[0798] Also preferred is that the nucleic acid molecule used in the process of the invention encodes a polypeptide comprising the sequence shown in table II, columns 5 and 7. In one embodiment, the nucleic acid molecule encodes less than 150, 130, 100, 80, 60, 50, 40 or 30 further amino acids. In a further embodiment, the encoded polypeptide comprises less than 20, 15, 10, 9, 8, 7, 6 or 5 further amino acids. In one embodiment used in the inventive process, the encoded polypeptide is identical to the sequences shown in table II, columns 5 and 7.

[0799] In one embodiment, the nucleic acid molecule of the invention or used in the process encodes a polypeptide comprising the sequence shown in table II, columns 5 and 7 comprises less than 100 further nucleotides. In a further embodiment, said nucleic acid molecule comprises less than 30 further nucleotides. In one embodiment, the nucleic acid molecule used in the process is identical to a coding sequence of the sequences shown in table I, columns 5 and 7.

[0800] Polypeptides (=proteins), which still have the essential biological or enzymatic activity of the polypeptide of the present invention conferring an enhanced yield, e.g an improved yield-related trait, e.g. enhanced tolerance to abiotic environmental stress and/or increased yield like biomass as compared to a corresponding, e.g. non-transformed, wild type plant cell, plant or part thereof i.e. whose activity is essentially not reduced, are polypeptides with at least 10% or 20%, by preference 30% or 40%, especially preferably 50% or 60%, very especially preferably 80% or 90 or more of the wild type biological activity or enzyme activity, advantageously, the activity is essentially not reduced in comparison with the activity of a polypeptide shown in table II, columns 5 and 7 expressed under identical conditions.

[0801] Homologues of table I, columns 5 and 7 or of the derived sequences of table II, columns 5 and 7 also mean truncated sequences, cDNA, single-stranded DNA or RNA of the coding and noncoding DNA sequence. Homologues of said sequences are also understood as meaning derivatives, which comprise noncoding regions such as, for example, UTRs, terminators, enhancers or promoter variants. The promoters upstream of the nucleotide sequences stated can be modified by one or more nucleotide substitution(s), insertion(s) and/or deletion(s) without, however, interfering with the functionality or activity either of the promoters, the open reading frame (=ORF) or with the 3′-regulatory region such as terminators or other 3′-regulatory regions, which are far away from the ORF. It is furthermore possible that the activity of the promoters is increased by modification of their sequence, or that they are replaced completely by more active promoters, even promoters from heterologous organisms. Appropriate promoters are known to the person skilled in the art and are mentioned herein below.

[0802] In addition to the nucleic acid molecules encoding the YIPs described above, another aspect of the invention pertains to negative regulators of the activity of a nucleic acid molecules selected from the group according to table I, column 5 and/or 7, preferably column 7. Antisense polynucleotides thereto are thought to inhibit the downregulating activity of those negative regulators by specifically binding the target polynucleotide and interfering with transcription, splicing, transport, translation, and/or stability of the target polynucleotide. Methods are described in the prior art for targeting the antisense polynucleotide to the chromosomal DNA, to a primary RNA transcript, or to a processed mRNA. Preferably, the target regions include splice sites, translation initiation codons, translation termination codons, and other sequences within the open reading frame.

[0803] The term “antisense,” for the purposes of the invention, refers to a nucleic acid comprising a polynucleotide that is sufficiently complementary to all or a portion of a gene, primary transcript, or processed mRNA, so as to interfere with expression of the en-dogenous gene. “Complementary” polynucleotides are those that are capable of base pairing according to the standard Watson-Crick complementarity rules. bpecifically, purines will base pair with pyrimidines to form a combination of guanine paired with cytosine (G:C) and adenine paired with either thymine (A:T) in the case of DNA, or adenine paired with uracil (A:U) in the case of RNA. It is understood that two polynucleotides may hybridize to each other even if they are not completely complementary to each other, provided that each has at least one region that is substantially complementary to the other. The term “antisense nucleic acid” includes single stranded RNA as well as double-stranded DNA expression cassettes that can be transcribed to produce an antisense RNA. “Active” antisense nucleic acids are antisense RNA molecules that are capable of selectively hybridizing with a negative regulator of the activity of a nucleic acid molecules encoding a polypeptide having at least 80% sequence identity with the polypeptide selected from the group according to table II, column 5 and/or 7, preferably column 7.

[0804] The antisense nucleic acid can be complementary to an entire negative regulator strand, or to only a portion thereof. In an embodiment, the antisense nucleic acid molecule is antisense to a “noncoding region” of the coding strand of a nucleotide sequence encoding a YIP. The term “noncoding region” refers to 5′ and 3′ sequences that flank the coding region that are not translated into amino acids (i.e., also referred to as 5′ and 3′ untranslated regions). The antisense nucleic acid molecule can be complementary to only a portion of the noncoding region of YIP mRNA. For example, the antisense oligonucleotide can be complementary to the region surrounding the translation start site of YIP mRNA. An antisense oligonucleotide can be, for example, about 5, 10, 15, 20, 25, 30, 35, 40, 45 or 50 nucleotides in length. Typically, the antisense molecules of the present invention comprise an RNA having 60-100% sequence identity with at least 14 consecutive nucleotides of a noncoding region of one of the nucleic acid of table I. Preferably, the sequence identity will be at least 70%, more preferably at least 75%, 80%, 85%, 90%, 95%, 98% and most preferably 99%.

[0805] An antisense nucleic acid of the invention can be constructed using chemical synthesis and enzymatic ligation reactions using procedures known in the art. For example, an antisense nucleic acid (e.g., an antisense oligonucleotide) can be chemically synthesized using naturally occurring nucleotides or variously modified nucleotides designed to increase the biological stability of the molecules or to increase the physical stability of the duplex formed between the antisense and sense nucleic acids, e.g., phosphorothioate derivatives and acridine substituted nucleotides can be used. Examples of modified nucleotides which can be used to generate the antisense nucleic acid include 5-fluorouracil, 5-bromouracil, 5-chlorouracil, 5-iodouracil, hypoxanthine, xanthine, 4-acetylcytosine, 5-(carboxyhydroxylmethyl)-uracil, 5-carboxymethylaminomethyl-2-thiouridine, 5-carboxymethylaminomethyluracil, dihydrouracil, beta-D-galactosylqueosine, inosine, N6-isopentenyladenine, 1-methylguanine, 1-methylinosine, 2,2-dimethylguanine, 2-methyladenine, 2-methylguanine, 3-methylcytosine, 5-methylcytosine, N6-adenine, 7-methylguanine, 5-methylaminomethyluracil, 5-methoxyaminomethyl-2-thiouracil, beta-D-mannosylqueosine, 5′-methoxycarboxymethyluracil, 5-methoxyuracil, 2-methylthio-N6-isopentenyladenine, uracil-5-oxyacetic acid (v), wybutoxosine, pseudouracil, queosine, 2-thiocytosine, 5-methyl-2-thiouracil, 2-thiouracil, 4-thiouracil, 5-methyluracil, uracil-5-oxyacetic acid methylester, 5-methyl-2-thiouracil, 3-(3-amino-3-N-2-carboxypropyl)-uracil, acp3 and 2,6-diaminopurine. Alternatively, the antisense nucleic acid can be produced biologically using an expression vector into which a nucleic acid has been subcloned in an antisense orientation (i.e., RNA transcribed from the inserted nucleic acid will be of an antisense orientation to a target nucleic acid of interest, described further in the following subsection).

[0806] In yet another embodiment, the antisense nucleic acid molecule of the invention is an alpha-anomeric nucleic acid molecule. An alpha-anomeric nucleic acid molecule forms specific double-stranded hybrids with complementary RNA in which, contrary to the usual b-units, the strands run parallel to each other (Gaultier et al., Nucleic Acids. Res. 15, 6625 (1987)). The antisense nucleic acid molecule can also comprise a 2′-o-methylribonucleotide (Inoue et al., Nucleic Acids Res. 15, 6131 (1987)) or a chimeric RNA-DNA analogue (Inoue et al., FEBS Lett. 215, 327 (1987)).

[0807] The antisense nucleic acid molecules of the invention are typically administered to a cell or generated in situ such that they hybridize with or bind to cellular mRNA and/or genomic DNA. The hybridization can be by conventional nucleotide complementarity to form a stable duplex, or, for example, in the case of an antisense nucleic acid molecule which binds to DNA duplexes, through specific interactions in the major groove of the double helix. The antisense molecule can be modified such that it specifically binds to a receptor or an antigen expressed on a selected cell surface, e.g., by linking the antisense nucleic acid molecule to a peptide or an antibody which binds to a cell surface receptor or antigen. The antisense nucleic acid molecule can also be delivered to cells using the vectors described herein. To achieve sufficient intracellular concentrations of the antisense molecules, vector constructs in which the antisense nucleic acid molecule is placed under the control of a strong prokaryotic, viral, or eukaryotic (including plant) promoter are preferred.

[0808] As an alternative to antisense polynucleotides, ribozymes, sense polynucleotides, or double stranded RNA (dsRNA) can be used to reduce expression of a YIP polypeptide. By “ribozyme” is meant a catalytic RNA-based enzyme with ribonuclease activity which is capable of cleaving a single-stranded nucleic acid, such as an mRNA, to which it has a complementary region. Ribozymes (e.g., hammerhead ribozymes described in Haselhoff and Gerlach, Nature 334, 585 (1988)) can be used to catalytically cleave YIP mRNA transcripts to thereby inhibit translation of YIP mRNA. A ribozyme having specificity for a YIP-encoding nucleic acid can be designed based upon the nucleotide sequence of a YIP cDNA, as disclosed herein or on the basis of a heterologous sequence to be isolated according to methods taught in this invention. For example, a derivative of a Tetrahymena L-19 IVS RNA can be constructed in which the nucleotide sequence of the active site is complementary to the nucleotide sequence to be cleaved in a YIP-encoding mRNA. See, e.g. U.S. Pat. Nos. 4,987,071 and 5,116,742 to Cech et al. Alternatively, YIP mRNA can be used to select a catalytic RNA having a specific ribonuclease activity from a pool of RNA molecules. See, e.g. Bartel D., and Szostak J. W., Science 261, 1411 (1993). In preferred embodiments, the ribozyme will contain a portion having at least 7, 8, 9, 10, 12, 14, 16, 18 or 20 nucleotides, and more preferably 7 or 8 nucleotides, that have 100% complementarity to a portion of the target RNA. Methods for making ribozymes are known to those skilled in the art. See, e.g. U.S. Pat. Nos. 6,025,167, 5,773,260 and 5,496,698.

[0809] The term “dsRNA,” as used herein, refers to RNA hybrids comprising two strands of RNA. The dsRNAs can be linear or circular in structure. In a preferred embodiment, dsRNA is specific for a polynucleotide encoding either the polypeptide according to table II or a polypeptide having at least 70% sequence identity with a polypeptide according to table II. The hybridizing RNAs may be substantially or completely complementary. By “substantially complementary,” is meant that when the two hybridizing RNAs are optimally aligned using the BLAST program as described above, the hybridizing portions are at least 95% complementary. Preferably, the dsRNA will be at least 100 base pairs in length. Typically, the hybridizing RNAs will be of identical length with no over hanging 5′ or 3′ ends and no gaps. However, dsRNAs having 5′ or 3′ overhangs of up to 100 nucleotides may be used in the methods of the invention.

[0810] The dsRNA may comprise ribonucleotides or ribonucleotide analogs, such as 2′-O-methyl ribosyl residues, or combinations thereof. See, e.g. U.S. Pat. Nos. 4,130,641 and 4,024,222. A dsRNA polyriboinosinic acid:polyribocytidylic acid is described in U.S. Pat. No. 4,283,393. Methods for making and using dsRNA are known in the art. One method comprises the simultaneous transcription of two complementary DNA strands, either in vivo, or in a single in vitro reaction mixture. See, e.g. U.S. Pat. No. 5,795,715. In one embodiment, dsRNA can be introduced into a plant or plant cell directly by standard transformation procedures. Alternatively, dsRNA can be expressed in a plant cell by transcribing two complementary RNAs.

[0811] Other methods for the inhibition of endogenous gene expression, such as triple helix formation (Moser et al., Science 238, 645 (1987), and Cooney et al., Science 241, 456 (1988)) and cosuppression (Napoli et al., The Plant Cell 2,279, 1990,) are known in the art. Partial and full-length cDNAs have been used for the cosuppression of endogenous plant genes. See, e.g. U.S. Pat. Nos. 4,801,340, 5,034,323, 5,231,020, and 5,283,184; Van der Kroll et al., The Plant Cell 2, 291, (1990); Smith et al., Mol. Gen. Genetics 224, 477 (1990), and Napoli et al., The Plant Cell 2, 279 (1990).

[0812] For sense suppression, it is believed that introduction of a sense polynucleotide blocks transcription of the corresponding target gene. The sense polynucleotide will have at least 65% sequence identity with the target plant gene or RNA. Preferably, the percent identity is at least 80%, 90%, 95% or more. The introduced sense polynucleotide need not be full length relative to the target gene or transcript. Preferably, the sense polynucleotide will have at least 65% sequence identity with at least 100 consecutive nucleotides of one of the nucleic acids as depicted in table I, application no. 1. The regions of identity can comprise introns and and/or exons and untranslated regions. The introduced sense polynucleotide may be present in the plant cell transiently, or may be stably integrated into a plant chromosome or extrachromosomal replicon.

[0813] Further, object of the invention is an expression vector comprising a nucleic acid molecule comprising a nucleic acid molecule selected from the group consisting of:
[0814] (a) a nucleic acid molecule encoding the polypeptide shown in column 5 or 7 of table II, application no. 1;
[0815] (b) a nucleic acid molecule shown in column 5 or 7 of table I, application no. 1;
[0816] (c) a nucleic acid molecule, which, as a result of the degeneracy of the genetic code, can be derived from a polypeptide sequence depicted in column 5 or 7 of table II, and confers an an enhanced yield, e.g an improved yield-related trait, e.g. enhanced tolerance to abiotic environmental stress and/or increased yield like biomass as compared to a corresponding, e.g. non-transformed, wild type plant cell, a plant or a part thereof;
[0817] (d) a nucleic acid molecule having at least 30% identity, preferably at least 40%, 50%, 60%, 70%_{,} 75%, 80%, 85%, 90%, 95%, 96%, 97%, 98%, 99%, 99.5% with the nucleic acid molecule sequence of a polynucleotide comprising the nucleic acid molecule shown in column 5 or 7 of table I, and confers an enhanced yield, e.g an improved yield-related trait, e.g. enhanced tolerance to abiotic environmental stress and/or increased yield like biomass as compared to a corresponding, e.g. non-transformed, wild type plant cell, a plant or a part thereof;
[0818] (e) a nucleic acid molecule encoding a polypeptide having at least 30% identity, preferably at least 40%, 50%, 60%, 70%, 75%, 80%, 85%, 90%, 95%, 96%, 97%, 98%, 99%, 99.5%, with the amino acid sequence of the polypeptide encoded by the nucleic acid molecule of (a), (b), (c) or (d) and having the activity represented by a nucleic acid molecule comprising a polynucleotide as depicted in column 5 of table I, and confers an enhanced yield, e.g an improved yield-related trait, e.g. enhanced tolerance to abiotic environmental stress and/or increased yield like biomass as compared to a corresponding, e.g. non-transformed, wild type plant cell, a plant or a part thereof;
[0819] (f) nucleic acid molecule which hybridizes with a nucleic acid molecule of (a), (b), (c), (d) or (e) under stringent hybridization conditions and confers an enhanced yield, e.g an improved yield-related trait, e.g. enhanced tolerance to abiotic environmental stress and/or increased yield like biomass as compared to a corresponding, e.g. non-transformed, wild type plant cell, a plant or a part thereof;
[0820] (g) a nucleic acid molecule encoding a polypeptide which can be isolated with the aid of monoclonal or polyclonal antibodies made against a polypeptide encoded by one of the nucleic acid molecules of (a), (b), (c), (d), (e) or (f) and having the activity represented by the nucleic acid molecule comprising a polynucleotide as depicted in column 5 of table I, application no. 1;
[0821] (h) a nucleic acid molecule encoding a polypeptide comprising the consensus sequence or one or more polypeptide motifs as shown in column 7 of table IV, and preferably having the activity represented by a protein comprising a polypeptide as depicted in column 5 of table II or IV, application no. 1;
[0822] (i) a nucleic acid molecule encoding a polypeptide having the activity represented by a protein as depicted in column 5 of table II, and confers an enhanced yield, e.g an improved yield-related trait, e.g. enhanced tolerance to abiotic environmental stress and/or increased yield like biomass as compared to a corresponding, e.g. non-transformed, wild type plant cell, a plant or a part thereof;
[0823] (j) nucleic acid molecule which comprises a polynucleotide, which is obtained by amplifying a cDNA library or a genomic library using the primers in column 7 of table III, and preferably having the activity represented by a protein comprising a polypeptide as depicted in column 5 of table II or IV, application no. 1; and
[0824] (k) a nucleic acid molecule which is obtainable by screening a suitable nucleic acid library, especially a cDNA library and/or a genomic library, under stringent hybridization conditions with a probe comprising a complementary sequence of a nucleic acid molecule of (a) or (b) or with a fragment thereof, having at least 15 nt, preferably 20 nt, 30 nt, 50 nt, 100 nt, 200 nt, 500 nt, 750 or 1000 nt of a nucleic acid molecule complementary to a nucleic acid molecule sequence characterized in (a) to (e) and encoding a polypeptide having the activity represented by a protein comprising a polypeptide as depicted in column 5 of table II, application no. 1.

[0825] The invention further provides an isolated recombinant expression vector comprising a YIP encoding nucleic acid as described above, wherein expression of the vector or YIP encoding nucleic acid, respectively in a host cell results in enhanced tolerance to abiotic environmental stress as compared to the corresponding, e.g. non-transformed, wild type of the host cell. As used herein, the term “vector” refers to a nucleic acid molecule capable of transporting another nucleic acid to which it has been linked. One type of vector is a “plasmid”, which refers to a circular double stranded DNA loop into which additional DNA segments can be ligated. Another type of vector is a viral vector, wherein additional DNA segments can be ligated into the viral genome. Further types of vectors can be linearized nucleic acid sequences, such as transposons, which are pieces of DNA which can copy and insert themselves. There have been 2 types of transposons found: simple transposons, known as Insertion Sequences and composite transposons, which can have several genes as well as the genes that are required for transposition.

[0826] Certain vectors are capable of autonomous replication in a host cell into which they are introduced (e.g., bacterial vectors having a bacterial origin of replication and episomal mammalian vectors). Other vectors (e.g., non-episomal mammalian vectors) are integrated into the genome of a host cell upon introduction into the host cell, and thereby are replicated along with the host genome. Moreover, certain vectors are capable of directing the expression of genes to which they are operatively linked. Such vectors are referred to herein as “expression vectors”. In general, expression vectors of utility in recombinant DNA techniques are often in the form of plasmids. In the present specification, “plasmid” and “vector” can be used interchangeably as the plasmid is the most commonly used form of vector. However, the invention is intended to include such other forms of expression vectors, such as viral vectors (e.g., replication defective retroviruses, adenoviruses and adeno-associated viruses), which serve equivalent functions.

[0827] A plant expression cassette preferably contains regulatory sequences capable of driving gene expression in plant cells and operably linked so that each sequence can fulfill its function, for example, termination of transcription by polyadenylation signals.

[0828] Preferred polyadenylation signals are those originating from Agrobacterium tumefaciens T-DNA such as the gene 3 known as octopine synthase of the Ti-plasmid pTiACH5 (Gielen et al., EMBO J. 3, 835 1(984)) or functional equivalents thereof but also all other terminators functionally active in plants are suitable.

[0829] As plant gene expression is very often not limited on transcriptional levels, a plant expression cassette preferably contains other operably linked sequences like translational enhancers such as the overdrive-sequence containing the 5′-untranslated leader sequence from tobacco mosaic virus enhancing the protein per RNA ratio (Gallie et al., Nucl. Acids Research 15, 8693 (1987)).

[0830] Plant gene expression has to be operably linked to an appropriate promoter conferring gene expression in a timely, cell or tissue specific manner. Preferred are promoters driving constitutive expression (Benfey et al., EMBO J. 8, 2195 (1989)) like those derived from plant viruses like the 35S CaMV (Franck et al., Cell 21, 285 (1980)), the 19S CaMV (see also U.S. Pat. No. 5,352,605 and PCT Application No. WO 84/02913) or plant promoters like those from Rubisco small subunit described in U.S. Pat. No. 4,962,028.

[0831] Additional advantageous regulatory sequences are, for example, included in the plant promoters such as CaMV/35S (Franck et al., Cell 21 285 (1980)), PRP1 (Ward et al., Plant. Mol. Biol. 22, 361 (1993)), SSU, OCS, lib4, usp, STLS1, B33, LEB4, nos, ubiquitin, napin or phaseolin promoter. Also advantageous in this connection are inducible promoters such as the promoters described in EP 388 186 (benzyl sulfonamide inducible), Gatz et al., Plant J. 2, 397 (1992) (tetracyclin inducible), EP-A-0 335 528 (abscisic acid inducible) or WO 93/21334 (ethanol or cyclohexenol inducible). Additional useful plant promoters are the cytoplasmic FBPase promoter or ST-LSI promoter of potato (Stockhaus et al., EMBO J. 8, 2445 (1989)), the phosphoribosyl pyrophosphate amido transferase promoter of Glycine max (gene bank accession No. U87999) or the noden specific promoter described in EP-A-0 249 676. Additional particularly advantageous promoters are seed specific promoters which can be used for monocotyledones or dicotyledones and are described in U.S. Pat. No. 5,608,152 (napin promoter from rapeseed), WO 98/45461 (phaseolin promoter from Arabidopsis), U.S. Pat. No. 5,504,200 (phaseolin promoter from Phaseolus vulgaris), WO 91/13980 (Bce4 promoter from Brassica) and Baeumlein et al., Plant J., 2 (2), 233 (1992) (LEB4 promoter from leguminosa). Said promoters are useful in dicotyledones. The following promoters are useful for example in monocotyledones lpt-2- or lpt-1-promoter from barley (WO 95/15389 and WO 95/23230) or hordein promoter from barley. Other useful promoters are described in WO 99/16890.

[0832] It is possible in principle to use all natural promoters with their regulatory sequences like those mentioned above for the novel process. It is also possible and advantageous in addition to use synthetic promoters.

[0833] The gene construct may also comprise further genes which are to be inserted into the organisms and which are for example involved in stress tolerance and yield increase. It is possible and advantageous to insert and express in host organisms regulatory genes such as genes for inducers, repressors or enzymes which intervene by their enzymatic activity in the regulation, or one or more or all genes of a biosynthetic pathway. These genes can be heterologous or homologous in origin. The inserted genes may have their own promoter or else be under the control of same promoter as the sequences of the nucleic acid of table I or their homologs.

[0834] The gene construct advantageously comprises, for expression of the other genes present, additionally 3′ and/or 5′ terminal regulatory sequences to enhance expression, which are selected for optimal expression depending on the selected host organism and gene or genes.

[0835] These regulatory sequences are intended to make specific expression of the genes and protein expression possible as mentioned above. This may mean, depending on the host organism, for example that the gene is expressed or overexpressed only after induction, or that it is immediately expressed and/or overexpressed.

[0836] The regulatory sequences or factors may moreover preferably have a beneficial effect on expression of the introduced genes, and thus increase it. It is possible in this way for the regulatory elements to be enhanced advantageously at the transcription level by using strong transcription signals such as promoters and/or enhancers. However, in addition, it is also possible to enhance translation by, for example, improving the stability of the mRNA.

[0837] Other preferred sequences for use in plant gene expression cassettes are targeting-sequences necessary to direct the gene product in its appropriate cell compartment (for review see Kermode, Crit. Rev. Plant Sci. 15 (4), 285 (1996) and references cited therein) such as the vacuole, the nucleus, all types of plastids like amyloplasts, chloroplasts, chromoplasts, the extracellular space, mitochondria, the endoplasmic reticulum, oil bodies, peroxisomes and other compartments of plant cells.

[0838] Plant gene expression can also be facilitated via an inducible promoter (for review see Gatz, Annu. Rev. Plant Physiol. Plant Mol. Biol. 48, 89(1997)). Chemically inducible promoters are especially suitable if gene expression is wanted to occur in a time specific manner.

[0839] Table VI lists several examples of promoters that may be used to regulate transcription of the nucleic acid coding sequences of the present invention.

TABLE VI
Examples of tissue-specific and inducible promoters in plants

| Expression | Reference |
|---|---|
| Cor78 - Cold, drought, salt, | Ishitani, et al., Plant Cell 9, 1935 (1997), |
| ABA, wounding-inducible | Yamaguchi-Shinozaki and Shinozaki, Plant Cell 6, |
| | 251 (1994) |
| Rci2A - Cold, dehydration- | Capel et al., Plant Physiol 115, 569 (1997) |
| inducible | |
| Rd22 - Drought, salt | Yamaguchi-Shinozaki and Shinozaki, Mol. Gen. |
| | Genet. 238, 17 (1993) |
| Cor15A - Cold, dehydration, | Baker et al., Plant Mol. Biol. 24, 701 (1994) |
| ABA | |
| GH3- Auxin inducible | Liu et al., Plant Cell 6, 645 (1994) |
| ARSK1-Root, salt inducible | Hwang and Goodman, Plant J. 8, 37 (1995) |
| PtxA - Root, salt inducible | GenBank accession X67427 |
| SbHRGP3 - Root specific | Ahn et al., Plant Cell 8, 1477 (1998). |
| KST1 - Guard cell specific | Plesch et al., Plant Journal. 28(4), 455- (2001) |
| KAT1 - Guard cell specific | Plesch et al., Gene 249, 83 (2000), |
| | Nakamura et al., Plant Physiol. 109, 371 (1995) |
| Salicylic acid inducible | PCT Application No. WO 95/19443 |
| Tetracycline inducible | Gatz et al., Plant J. 2, 397 (1992) |
| Ethanol inducible | PCT Application No. WO 93/21334 |
| Pathogen inducible PRP1 | Ward et al., Plant. Mol. Biol. 22, 361 -(1993) |
| Heat inducible hsp80 | U.S. Pat. No. 5,187,267 |
| Cold inducible alpha- | PCT Application No. WO 96/12814 |
| amylase | |
| Wound-inducible pinII | European Patent No. 375 091 |
| RD29A - salt-inducible | Yamaguchi-Shinozalei et al. Mol. Gen. Genet. |
| | 236, 331 (1993) |
| Plastid-specific viral | PCT Application No. WO 95/16783, PCT Application |
| RNA-polymerase | WO 97/06250 |
| USP - seed, embryo specific | Bäumlein et al., Mol Gen Genet. 225 (1): 121-8 |
| | (1991); Bäumlein et al., Mol Gen Genet. |
| | 225(3): 459-67 (1991) |

[0840] Other promoters, e.g. superpromoter (Ni et al., Plant Journal 7, 661 (1995)), Ubiquitin promoter (Callis et al., J. Biol. Chem., 265, 12486 (1990); U.S. Pat. No. 5,510,474; U.S. Pat. No. 6,020,190; Kawalleck et al., Plant. Molecular Biology, 21, 673 (1993)) or 34S promoter (GenBank Accession numbers M59930 and X16673) were similar useful for the present invention and are known to a person skilled in the art.

[0841] Developmental stage-preferred promoters are preferentially expressed at certain stages of development. Tissue and organ preferred promoters include those that are preferentially expressed in certain tissues or organs, such as leaves, roots, seeds, or xylem. Examples of tissue preferred and organ preferred promoters include, but are not limited to fruit-preferred, ovule-preferred, male tissue-preferred, seed-preferred, integument-preferred, tuber-preferred, stalk-preferred, pericarp-preferred, and leaf-preferred, stigma-preferred, pollen-preferred, anther-preferred, a petal-preferred, sepal-preferred, pedicel-preferred, silique-preferred, stem-preferred, root-preferred promoters, and the like. Seed preferred promoters are preferentially expressed during seed development and/or germination. For example, seed preferred promoters can be embryo-preferred, endosperm preferred, and seed coat-preferred. See Thompson et al., BioEssays 10, 108 (1989). Examples of seed preferred promoters include, but are not limited to, cellulose synthase (celA), Cim1, gamma-zein, globulin-1, maize 19 kD zein (cZ19B1), and the like.

[0842] Other promoters useful in the expression cassettes of the invention include, but are not limited to, the major chlorophyll a/b binding protein promoter, histone promoters, the Ap3 promoter, the β-conglycin promoter, the napin promoter, the soybean lectin promoter, the maize 15 kD zein promoter, the 22 kD zein promoter, the 27 kD zein promoter, the g-zein promoter, the waxy, shrunken 1, shrunken 2 and bronze promoters, the Zm13 promoter (U.S. Pat. No. 5,086,169), the maize polygalacturonase promoters (PG) (U.S. Pat. Nos. 5,412,085 and 5,545,546), and the SGB6 promoter (U.S. Pat. No. 5,470,359), as well as synthetic or other natural promoters.

[0843] Additional flexibility in controlling heterologous gene expression in plants may be obtained by using DNA binding domains and response elements from heterologous sources (i.e., DNA binding domains from non-plant sources). An example of such a heterologous DNA binding domain is the LexA DNA binding domain (Brent and Ptashne, Cell 43, 729 (1985)).

[0844] The invention further provides a recombinant expression vector comprising a YIP DNA molecule of the invention cloned into the expression vector in an antisense orientation. That is, the DNA molecule is operatively linked to a regulatory sequence in a manner that allows for expression (by transcription of the DNA molecule) of an RNA molecule that is antisense to a YIP mRNA. Regulatory sequences operatively linked to a nucleic acid molecule cloned in the antisense orientation can be chosen which direct the continuous expression of the antisense RNA molecule in a variety of cell types. For instance, viral promoters and/or enhancers, or regulatory sequences can be chosen which direct constitutive, tissue specific, or cell type specific expression of antisense RNA. The antisense expression vector can be in the form of a recombinant plasmid, phagemid, or attenuated virus wherein antisense nucleic acids are produced under the control of a high efficiency regulatory region. The activity of the regulatory region can be determined by the cell type into which the vector is introduced. For a discussion of the regulation of gene expression using antisense genes, see Weintraub H. et al., Reviews—Trends in Genetics, Vol. 1(1), 23 (1986) and Mol et al., FEBS Letters 268, 427 (1990).

[0845] Another aspect of the invention pertains to isolated YIPs, and biologically active portions thereof. An “isolated” or “purified” polypeptide or biologically active portion thereof is free of some of the cellular material when produced by recombinant DNA techniques, or chemical precursors or other chemicals when chemically synthesized. The language “substantially free of cellular material” includes preparations of YIP in which the polypeptide is separated from some of the cellular components of the cells in which it is naturally or recombinantly produced. In one embodiment, the language “substantially free of cellular material” includes preparations of a YIP having less than about 30% (by dry weight) of non-YIP material (also referred to herein as a “contaminating polypeptide”), more preferably less than about 20% of non-YIP material, still more preferably less than about 10% of non-YIP material, and most preferably less than about 5% non-YIP material.

[0846] When the YIP or biologically active portion thereof is recombinantly produced, it is also preferably substantially free of culture medium, i.e., culture medium represents less than about 20%, more preferably less than about 10%, and most preferably less than about 5% of the volume of the polypeptide preparation. The language “substantially free of chemical precursors or other chemicals” includes preparations of YIP in which the polypeptide is separated from chemical precursors or other chemicals that are involved in the synthesis of the polypeptide. In one embodiment, the language “substantially free of chemical precursors or other chemicals” includes preparations of a YIP having less than about 30% (by dry weight) of chemical precursors or non-YIP chemicals, more preferably less than about 20% chemical precursors or non-YIP chemicals, still more preferably less than about 10% chemical precursors or non-YIP chemicals, and most preferably less than about 5% chemical precursors or non-YIP chemicals. In preferred embodiments, isolated polypeptides, or biologically active portions thereof, lack contaminating polypeptides from the same organism from which the YIP is derived. Typically, such polypeptides are produced by recombinant expression of, for example, a S. cerevisiae, E. coli or Brassica napus, Glycine max, Zea mays or Oryza sativa YIP, in an microorganism like S. cerevissiae, E. coli, C. glutamicum, ciliates, algae, fungi or plants, provided that the polypeptide is recombinant expressed in an organism being different to the original organism.

[0847] The nucleic acid molecules, polypeptides, polypeptide homologs, fusion polypeptides, primers, vectors, and host cells described herein can be used in one or more of the following methods: identification of S. cerevissiae, E. coli or Brassica napus, Glycine max, Zea mays or Oryza sativa and related organisms; mapping of genomes of organisms related to S. cerevissiae, E. coli; identification and localization of S. cerevissiae, E. coli or Brassica napus, Glycine max, Zea mays or Oryza sativa sequences of interest; evolutionary studies; determination of YIP regions required for function; modulation of a YIP activity; modulation of the metabolism of one or more cell functions; modulation of the transmembrane transport of one or more compounds; modulation of tolerance to abiotic environmental stress and/or yield; and modulation of expression of YIP nucleic acids.

[0848] The YIP nucleic acid molecules of the invention are also useful for evolutionary and polypeptide structural studies. The metabolic and transport processes in which the molecules of the invention participate are utilized by a wide variety of prokaryotic and eukaryotic cells; by comparing the sequences of the nucleic acid molecules of the present invention to those encoding similar enzymes from other organisms, the evolutionary relat-edness of the organisms can be assessed. Similarly, such a comparison permits an assessment of which regions of the sequence are conserved and which are not, which may aid in determining those regions of the polypeptide that are essential for the functioning of the enzyme. This type of determination is of value for polypeptide engineering studies and may give an indication of what the polypeptide can tolerate in terms of mutagenesis without losing function.

[0849] Manipulation of the YIP nucleic acid molecules of the invention may result in the production of SRPs having functional differences from the wild-type YIPs. These polypeptides may be improved in efficiency or activity, may be present in greater numbers in the cell than is usual, or may be decreased in efficiency or activity.

[0850] There are a number of mechanisms by which the alteration of a YIP of the invention may directly affect tolerance to abiotic environmental stress and/or yield.

[0851] The effect of the genetic modification in plants regarding the tolerance to abiotic environmental stress can be assessed by growing the modified plant under less than suitable conditions and then analyzing the growth characteristics and/or metabolism of the plant. Such analysis techniques are well known to one skilled in the art, and include dry weight, fresh weight, polypeptide synthesis, carbohydrate synthesis, lipid synthesis, evapotranspiration rates, general plant and/or crop yield, flowering, reproduction, seed setting, root growth, respiration rates, photosynthesis rates, etc. (Applications of HPLC in Biochemistry in: Laboratory Techniques in Biochemistry and Molecular Biology, Vol. 17; Rehm et al., 1993 Biotechnology, Vol. 3, Chapter III: Product recovery and purification, page 469-714, VCH: Weinheim; Belter P. A. et al., 1988, Bioseparations: downstream processing for biotechnology, John Wiley and Sons; Kennedy J. F., and Cabral J. M. S., 1992, Recovery processes for biological materials, John Wiley and Sons; Shaeiwitz J. A. and Henry J. D., 1988, Biochemical separations, in Ulmann's Encyclopedia of Industrial Chemistry, Vol. B3, Chapter 11, page 1-27, VCH: Weinheim; and Dechow F. J., 1989, Separation and purification techniques in biotechnology, Noyes Publications).

[0852] For example, yeast expression vectors comprising the nucleic acids disclosed herein, or fragments thereof, can be constructed and transformed into S. cerevissiae using standard protocols. The resulting transgenic cells can then be assayed for generation or alteration of their tolerance to abiotic environmental stress and/or yield. Similarly, plant expression vectors comprising the nucleic acids disclosed herein, or fragments thereof, can be constructed and transformed into an appropriate plant cell such as Arabidopsis, soy, rape, maize, cotton, rice, wheat, Medicago truncatula, etc., using standard protocols. The resulting transgenic cells and/or plants derived therefrom can then be assayed for generation or alteration of their tolerance to abiotic environmental stressand/or yield.

[0853] The engineering of one or more genes according to table I and coding for the YIP of table II of the invention may also result in YIPs having altered activities which indirectly and/or directly impact the tolerance to abiotic environmental stress of algae, plants, ciliates, fungi, or other microorganisms like C. glutamicum.

[0854] Additionally, the sequences disclosed herein, or fragments thereof, can be used to generate knockout mutations in the genomes of various organisms, such as bacteria, mammalian cells, yeast cells, and plant cells (Girke, T., The Plant Journal 15, 39(1998)). The resultant knockout cells can then be evaluated for their ability or capacity to tolerate abiotic environmental stress conditions for their growth, their response to various abiotic environmental stress conditions, and the effect on the phenotype and/or genotype of the mutation. For other methods of gene inactivation, see U.S. Pat. No. 6,004,804 and Puttaraju et al., Nature Biotechnology 17, 246 (1999).

[0855] The aforementioned mutagenesis strategies for YIPs resulting in enhanced tolerance to abiotic environmental stress and/or incresased yield are not meant to be limiting; variations on these strategies will be readily apparent to one skilled in the art. Using such strategies, and incorporating the mechanisms disclosed herein, the nucleic acid and polypeptide molecules of the invention may be utilized to generate algae, ciliates, plants, fungi, or other microorganisms like C. glutamicum expressing mutated YIP nucleic acid and polypeptide molecules such that the tolerance to abiotic environmental stress and/or yield is improved.

[0856] The present invention also provides antibodies that specifically bind to a YIP, or a portion thereof, as encoded by a nucleic acid described herein. Antibodies can be made by many well-known methods (see, e.g. Harlow and Lane, “Antibodies; A Laboratory Manual”, Cold Spring Harbor Laboratory, Cold Spring Harbor, N.Y., (1988)). Briefly, purified antigen can be injected into an animal in an amount and in intervals sufficient to elicit an immune response. Antibodies can either be purified directly, or spleen cells can be obtained from the animal. The cells can then fused with an immortal cell line and screened for antibody secretion. The antibodies can be used to screen nucleic acid clone libraries for cells secreting the antigen. Those positive clones can then be sequenced. See, for example, Kelly et al., Bio/Technology 10, 163 (1992); Bebbington et al., Bio/Technology 10, 169 (1992).

[0857] The phrases “selectively binds” and “specifically binds” with the polypeptide refer to a binding reaction that is determinative of the presence of the polypeptide in a heterogeneous population of polypeptides and other biologics. Thus, under designated immunoassay conditions, the specified antibodies bound to a particular polypeptide do not bind in a significant amount to other polypeptides present in the sample. Selective binding of an antibody under such conditions may require an antibody that is selected for its specificity for a particular polypeptide. A variety of immunoassay formats may be used to select antibodies that selectively bind with a particular polypeptide. For example, solid-phase ELISA immunoassays are routinely used to select antibodies selectively immunoreactive with a polypeptide. See Harlow and Lane, “Antibodies, A Laboratory Manual,” Cold Spring Harbor Publications, New York, (1988), for a description of immunoassay formats and conditions that could be used to determine selective binding.

[0858] In some instances, it is desirable to prepare monoclonal antibodies from various hosts. A description of techniques for preparing such monoclonal antibodies may be found in Stites et al., eds., “Basic and Clinical Immunology,” (Lange Medical Publications, Los Altos, Calif., Fourth Edition) and references cited therein, and in Harlow and Lane, “Antibodies, A Laboratory Manual,” Cold Spring Harbor Publications, New York, (1988).

[0859] Gene expression in plants is regulated by the interaction of protein transcription factors with specific nucleotide sequences within the regulatory region of a gene. One example of transcription factors are polypeptides that contain zinc finger (ZF) motifs. Each ZF module is approximately 30 amino acids long folded around a zinc ion. The DNA recognition domain of a ZF protein is a α-helical structure that inserts into the major grove of the DNA double helix. The module contains three amino acids that bind to the DNA with each amino acid contacting a single base pair in the target DNA sequence. ZF motifs are arranged in a modular repeating fashion to form a set of fingers that recognize a contiguous DNA sequence. For example, a three-fingered ZF motif will recognize 9 bp of DNA. Hundreds of proteins have been shown to contain ZF motifs with between 2 and 37 ZF modules in each protein (Isalan M. et al., Biochemistry 37 (35),12026 (1998); Moore M. et al., Proc. Natl. Acad. Sci. USA 98 (4), 1432 (2001) and Moore M. et al., Proc. Natl. Acad. Sci. USA 98 (4), 1437 (2001); U.S. Pat. No. 6,007,988 and U.S. Pat. No. 6,013,453).

[0860] The regulatory region of a plant gene contains many short DNA sequences (cis-acting elements) that serve as recognition domains for transcription factors, including ZF proteins. Similar recognition domains in different genes allow the coordinate expression of several genes encoding enzymes in a metabolic pathway by common transcription factors. Variation in the recognition domains among members of a gene family facilitates differences in gene expression within the same gene family, for example, among tissues and stages of development and in response to environmental conditions.

[0861] Typical ZF proteins contain not only a DNA recognition domain but also a functional domain that enables the ZF protein to activate or repress transcription of a specific gene. Experimentally, an activation domain has been used to activate transcription of the target gene (U.S. Pat. No. 5,789,538 and patent application WO 95/19431), but it is also possible to link a transcription repressor domain to the ZF and thereby inhibit transcription (patent applications WO 00/47754 and WO 01/002019). It has been reported that an enzymatic function such as nucleic acid cleavage can be linked to the ZF (patent application WO 00/20622).

[0862] The invention provides a method that allows one skilled in the art to isolate the regulatory region of one or more YIP encoding genes from the genome of a plant cell and to design zinc finger transcription factors linked to a functional domain that will interact with the regulatory region of the gene. The interaction of the zinc finger protein with the plant gene can be designed in such a manner as to alter expression of the gene and preferably thereby to confer enhanced yield, e.g an improved yield-related trait, e.g. enhanced tolerance to abiotic environmental stress and/or increased yield like biomass.

[0863] In particular, the invention provides a method of producing a transgenic plant with a YIP coding nucleic acid, wherein expression of the nucleic acid(s) in the plant results in enhanced yield, e.g an improved yield-related trait, e.g. enhanced tolerance to abiotic environmental stress and/or increased yield like biomass as compared to a wild type plant comprising: (a) transforming a plant cell with an expression vector comprising a YIP encoding nucleic acid, and (b) generating from the plant cell a transgenic plant with enhanced yield, e.g an improved yield-related trait, e.g. enhanced tolerance to abiotic environmental stress and/or increased yield like biomass as compared to a wild type plant. For such plant transformation, binary vectors such as pBinAR can be used (Höfgen and Willmitzer, Plant Science 66, 221 (1990)). Moreover suitable binary vectors are for example pBIN19, pBI101, pGPTV or pPZP (Hajukiewicz P. et al., Plant Mol. Biol., 25, 989 (1994)).

[0864] Construction of the binary vectors can be performed by ligation of the cDNA into the T-DNA. 5′ to the cDNA a plant promoter activates transcription of the cDNA. A polyadenylation sequence is located 3′ to the cDNA. Tissue-specific expression can be achieved by using a tissue specific promoter as listed above. Also, any other promoter element can be used. For constitutive expression within the whole plant, the CaMV 35S promoter can be used. The expressed protein can be targeted to a cellular compartment using a signal peptide, for example for plastids, mitochondria or endoplasmic reticulum (Kermode, Crit. Rev. Plant Sci. 4 (15), 285 (1996)). The signal peptide is cloned 5′ in frame to the cDNA to archive subcellular localization of the fusion protein. One skilled in the art will recognize that the promoter used should be operatively linked to the nucleic acid such that the promoter causes transcription of the nucleic acid which results in the synthesis of a mRNA which encodes a polypeptide.

[0865] Alternate methods of transfection include the direct transfer of DNA into developing flowers via electroporation or Agrobacterium mediated gene transfer. Agrobacterium mediated plant transformation can be performed using for example the GV3101(pMP90) (Koncz and Schell, Mol. Gen. Genet. 204, 383 (1986)) or LBA4404 (Ooms et al., Plasmid, 7, 15 (1982); Hoekema et al., Nature, 303, 179 (1983)) Agrobacterium tumefaciens strain. Transformation can be performed by standard transformation and regeneration techniques (Deblaere et al., Nucl. Acids. Res. 13, 4777 (1994); Gelvin and Schilperoort, Plant Molecular Biology Manual, 2^{nd} Ed.—Dordrecht: Kluwer Academic Publ., 1995.—in Sect., Ringbuc Zentrale Signatur: BT11-P ISBN 0-7923-2731-4; Glick B. R. and Thompson J. E., Methods in Plant Molecular Biology and Biotechnology, Boca Raton: CRC Press, 1993.—360 S., ISBN 0-8493-5164-2). For example, rapeseed can be transformed via cotyledon or hypocotyl transformation (Moloney et al., Plant Cell Reports 8, 238 (1989); De Block et al., Plant Physiol. 91, 694 (1989)). Use of antibiotics for Agrobacterium and plant selection depends on the binary vector and the Agrobacterium strain used for transformation. Rapeseed selection is normally performed using kanamycin as selectable plant marker. Agrobacterium mediated gene transfer to flax can be performed using, for example, a technique described by Mlynarova et al., Plant Cell Report 13, 282 (1994)). Additionally, transformation of soybean can be performed using for example a technique described in European Patent No. 424 047, U.S. Pat. No. 5,322,783, European Patent No. 397 687, U.S. Pat. No. 5,376,543 or U.S. Pat. No. 5,169,770. Transformation of maize can be achieved by particle bombardment, polyethylene glycol mediated DNA uptake or via the silicon carbide fiber technique (see, for example, Freeling and Walbot “The maize handbook” Springer Verlag: New York (1993) ISBN 3-540-97826-7). A specific example of maize transformation is found in U.S. Pat. No. 5,990,387 and a specific example of wheat transformation can be found in PCT Application No. WO 93/07256.

[0866] Growing the modified plants under defined N-conditions, in an especial embodiment under abiotic environmental stress conditions, and then screening and analyzing the growth characteristics and/or metabolic activity assess the effect of the genetic modification in plants on enhanced yield, e.g an improved yield-related trait, e.g. enhanced tolerance to abiotic environmental stress and/or increased yield like biomass. Such analysis techniques are well known to one skilled in the art. They include beneath to screening (Rompp Lexikon Biotechnologie, Stuttgart/New York: Georg Thieme Verlag 1992, “screening” p. 701) dry weight, fresh weight, protein synthesis, carbohydrate synthesis, lipid synthesis, evapotranspiration rates, general plant and/or crop yield, flowering, reproduction, seed setting, root growth, respiration rates, photosynthesis rates, etc. (Applications of HPLC in Biochemistry in: Laboratory Techniques in Biochemistry and Molecular Biology, Vol. 17; Rehm et al., 1993 Biotechnology, Vol. 3, Chapter III: Product recovery and purification, page 469-714, VCH: Weinheim; Belter, P. A. et al., 1988 Bioseparations: downstream processing for biotechnology, John Wiley and Sons; Kennedy J. F. and Cabral J. M. S., 1992 Recovery processes for biological materials, John Wiley and Sons; Shaeiwitz J. A. and Henry J. D., 1988 Biochemical separations, in: Ullmann's Encyclopedia of Industrial Chemistry, Vol. B3, Chapter 11, page 1-27, VCH: Weinheim; and Dechow F. J. (1989) Separation and purification techniques in biotechnology, Noyes Publications).

[0867] In one embodiment, the present invention relates to a method for the identification of a gene product conferring enhanced tolerance to abiotic environmental stress and/or increased yield, in particular increase bionass as compared to a corresponding, e.g. non-transformed, wild type cell in a cell of an organism for example plant, comprising the following steps:
[0868] (a) contacting, e.g. hybridizing, some or all nucleic acid molecules of a sample, e.g. cells, tissues, plants or microorganisms or a nucleic acid library, which can contain a candidate gene encoding a gene product conferring enhanced tolerance to abiotic environmental stress efficiency and/or increased yield, with a nucleic acid molecule as shown in column 5 or 7 of table I A or B, or a functional homologue thereof;
[0869] (b) identifying the nucleic acid molecules, which hybridize under relaxed stringent conditions with said nucleic acid molecule, in particular to the nucleic acid molecule sequence shown in column 5 or 7 of table I, and, optionally, isolating the full length cDNA clone or complete genomic clone;
[0870] (c) identifying the candidate nucleic acid molecules or a fragment thereof in host cells, preferably in a plant cell;
[0871] (d) increasing the expressing of the identified nucleic acid molecules in the host cells for which enhanced yield, e.g an improved yield-related trait, e.g. enhanced tolerance to abiotic environmental stress and/or increased yield like biomass are desired;
[0872] (e) assaying the level of enhanced yield, e.g an improved yield-related trait, e.g. enhanced tolerance to abiotic environmental stress and/or increased yield like biomass of the host cells; and
[0873] (f) identifying the nucleic acid molecule and its gene product which increased expression confers increasing yield, e.g. increasing a yield-related trait, for example enhancing tolerance to abiotic environmental stress, for example increasing drought tolerance and/or low temperature tolerance and/or increasing nutrient use efficiency, increasing intrinsic yield and/or another mentioned yield-related trait in the host cell compared to the wild type.

[0874] Relaxed hybridization conditions are: After standard hybridization procedures washing steps can be performed at low to medium stringency conditions usually with washing conditions of 40°-55° C. and salt conditions between 2×SSC and 0.2×SSC with 0.1% SDS in comparison to stringent washing conditions as e.g. 60° to 68° C. with 0.1% SDS. Further examples can be found in the references listed above for the stringend hybridization conditions. Usually washing steps are repeated with increasing stringency and length until a useful signal to noise ratio is detected and depend on many factors as the target, e.g. its purity, GC-content, size etc, the probe, e.g.its length, is it a RNA or a DNA probe, salt conditions, washing or hybridization temperature, washing or hybridization time etc.

[0875] In another embodiment, the present invention relates to a method for the identification of a gene product the expression of which confers an enhanced yield, e.g an improved yield-related trait, e.g. enhanced tolerance to abiotic environmental stress and/or increased yield like biomass in a cell, comprising the following steps:
[0876] (a) identifiying a nucleic acid molecule in an organism, which is at least 20%, preferably 25%, more preferably 30%, even more preferred are 35%. 40% or 50%, even more preferred are 60%, 70% or 80%, most preferred are 90% or 95% or more homolog to the nucleic acid molecule encoding a protein comprising the polypeptide molecule as shown in column 5 or 7 of table II, or comprising a consensus sequence or a polypeptide motif as shown in column 7 of table IV, or being encoded by a nucleic acid molecule comprising a polynucleotide as shown in column 5 or 7 of table I application no. 1, or a homologue thereof as described herein, for example via homology search in a data bank;
[0877] (b) enhancing the expression of the identified nucleic acid molecules in the host cells;
[0878] (c) assaying the level of enhancement of yield, e.g an improved yield-related trait, e.g. enhanced tolerance to abiotic environmental stress and/or increased yield like biomass in the host cells; and
[0879] (d) identifying the host cell, in which the enhanced expression confers enhanced yield, e.g an improved yield-related trait, e.g. enhanced tolerance to abiotic environmental stress and/or increased yield like biomass in the host cell compared to a wild type.

[0880] Further, the nucleic acid molecule disclosed herein, in particular the nucleic acid molecule shown column 5 or 7 of table I A or B, may be sufficiently homologous to the sequences of related species such that these nucleic acid molecules may serve as markers for the construction of a genomic map in related organism or for association mapping. Furthermore natural variation in the genomic regions corresponding to nucleic acids disclosed herein, in particular the nucleic acid molecule shown column 5 or 7 of table I A or B, or homologous thereof may lead to variation in the activity of the proteins disclosed herein, in particular the proteins comprising polypeptides as shown in column 5 or 7 of table II A or B, or comprising the consensus sequence or the polypeptide motif as shown in column 7 of table IV, and their homolgous and in consequence in a natural variation of tolerance to abiotic environmental stress and/or yield.

[0881] In consequnce natural variation eventually also exists in form of more active allelic variants leading already to a relative increase inthe enhancement of tolerance to abiotic environmental stress and/or yield. Different variants of the nucleic acids molecule disclosed herein, in particular the nucleic acid comprising the nucleic acid molecule as shown column 5 or 7 of table I A or B, which corresponds to different enhancement of tolerance to abiotic environmental stress and/or yield levels can be indentified and used for marker assisted breeding for enhanced yield, e.g an improved yield-related trait, e.g. enhanced tolerance to abiotic environmental stress and/or increased yield like biomass.

[0882] Accordingly, the present invention relates to a method for breeding plants with enhanced yield, e.g an improved yield-related trait, e.g. enhanced tolerance to abiotic environmental stress and/or increased yield like biomass, comprising
[0883] (a) selecting a first plant variety with enhanced yield, e.g an improved yield-related trait, e.g. enhanced tolerance to abiotic environmental stress and/or increased yield like biomass based on increased expression of a nucleic acid of the invention as disclosed herein, in particular of a nucleic acid molecule comprising a nucleic acid molecule as shown in column 5 or 7 of table I A or B, or a polypeptide comprising a polypeptide as shown in column 5 or 7 of table II A or B, or comprising a consensus sequence or a polypeptide motif as shown in column 7 of table IV, or a homologue thereof as described herein;
[0884] (b) associating the level of enhancement of the tolerance to abiotic environmental stress and/or yield with the expression level or the genomic structure of a gene encoding said polypeptide or said nucleic acid molecule;

[0885] (c) crossing the first plant variety with a second plant variety, which significantly differs in its level of enhancement of the tolerance to abiotic environmental stress and/or yield; and
[0886] (d) identifying, which of the offspring varieties has got increased levels of enhanced tolerance to abiotic environmental stress and/or yield by the expression level of said polypeptide or nucleic acid molecule or the genomic structure of the genes encoding said polypeptide or nucleic acid molecule of the invention.

[0887] In one embodiment, the expression level of the gene according to step (b) is increased.

[0888] Yet another embodiment of the invention relates to a process for the identification of a compound conferring increased yield, e.g an improved yield-related trait, e.g. enhanced tolerance to abiotic environmental stress and/or increased yield like biomass as compared to a corresponding, e.g. non-transformed, wild type plant cell, a plant or a part thereof in a plant cell, a plant or a part thereof, a plant or a part thereof, comprising the steps:
[0889] (a) culturing a plant cell; a plant or a part thereof maintaining a plant expressing the polypeptide as shown in column 5 or 7 of table II, or being encoded by a nucleic acid molecule comprising a polynucleotide as shown in column 5 or 7 of table I, or a homologue thereof as described herein or a polynucleotide encoding said polypeptide and conferring an enhanced yield, e.g an improved yield-related trait, e.g. enhanced tolerance to abiotic environmental stress and/or increased yield like biomass as compared to a corresponding, e.g. non-transformed, wild type plant cell, a plant or a part thereof; a non-transformed wild type plant or a part thereof and providing a readout system capable of interacting with the polypeptide under suitable conditions which permit the interaction of the polypeptide with this readout system in the presence of a chemical compound or a sample comprising a plurality of chemical compounds and capable of providing a detectable signal in response to the binding of a chemical compound to said polypeptide under conditions which permit the expression of said readout system and of the protein as shown in column 5 or 7 of table II, or being encoded by a nucleic acid molecule comprising a polynucleotide as shown in column 5 or 7 of table I application no. 1, or a homologue thereof as described herein; and
[0890] (b) identifying if the chemical compound is an effective agonist by detecting the presence or absence or decrease or increase of a signal produced by said readout system.

[0891] Said compound may be chemically synthesized or microbiologically produced and/or comprised in, for example, samples, e.g., cell extracts from, e.g., plants, animals or microorganisms, e.g. pathogens. Furthermore, said compound(s) may be known in the art but hitherto not known to be capable of suppressing the polypeptide of the present invention. The reaction mixture may be a cell free extract or may comprise a cell or tissue culture. Suitable set ups for the process for identification of a compound of the invention are known to the person skilled in the art and are, for example, generally described in Alberts et al., Molecular Biology of the Cell, third edition (1994), in particular Chapter 17. The compounds may be, e.g., added to the reaction mixture, culture medium, injected into the cell or sprayed onto the plant.

[0892] If a sample containing a compound is identified in the process, then it is either possible to isolate the compound from the original sample identified as containing the compound capable of activating or enhancing the yield, e.g an improved yield-related trait, e.g. enhanced tolerance to abiotic environmental stress and/or increased yield like biomass as compared to a corresponding, e.g. non-transformed, wild type, or one can further subdivide the original sample, for example, if it consists of a plurality of different compounds, so as to reduce the number of different substances per sample and repeat the method with the subdivisions of the original sample. Depending on the complexity of the samples, the steps described above can be performed several times, preferably until the sample identified according to the said process only comprises a limited number of or only one substance(s). Preferably said sample comprises substances of similar chemical and/or physical properties, and most preferably said substances are identical. Preferably, the compound identified according to the described method above or its derivative is further formulated in a form suitable for the application in plant breeding or plant cell and tissue culture.

[0893] The compounds which can be tested and identified according to said process may be expression libraries, e.g., cDNA expression libraries, peptides, proteins, nucleic acids, antibodies, small organic compounds, hormones, peptidomimetics, PNAs or the like (Milner, Nature Medicine 1, 879 (1995); Hupp, Cell 83, 237 (1995); Gibbs, Cell 79, 193 (1994), and references cited supra). Said compounds can also be functional derivatives or analogues of known inhibitors or activators. Methods for the preparation of chemical derivatives and analogues are well known to those skilled in the art and are described in, for example, Beilstein, Handbook of Organic Chemistry, Springer, New York Inc., 175 Fifth Avenue, New York, N.Y. 10010 U.S.A. and Organic Synthesis, Wiley, New York, USA. Furthermore, said derivatives and analogues can be tested for their effects according to methods known in the art. Furthermore, peptidomimetics and/or computer aided design of appropriate derivatives and analogues can be used, for example, according to the methods described above. The cell or tissue that may be employed in the process preferably is a host cell, plant cell or plant tissue of the invention described in the embodiments hereinbefore.

[0894] Thus, in a further embodiment the invention relates to a compound obtained or identified according to the method for identifying an agonist of the invention said compound being an antagonist of the polypeptide of the present invention.

[0895] Accordingly, in one embodiment, the present invention further relates to a compound identified by the method for identifying a compound of the present invention.

[0896] In one embodiment, the invention relates to an antibody specifically recognizing the compound or agonist of the present invention.

[0897] The invention also relates to a diagnostic composition comprising at least one of the aforementioned nucleic acid molecules, antisense nucleic acid molecule, RNAi, snRNA, dsRNA, siRNA, miRNA, ta-siRNA, cosuppression molecule, ribozyme, vectors, proteins, antibodies or compounds of the invention and optionally suitable means for detection.

[0898] The diagnostic composition of the present invention is suitable for the isolation of mRNA from a cell and contacting the mRNA so obtained with a probe comprising a nucleic acid probe as described above under hybridizing conditions, detecting the presence of mRNA hybridized to the probe, and thereby detecting the expression of the protein in the cell. Further methods of detecting the presence of a protein according to the present invention comprise immunotechniques well known in the art, for example enzyme linked immunoadsorbent assay. Furthermore, it is possible to use the nucleic acid molecules according to the invention as molecular markers or primers in plant breeding. Suitable means for detection are well known to a person skilled in the art, e.g. buffers and solutions for hydridization assays, e.g. the afore-mentioned solutions and buffers, further and means for Southern-, Western-, Northern- etc. -blots, as e.g. described in Sambrook et al. are known. In one embodiment diagnostic composition contain PCR primers designed to specifically detect the presense or the expression level of the nucleic acid molecule to be reduced in the process of the invention, e.g. of the nucleic acid molecule of the invention, or to descriminate between different variants or alleles of the nucleic acid molecule of the invention or which activity is to be reduced in the process of the invention.

[0899] In another embodiment, the present invention relates to a kit comprising the nucleic acid molecule, the vector, the host cell, the polypeptide, or the antisense, RNAi, snRNA, dsRNA, siRNA, miRNA, ta-siRNA, cosuppression molecule, or ribozyme molecule, or the viral nucleic acid molecule, the antibody, plant cell, the plant or plant tissue, the harvestable part, the propagation material and/or the compound and/or agonist identified according to the method of the invention.

[0900] The compounds of the kit of the present invention may be packaged in containers such as vials, optionally with/in buffers and/or solution. If appropriate, one or more of said components might be packaged in one and the same container. Additionally or alternatively, one or more of said components might be adsorbed to a solid support as, e.g. a nitrocellulose filter, a glas plate, a chip, or a nylon membrane or to the well of a micro titerplate. The kit can be used for any of the herein described methods and embodiments, e.g. for the production of the host cells, transgenic plants, pharmaceutical compositions, detection of homologous sequences, identification of antagonists or agonists, as food or feed or as a supplement thereof or as supplement for the treating of plants, etc.

[0901] Further, the kit can comprise instructions for the use of the kit for any of said embodiments.

[0902] In one embodiment said kit comprises further a nucleic acid molecule encoding one or more of the aforementioned protein, and/or an antibody, a vector, a host cell, an antisense nucleic acid, a plant cell or plant tissue or a plant. In another embodiment said kit comprises PCR primers to detect and discrimante the nucleic acid molecule to be reduced in the process of the invention, e.g. of the nucleic acid molecule of the invention.

[0903] In a further embodiment, the present invention relates to a method for the production of an agricultural composition providing the nucleic acid molecule for the use according to the process of the invention, the nucleic acid molecule of the invention, the vector of the invention, the antisense, RNAi, snRNA, dsRNA, siRNA, miRNA, ta-siRNA, cosuppression molecule, ribozyme, or antibody of the invention, the viral nucleic acid molecule of the invention, or the polypeptide of the invention or comprising the steps of the method according to the invention for the identification of said compound or agonist; and formulating the nucleic acid molecule, the vector or the polypeptide of the invention or the agonist, or compound identified according to the methods or processes of the present invention or with use of the subject matters of the present invention in a form applicable as plant agricultural composition.

[0904] In another embodiment, the present invention relates to a method for the production of the plant culture composition comprising the steps of the method of the present invention; and formulating the compound identified in a form acceptable as agricultural composition.

[0905] Under “acceptable as agricultural composition” is understood, that such a composition is in agreement with the laws regulating the content of fungicides, plant nutrients, herbizides, etc. Preferably such a composition is without any harm for the protected plants and the animals (humans included) fed therewith.

[0906] Throughout this application, various publications are referenced. The disclosures of all of these publications and those references cited within those publications in their entireties are hereby incorporated by reference into this application in order to more fully describe the state of the art to which this invention pertains.

[0907] It should also be understood that the foregoing relates to preferred embodiments of the present invention and that numerous changes and variations may be made therein without departing from the scope of the invention. The invention is further illustrated by the following examples, which are not to be construed in any way as limiting. On the contrary, it is to be clearly understood that various other embodiments, modifications and equivalents thereof, which, after reading the description herein, may suggest themselves to those skilled in the art without departing from the spirit of the present invention and/or the scope of the claims.

[0908] Further, in one embodiment, the method of the present invention comprises harvesting the plant or a part of the plant produced or planted and producing fuel with or from the harvested plant or part thereof. Further, in one embodiment, the method of the present invention comprises harvesting a plant part useful for starch isolation and isolating starch from this plant part, wherein the plant is plant useful for starch production, e.g. potato. Further, in one embodiment, the method of the present invention comprises harvesting a plant part useful for oil isolation and isolating oil from this plant part, wherein the plant is plant useful for oil production, e.g. oil seed rape or Canola, cotton, soy, or sunflower.

[0909] For example, in one embodiment, the oil content in the corn seed is increased. Thus, the present invention relates to the production of plants with increased oil content per acre (harvestable oil).

[0910] For example, in one embodiment, the oil content in the soy seed is increased. Thus, the present invention relates to the production of soy plants with increased oil content per acre (harvestable oil).

[0911] For example, in one embodiment, the oil content in the OSR seed is increased. Thus, the present invention relates to the production of OSR plants with increased oil content per acre (harvestable oil).

[0912] For example, the present invention relates to the production of cotton plants with increased oil content per acre (harvestable oil).

[0913] Incorperated by reference are further the following applications of which the present applications takes priority: EP07150175.3 filed Dec. 19, 2007.

[0914] The present invention is exemplified by the following examples without meant to be limited by the example's disclosure.

### EXAMPLE 1

[0915] Engineering Arabidopsis plants with enhanced tolerance to environmental stress and/or increased yield by over-expressing Yield Increase Protein (YIP) genes, e.g. expressing genes of the present invention.

[0916] CHECK: Manuel: When using past tense here, only refer to column 5

[0917] Cloning of the sequences of the present invention as shown in table I, column 5 and 7, for the expression in plants.

[0918] Unless otherwise specified, standard methods as described in Sambrook et al., Molecular Cloning: A laboratory manual, Cold Spring Harbor 1989, Cold Spring Harbor Laboratory Press are used.

[0919] The inventive sequences as shown in table I, column 5 and 7, were amplified by PCR as described in the protocol of the PfuUltra, Pfu Turbo or Herculase DNA polymerase (Stratagene).

[0920] The composition for the protocol of the PfuUltra, Pfu Turbo or Herculase DNA poly-merase was as follows: 1× PCR buffer (Stratagene), 0.2 mM of each dNTP, 100 ng genomic DNA of S. cerevissiae (strain S288C; Research Genetics, Inc., now Invitrogen), E. coli (strain MG1655; E. coli Genetic Stock Center), Synechocystis sp. (strain PCC6803), Azotobacter vinelandii (strain N. R. Smith, 16), or 50 ng cDNA from various tissues and developmental stages of Arabidopsis thaliana (ecotype Columbia) or Glycine max (variety Resnick), 50 pmol forward primer, 50 pmol reverse primer, with or without 1 M Betaine, 2.5 u PfuUltra, Pfu Turbo or Herculase DNA polymerase.

[0921] The amplification cycles were as follows:

[0922] 1 cycle of 2-3 minutes at 94-95° C.,

[0923] then 25-36 cycles with 30-60 seconds at 94-95° C., 45 seconds at 50° C., 30 seconds at 50-60° C. and 210-480 seconds at 72° C.,

[0924] followed by 1 cycle of 5-10 minutes at 72° C.,

[0925] then 4-16° C.—preferably for E. coli, Synechocystis sp., Azotobacter vinelandii and S. cerevisiae.

[0926] In the case of Arabidopsis thaliana or Glycine max the amplificaton cycles were as follows:

[0927] 1 cycle at 94° C. for 2 minutes,

[0928] then 1 cycle with 30 seconds at 94° C., 30 seconds at 61° C., 15 minutes at 72° C.,

[0929] then 2 cycles with 30 seconds at 94° C., 30 seconds at 60° C., 15 minutes at 72° C.,

[0930] then 3 cycles with 30 seconds at 94° C., 30 seconds at 59° C., 15 minutes at 72° C.,

[0931] then 4 cycles with 30 seconds at 94° C., 30 seconds at 58° C., 15 minutes at 72° C.,

[0932] then 25 cycles with 30 seconds at 94° C., 30 seconds at 57° C., 15 minutes at 72° C.,

[0933] then 1 cycle with 10 minutes at 72° C.,

[0934] then finally 4-16° C.

[0935] The following adapter sequences were added to S. cerevissiae ORF specific primers (see table III) for cloning purposes:
[0936] i) forward primer: 5′-GGAATTCCAGCTGACCACC-3′ SEQ ID NO: 7
[0937] ii) reverse primer: 5′-GATCCCCGGGAATTGCCATG-3′ SEQ ID NO: 8

[0938] The following adapter sequences were added to E. coli, Synechocystis sp., Azotobacter vinelandii, Arabidopsis thaliana, Saccharomyces cerevisiae and Glycine max ORF specific primers for cloning purposes:
[0939] iii) forward primer: 5′-TTGCTCTTCC-3′ SEQ ID NO: 9
[0940] iiii) reverse primer: 5′-TTGCTCTTCG-3′ SEQ ID NO: 10

[0941] Therefore for amplification and cloning of S. cerevissiae SEQ ID NO: 2341, a primer consisting of the adaptor sequence i) and the ORF specific sequence SEQ ID NO: 2343 and a second primer consisting of the adaptor sequence ii) and the ORF specific sequence SEQ ID NO: 2344 were used.

[0942] For amplification and cloning of S. cerevissiae SEQ ID NO: 2645, a primer consisting of the adaptor sequence iii) and the ORF specific sequence SEQ ID NO: 2655 and a second primer consisting of the adaptor sequence iiii) and the ORF specific sequence SEQ ID NO: 2656 were used.

[0943] For amplification and cloning of Escherichia coli SEQ ID NO: 1225, a primer consisting of the adaptor sequence iii) and the ORF specific sequence SEQ ID NO: 1319 and a second primer consisting of the adaptor sequence iiii) and the ORF specific sequence SEQ ID NO: 1320 were used.

[0944] For amplification and cloning of Arabidopsis thaliana SEQ ID NO: 39, a primer consisting of the adaptor sequence iii) and the ORF specific sequence SEQ ID NO: 131 and a second primer consisting of the adaptor sequence iiii) and the ORF specific sequence SEQ ID NO: 132 were used.

[0945] For amplification and cloning of Azotobacter vinelandii SEQ ID NO: 137, a primer consisting of the adaptor sequence iii) and the ORF specific sequence SEQ ID NO: 977 and a second primer consisting of the adaptor sequence iiii) and the ORF specific sequence SEQ ID NO: 978 were used.

[0946] For amplification and cloning of Synechocystis sp. SEQ ID NO: 2214, a primer consisting of the adaptor sequence iii) and the ORF specific sequence SEQ ID NO: 2332 and a second primer consisting of the adaptor sequence iiii) and the ORF specific sequence SEQ ID NO: 2333 were used.

[0947] For amplification and cloning of Glycine max SEQ ID NO: 2172, a primer consisting of the adaptor sequence iii) and the ORF specific sequence SEQ ID NO: 2210 and a second primer consisting of the adaptor sequence iiii) and the ORF specific sequence SEQ ID NO: 2211 were used.

[0948] Following these examples every sequence disclosed in table I, preferably column 5, can be cloned by fusing the adaptor sequences to the respective specific primers sequences as disclosed in table III, column 7.

[0949] Construction of binary vectors for non-targeted and targeted expression of proteins.

[0950] For non-targeted expression the binary vectors used for cloning were VC-MME220-1 SEQ ID NO: 1 (FIG. 1a) or VC-MME220-1qcz SEQ ID NO: 2902 (FIG. 1b), VC-MME221-1 SEQ ID NO: 2 (FIG. 2a) or VC-MME221-1qcz SEQ ID NO: 2905 (FIG. 2b), VC-MME489-1p SEQ ID NO: 15 (FIG. 5a) or VC-MME489-1QCZ SEQ ID NO: 2906 (FIG. 5b) and Vector VC-MME0289-1qcz SEQ ID NO: 38 (FIG. 7).

[0951] The binary vectors used for cloning the targeting sequences were VC-MME489-1 p SEQ ID NO: 15 (FIG. 5a) or VC-MME489-1QCZ SEQ ID NO: 2906 (FIG. 5b), VC-MME221-1qcz SEQ ID NO: 2905 (FIG. 2b) and pMTX0270p SEQ ID NO: 16 (FIG. 6).

[0952] Other useful binary vectors are known to the skilled worker; an overview of binary vectors and their use can be found in Hellens R., Mullineaux P. and Klee H., (Trends in Plant Science, 5 (10), 446 (2000)). Such vectors have to be equally equipped with appropriate promoters and targeting sequences.

[0953] Amplification of the Targeting Sequence of the Gene FNR from Spinacia oleracea

[0954] In order to amplify the targeting sequence of the FNR gene from S. oleracea, genomic DNA was extracted from leaves of 4 weeks old S. oleracea plants (DNeasy Plant Mini Kit, Qiagen, Hilden). The gDNA was used as the template for a PCR.

[0955] To enable cloning of the transit sequence into the vector VC-MME0489-1p or VC-MME489-1QCZ an EcoRI restriction enzyme recognition sequence was added to both the forward and reverse primers, whereas for cloning in the vectors pMTX0270p a PmeI restriction enzyme recognition sequence was added to the forward primer and a NcoI site was added to the reverse primer.

SEQ ID NO: 11

| | |
|---|---|
| FNR5EcoResgen | ATA GAA TTC GCA TAA ACT TAT CTT CAT |
| | AGT TGC C |

SEQ ID NO: 12

| | |
|---|---|
| FNR3EcoResgen | ATA GAA TTC AGA GGC GAT CTG GGC CCT |

SEQ ID NO: 13

| | |
|---|---|
| FNR5PmeColic | ATA GTT TAA ACG CAT AAA CTT ATC TTC |
| | ATA GTT GCC |

SEQ ID NO: 14

| | |
|---|---|
| FNR3NcoColic | ATA CCA TGG AAG AGC AAG AGG CGA TCT |
| | GGG CCC T |

[0956] The resulting sequence SEQ ID NO: 36 amplified from genomic spinach DNA, comprised a 5′UTR (bp 1-165), and the coding region (bp 166-273 and 351-419). The coding sequence is interrupted by an intronic sequence from bp 274 to bp 350:

(SEQ ID NO: 36)
gcataaacttatcttcatagttgccactccaatttgctccttgaat
ctcctccacccaatacataatccactcctccatcacccacttcact
actaaatcaaacttaactctgtttttctctctcctcctttcatttc
ttattcttccaatcatcgtactccgccatgaccaccgctgtcaccg
ccgctgtttctttcccctctaccaaaaccacctctctctccgcccg
aagctcctccgtcatttcccctgacaaaatcagctacaaaaaggtg
attcccaatttcactgtgttttttattaataatttgttattttgat
gatgagatgattaatttgggtgctgcaggttcctttgtactacagg
aatgtatctgcaactgggaaaatgggacccatcagggcccagatcg
cctct

[0957] The PCR fragment derived with the primers FNR5EcoResgen and FNR3EcoResgen was digested with EcoRI and ligated in the vector VC-MME0489-1p that had also been digested with EcoRI. The correct orientation of the FNR targeting sequence was tested by sequencing. The vector generated in this ligation step was VC-MME354-1 SEQ ID NO: 3

[0958] The PCR fragment derived with the primers FNR5PmeColi and FNR3NcoColi was digested with SmaI and NcoI and ligated in the vector pMTX0270p (FIG. 6) SEQ ID NO: 16 that had also been digested with PmeI and NcoI. The vector generated in this ligation step was VC-MME432-1 SEQ ID NO: 5 (FIG. 4a) or VC-MME432-1qcz SEQ ID NO: 2903 (FIG. 4b).

[0959] Construction of binary vectors for mitochondric-targeted expression of proteins: Amplification of the mitochondrial targeting sequence of the gene IVD from Arabidopsis thaliana and construction of vector for mitochondrial-targeted expression in preferential green tissues or preferential in seeds.

[0960] In order to amplify the targeting sequence of the IVD gene from A. thaliana, genomic DNA was extracted from leaves of A.thaliana plants (DNeasy Plant Mini Kit, Qiagen, Hilden). The gDNA was used as the template for a PCR.

[0961] To enable cloning of the transit sequence into the VC-MME221-1qcz a PmeI restriction enzyme recognition sequence was added to the forward primer and a NcoI site was added to the reverse primer.

IVD5PmeColic
SEQ ID NO: 3754
ATA gTT TAA ACA TgC AgA ggT TTT TCT CCg C
IVD3NcoColic
SEQ ID NO: 3755
ATA CCA Tgg AAg AgC AAA ggA gAg ACg AAg AAC gAg

[0962] The resulting sequence (SEQ ID NO: 3756) amplified from genomic A.thaliana DNA with IVD5PmeColic and IVD3NcoColic comprised 89 bp:

SEQ ID NO: 3756
atgcagaggtttttctccgccagatcgattctcggttacgccgtcaa
gacgcggaggaggtctttctcttctcgttcttcgtctctcct

[0963] The PCR fragment derived with the primers IVD5PmeColic and IVD3NcoColic was digested with PmeI and NcoI and ligated in the vector VC-MME221-1qcz that had been digested with SmaI and NcoI. The vector generated in this ligation step was VC-MME445-1qcz SEQ ID NO 3752 (FIG. 8).

[0964] For mitochondrial-targeted constitutive expression in preferentially green tissues and seeds the PcUbi promoter was used in context of the vector VC-MME445-1 qcz for ORFs from Saccharomyces cerevisiae, Escherichia coli, Synechocystis sp., Azotobacter vinelandii, Arabidopsis thaliana, Glycine max, resulting in each case in an “in-frame” fusion between the IVD sequence and the respective ORFs.

[0965] For cloning the ORF of SEQ ID NO: 2341, from S. cerevissiae the vector DNA was treated with the restriction enzyme NcoI. For cloning of ORFs from E. coli, Azotobacter vinelandii, Arabidopsis thaliana, Glycine max and Synechocystis sp. the vector DNA was treated with the restriction enzymes PacI and NcoI following the standard protocol (MBI Fermentas). The reaction was stopped by inactivation at 70° C. for 20 minutes and purified over QIAquick columns following the standard protocol (Qiagen).

[0966] Then the PCR-product representing the amplified ORF and the vector DNA were treated with T4 DNA polymerase according to the standard protocol (MBI Fermentas) to produce single stranded overhangs with the parameters 1 unit T4 DNA polymerase at 37° C. for 2-10 minutes for the vector and 1 unit T4 DNA polymerase at 15° C. for 10-60 minutes for the PCR product representing SEQ ID NO: 2341.

[0967] The reaction was stopped by addition of high-salt buffer and purified over QIAquick columns following the standard protocol (Qiagen).

[0968] According to this example the skilled person is able to clone all sequences disclosed in table I, preferably column 5.

[0969] Approximately 30 ng of prepared vector and a defined amount of prepared amplificate were mixed and hybridized at 65° C. for 15 minutes followed by 37° C. 0.1° C./1 seconds, followed by 37° C. 10 minutes, followed by 0.1° C./1 seconds, then 4° C.

[0970] The ligated constructs were transformed in the same reaction vessel by addition of competent E. coli cells (strain DHSalpha) and incubation for 20 minutes at 1° C. followed by a heat shock for 90 seconds at 42° C. and cooling to 4° C. Then, complete medium (SOC) was added and the mixture was incubated for 45 minutes at 37° C. The entire mixture was subsequently plated onto an agar plate with 0.05 mg/ml kanamycine and incubated overnight at 37° C.

[0971] The outcome of the cloning step was verified by amplification with the aid of primers which bind upstream and downstream of the integration site, thus allowing the amplification of the insertion. The amplifications were carried out as described in the protocol of Taq DNA polymerase (Gibco-BRL).

[0972] The amplification cycles were as follows:

[0973] 1 cycle of 5 minutes at 94° C., followed by 35 cycles of in each case 15 seconds at 94° C., 15 seconds at 50-66° C. and 5 minutes at 72° C., followed by 1 cycle of 10 minutes at 72° C., then 4° C.

[0974] Several colonies were checked, but only one colony for which a PCR product of the expected size was detected was used in the following steps.

[0975] A portion of this positive colony was transferred into a reaction vessel filled with complete medium (LB) supplemented with kanamycin and incubated overnight at 37° C.

[0976] The plasmid preparation was carried out as specified in the Qiaprep standard protocol (Qiagen).

[0977] Generation of Transgenic Plants which Express SEQ ID NO: 2341 or any other Sequence Disclosed in Table I, Preferably Column 5

[0978] 1-5 ng of the plasmid DNA isolated was transformed by electroporation into competent cells of Agrobacterium tumefaciens, of strain GV 3101 pMP90 (Koncz and Schell, Mol. Gen. Gent. 204, 383 (1986)). Thereafter, complete medium (YEP) was added and the mixture was transferred into a fresh reaction vessel for 3 hours at 28° C. Thereafter, all of the reaction mixture was plated onto YEP agar plates supplemented with the respective antibiotics, e.g. rifampicine (0.1 mg/ml), gentamycine (0.025 mg/ml and kanamycine (0.05 mg/ml) and incubated for 48 hours at 28° C.

[0979] The agrobacteria that contains the plasmid construct were then used for the transformation of plants.

[0980] A colony was picked from the agar plate with the aid of a pipette tip and taken up in 3 ml of liquid TB medium, which also contained suitable antibiotics as described above. The preculture was grown for 48 hours at 28° C. and 120 rpm.

[0981] 400 ml of LB medium containing the same antibiotics as above were used for the main culture. The preculture was transferred into the main culture. It was grown for 18 hours at 28° C. and 120 rpm. After centrifugation at 4 000 rpm, the pellet was resuspended in infiltration medium (MS medium, 10% sucrose).

[0982] In order to grow the plants for the transformation, dishes (Piki Saat 80, green, provided with a screen bottom, 30×20×4.5 cm, from Wiesauplast, Kunststofftechnik, Germany) were half-filled with a GS 90 substrate (standard soil, Werkverband E. V., Germany). The dishes were watered overnight with 0.05% Proplant solution (Chimac-Apriphar, Belgium). A. thaliana C24 seeds (Nottingham Arabidopsis Stock Centre, UK; NASC Stock N906) were scattered over the dish, approximately 1 000 seeds per dish. The dishes were covered with a hood and placed in the stratification facility (8 h, 110 μmol/m²s¹, 22° C.; 16 h, dark, 6° C.). After 5 days, the dishes were placed into the short-day controlled environment chamber (8 h, 130 μmol/m²s¹, 22° C.; 16 h, dark, 20° C.), where they remained for approximately 10 days until the first true leaves had formed.

[0983] The seedlings were transferred into pots containing the same substrate (Teku pots, 7 cm, LC series, manufactured by Poppelmann GmbH & Co, Germany). Five plants were pricked out into each pot. The pots were then returned into the short-day controlled environment chamber for the plant to continue growing.

[0984] After 10 days, the plants were transferred into the greenhouse cabinet (supplementary illumination, 16 h, 340 μE/m²s, 22° C.; 8 h, dark, 20° C.), where they were allowed to grow for further 17 days.

[0985] For the transformation, 6-week-old Arabidopsis plants, which had just started flowering were immersed for 10 seconds into the above-described agrobacterial suspension which had previously been treated with 10 μl Silwett L77 (Crompton S. A., Osi Specialties, Switzerland). The method in question is described by Clough J. C. and Bent A. F. (Plant J. 16, 735 (1998)).

[0986] The plants were subsequently placed for 18 hours into a humid chamber. Thereafter, the pots were returned to the greenhouse for the plants to continue growing. The plants remained in the greenhouse for another 10 weeks until the seeds were ready for harvesting.

[0987] Depending on the tolerance marker used for the selection of the transformed plants the harvested seeds were planted in the greenhouse and subjected to a spray selection or else first sterilized and then grown on agar plates supplemented with the respective selection agent. Since the vector contained the bar gene as the tolerance marker, plantlets were sprayed four times at an interval of 2 to 3 days with 0.02% BASTA® and transformed plants were allowed to set seeds.

[0988] The seeds of the transgenic A. thaliana plants were stored in the freezer (at −20° C.).

[0989] Plant Screening for Yield Increase Under Standardised Growth Conditions

[0990] In this experiment, a plant screening for yield increase (in this case: biomass yield increase) under standardised growth conditions in the absence of substantial abiotic stress has been performed. In a standard experiment soil is prepared as 3.5:1 (v/v) mixture of nutrient rich soil (GS90, Tantau, Wansdorf, Germany) and quarz sand. Alternatively, plants were sown on nutrient rich soil (GS90, Tantau, Germany). Pots were filled with soil mixture and placed into trays. Water was added to the trays to let the soil mixture take up appropriate amount of water for the sowing procedure. The seeds for transgenic A. thaliana plants and their non-trangenic controls were sown in pots (6 cm diameter). Then the filled tray was covered with a transparent lid and transferred into a precooled (4° C-5° C.) and darkened growth chamber. Stratification was established for a period of 3 days in the dark at 4° C-5° C. or, alternatively, for 4 days in the dark at 4° C. Germination of seeds and growth was initiated at a growth condition of 20° C., 60% relative humidity, 16 h photoperiod and illumination with fluorescent light at 200 μmol/m2s or, alternatively at 220 μmol/m2s. Covers were removed 7-8 days after sowing. BASTA selection was done at day 9 after sowing by spraying pots with plantlets from the top. In the standard experiment, a 0.07% (v/v) solution of BASTA concentrate (183 g/l glufosinate-ammonium) in tap water was sprayed once or, alternatively, a 0.02% (v/v) solution of BASTA was sprayed three times. Plants were individualized 13-14 days after sowing by removing the surplus of seedlings and leaving one seedling in soil.

[0991] Transgenic events and wildtype control plants were evenly distributed over the chamber. Watering was carried out every two days after removing the covers in a standard experiment or, alternatively, every day. For measuring biomass performance, plant fresh weight was determined at harvest time (26-27 days after sowing) by cutting shoots and weighing them. Alternatively, the harvest time was 24-25 days after sowing. Beside weighing, phenotypic information was added in case of plants that differ from the wild type control. Plants were in the stage prior to flowering and prior to growth of inflorescence when harvested. Significance values for the statistical significance of the biomass changes were calculated by applying the ‘student's’ t test (parameters: two-sided, unequal variance).

[0992] In a standard procedure three successive experiments were conducted. In the first experiment, one individual of each transformed line/event was tested. In the second experiment, the events that had been determined as high biomass yielding from the first experiment in comparison to wild type, were put through a confirmation screen according to the same experimental procedures. A maximum of 10 plants of each high biomass yielding event were grown, treated and measured as before.

[0993] In the first two experiments biomass production was compared to wild type plants.

[0994] In the third experiment (table 1), up to 20 replicates of each confirmed tolerant event, i.e. those that had been scored as high yielding in the second experiment, were grown, treated and scored as before.

[0995] In the alternative procedure, in the first experiment, one individual of each transformed event and three events per transformed construct was tested. In the second experiment (see table 1), the events of a transformed construct that had been determined as high biomass yielding from the first experiment and at least three other sibling events, were put through a confirmation screen according to the same experimental procedures. Individuals of each event were grown, treated and measured as before. In the two experiments biomass production was compared to wild type plants.

[0996] Table VII: Biomass production of transgenic A. thaliana developed under ambient growth conditions.

[0997] Biomass production was measured by weighing plant rosettes. Biomass increase was calculated as ratio of average weight for trangenic plants compared to average weight of wild type control plants from the same experiment. The minimum and maximum biomass increase seen within the group of transgenic events is given for a locus with all events showing a significance value <0.1 and a biomass increase >10% (ratio >1.1). Table VIIId corresponds to Table VII.

TABLE VII

| | | | Biomass | Biomass |
|---|---|---|---|---|
| | | | Increase | Increase |
| SeqID | Target | Locus | min | max |
| 39 | Cytoplasmic | AT3G60210 | 1.365 | 1.365 |
| 137 | Cytoplasmic | AVINDRAFT_2382 | 1.231 | 1.231 |
| 982 | Cytoplasmic | AVINDRAFT_2913 | 1.429 | 1.429 |
| 1225 | Cytoplasmic | B0252 | 1.489 | 1.489 |
| 1327 | Cytoplasmic | B0730 | 1.443 | 1.593 |
| 1425 | Cytoplasmic | B1926 | 1.319 | 1.325 |
| 1449 | Cytoplasmic | B2426 | 1.246 | 1.246 |
| 2172 | Cytoplasmic | GM02LC13630 | 1.373 | 1.373 |
| 2214 | Mitochondrial | SLL0418 | 1.235 | 1.235 |
| 2341 | Cytoplasmic | YCR085W | 1.391 | 1.391 |
| 2345 | Cytoplasmic | YDL155W | 1.312 | 1.312 |
| 2463 | Cytoplasmic | YHL019C | 1.220 | 1.367 |
| 2510 | Cytoplasmic | YJR066w | 1.265 | 1.522 |
| 2595 | Cytoplasmic | YKR015C | 1.347 | 1.347 |
| 2599 | Cytoplasmic | YNL025C | 1.376 | 1.376 |
| 2645 | Plastidic | YOL073C | 1.261 | 1.261 |
| 2661 | Cytoplasmic | YPL167C | 1.373 | 1.373 |
| 2736 | Cytoplasmic | YPL223C | 1.326 | 1.326 |
| 2742 | Cytoplasmic | YPL249C-A | 1.546 | 1.546 |
| 2907 | Cytoplasmic | B2426_2 | 1.246 | 1.246 |
| 3632 | Cytoplasmic | GM02LC13630_2 | 1.373 | 1.373 |
| 3676 | Cytoplasmic | YPL167C_2 | 1.373 | 1.373 |
| 3698 | Cytoplasmic | YPL249C-A_2 | 1.546 | 1.546 |

[0998] Plant Screening (Arabidopsis) for growth under limited nitrogen supply Per transgenic construct 3-4 independent transgenic lines (=events) were tested (15-20 plants per construct). Arabidopsis thaliana seeds were sown in pots containing a 1:1 (v:v) mixture of nutrient depleted soil (“Einheitserde Typ 0”, 30% clay, Tantau, Wansdorf Germany) and sand. Germination is induced by a four day period at 4° C., in the dark. Subsequently the plants are grown under standard growth conditions (photoperiod of 16 h light and 8 h dark, 20° C., approx. 60% relative humidity, and a photon flux density of 150-200 μE m² s⁻¹). The plants are grown and cultured, inter alia they are watered every second day with a N-depleted nutrient solution. The N-depleted nutrient solution e.g. contains beneath water

| | final | |
|---|---|---|
| mineral nutrient | concentration | |
| KCl | 3.00 | mM |
| MgSO₄ × 7 H₂O | 0.5 | mM |
| CaCl₂ × 6 H₂O | 1.5 | mM |
| K₂SO₄ | 1.5 | mM |
| NaH₂PO₄ | 1.5 | mM |
| Fe-EDTA | 40 | μM |
| H₃BO₃ | 25 | μM |
| MnSO₄ × H₂O | 1 | μM |
| ZnSO₄ × 7 H₂O | 0.5 | μM |
| Cu₂SO₄ × 5 H₂O | 0.3 | μM |
| Na₂MoO₄ × 2 H₂O | 0.05 | μM |

[0999] After 9 to 10 days the plants are individualized. After a total time of 28 to 31 days the plants are harvested and rated by the fresh weight of the aerial parts of the plants. The biomass increase has been measured as ratio of the fresh weight of the aerial parts of the respective transgenic plant and the non-transgenic wild type plant.

[1000] The results of screening for growth under limited nitrogen supply are summarized in table VIIIa.

[1001] Biomass production of transgenic Arabidopsis thaliana grown under limited nitrogen supply is shown in Table VIIIa: Biomass production was measured by weighing plant rosettes. Biomass increase was calculated as ratio of average weight for transgenic plants compared to average weight of wild type control plants from the same experiment. The mean biomass increase of transgenic constructs is given (significance value <0.3 and biomass increase >5% (ratio >1.05)).

TABLE VIIIa
(NUE)

| | | | Biomass |
|---|---|---|---|
| SeqID | Target | Locus | Increase |
| 39 | Cytoplasmic | AT3G60210 | 1.419 |
| 137 | Cytoplasmic | AVINDRAFT_2382 | 1.872 |
| 982 | Cytoplasmic | AVINDRAFT_2913 | 1.590 |
| 1225 | Cytoplasmic | B0252 | 1.617 |
| 1327 | Cytoplasmic | B0730 | 1.408 |
| 1425 | Cytoplasmic | B1926 | 1.741 |
| 1449 | Cytoplasmic | B2426 | 1.808 |
| 2172 | Cytoplasmic | GM02LC13630 | 1.994 |
| 2214 | Mitochondrial | SLL0418 | 1.443 |
| 2341 | Cytoplasmic | YCR085W | 1.620 |
| 2345 | Cytoplasmic | YDL155W | 1.291 |
| 2463 | Cytoplasmic | YHL019C | 1.343 |
| 2510 | Cytoplasmic | YJR066w | 1.389 |
| 2595 | Cytoplasmic | YKR015C | 1.160 |
| 2599 | Cytoplasmic | YNL025C | 1.649 |
| 2645 | Plastidic | YOL073C | 1.778 |
| 2661 | Cytoplasmic | YPL167C | 1.642 |
| 2736 | Cytoplasmic | YPL223C | 1.268 |
| 2742 | Cytoplasmic | YPL249C-A | 1.223 |
| 2907 | Cytoplasmic | B2426_2 | 1.808 |
| 3632 | Cytoplasmic | GM02LC13630_2 | 1.994 |
| 3676 | Cytoplasmic | YPL167C_2 | 1.642 |
| 3698 | Cytoplasmic | YPL249C-A_2 | 1.223 |

[1002] Plant Screening for Growth Under Low Temperature Conditions

[1003] In a standard experiment soil was prepared as 3.5:1 (v/v) mixture of nutrient rich soil (GS90, Tantau, Wansdorf, Germany) and sand. Pots were filled with soil mixture and placed into trays. Water was added to the trays to let the soil mixture take up appropriate amount of water for the sowing procedure. The seeds for transgenic A. thaliana plants were sown in pots (6 cm diameter). Stratification was established for a period of 3 days in the dark at 4° C.-5° C. Germination of seeds and growth was initiated at a growth condition of 20° C., approx. 60% relative humidity, 16 h photoperiod and illumination with fluorescent light at 150-200 μmol/m2s. BASTA selection was done at day 9 after sowing by spraying pots with plantlets from the top. Therefore, a 0.07% (v/v) solution of BASTA concentrate (183 g/l glufosinate-ammonium) in tap water was sprayed. The wild-type control plants were sprayed with tap water only (instead of spraying with BASTA dissolved in tap water) but were otherwise treated identically. Transgenic events and wildtype control plants were distributed randomly over the chamber. Watering was carried out every two days after covers were removed from the trays. Plants were individualized 12-13 days after sowing by removing the surplus of seedlings leaving one seedling in a pot. Cold (chilling to 11° C-12° C.) was applied 14-16 days after sowing until the end of the experiment. For measuring biomass performance, plant fresh weight was determined at harvest time (35-37 days after sowing) by cutting shoots and weighing them. Plants were in the stage prior to flowering and prior to growth of inflorescence when harvested. Transgenic plants were compared to the non-transgenic wild-type control plants. Significance values for the statistical significance of the biomass changes were calculated by applying the ‘student's’ t test (parameters: two-sided, unequal variance).

[1004] Two different types of experimental procedures were performed:

[1005] Procedure 1). Per transgenic construct 3-4 independent transgenic lines (=events) were tested (25-28 plants per construct) and biomass performance was evaluated as described above.

[1006] Procedure 2.) Up to five lines per transgenic construct were tested in successive experimental levels (up to 4). Only constructs that displayed positive performance were subjected to the next experimental level. Usually in the first level five plants per construct were tested and in the subsequent levels 25-60 plants were tested. Biomass performance was evaluated as described above. Data from this type of experiment (Procedure 2) are shown for constructs that displayed increased biomass performance in at least two successive experimental levels.

[1007] Table VIIIb: Biomass production of transgenic A. thaliana after imposition of chilling stress.

[1008] Biomass production was measured by weighing plant rosettes. Biomass increase was calculated as ratio of average weight of transgenic plants compared to average weight of wild-type control plants from the same experiment. The mean biomass increase of transgenic constructs is given (significance value <0.3 and biomass increase >5% (ratio >1.05)).

TABLE VIIIb
(LT)

| | | | Biomass |
|---|---|---|---|
| SeqID | Target | Locus | Increase |
| 39 | Cytoplasmic | AT3G60210 | 1.075 |
| 137 | Cytoplasmic | AVINDRAFT_2382 | 1.083 |
| 1327 | Cytoplasmic | B0730 | 1.221 |
| 1425 | Cytoplasmic | B1926 | 1.192 |
| 2172 | Cytoplasmic | GM02LC13630 | 1.126 |
| 2341 | Cytoplasmic | YCR085W | 1.123 |
| 2510 | Cytoplasmic | YJR066w | 1.227 |
| 2661 | Cytoplasmic | YPL167C | 1.255 |
| 2742 | Cytoplasmic | YPL249C-A | 1.230 |
| 3632 | Cytoplasmic | GM02LC13630_2 | 1.126 |
| 3676 | Cytoplasmic | YPL167C_2 | 1.255 |
| 3698 | Cytoplasmic | YPL249C-A_2 | 1.230 |

[1009] Plant Screening for Growth Under Cycling Drought Conditions

[1010] In the cycling drought assay repetitive stress is applied to plants without leading to desiccation. In a standard experiment soil is prepared as 1:1 (v/v) mixture of nutrient rich soil (GS90, Tantau, Wansdorf, Germany) and quarz sand. Pots (6 cm diameter) can be filled with this mixture and placed into trays. Water can be added to the trays to let the soil mixture take up appropriate amount of water for the sowing procedure (day 1) and subsequently seeds of transgenic A. thaliana plants and their wild-type controls can be sown in pots. Then the filled tray can be covered with a transparent lid and transferred into a precooled (4° C.-5° C.) and darkened growth chamber. Stratification can be established for a period of 3 days in the dark at 4° C.-5° C. or, alternatively, for 4 days in the dark at 4° C. Germination of seeds and growth can be initiated at a growth condition of 20° C., 60% relative humidity, 16 h photoperiod and illumination with fluorescent light at approximately 200 μmol/m2s . Covers can be removed 7-8 days after sowing. BASTA selection can be done at day 10 or day 11 (9 or 10 days after sowing) by spraying pots with plantlets from the top. In the standard experiment, a 0.07% (v/v) solution of BASTA concentrate (183 g/l glufosinate-ammonium) in tap water can be sprayed once or, alternatively, a 0.02% (v/v) solution of BASTA can be sprayed three times. The wild-type control plants can be sprayed with tap water only (instead of spraying with BASTA dissolved in tap water) but can be otherwise treated identically. Plants can be individualized 13-14 days after sowing by removing the surplus of seedlings and leaving one seedling in soil. Transgenic events and wild-type control plants can be evenly distributed over the chamber.

[1011] The water supply throughout the experiment can be limited and plants can be subjected to cycles of drought and re-watering. Watering can be carried out at day 1 (before sowing), day 14 or day 15, day 21 or day 22, and, finally, day 27 or day 28. For measuring biomass production, plant fresh weight can be determined one day after the final watering (day 28 or day 29) by cutting shoots and weighing them. Besides weighing, phenotypic information can be added in case of plants that differ from the wild type control. Plants can be in the stage prior to flowering and prior to growth of inflorescence when harvested. Significance values for the statistical significance of the biomass changes can be calculated by applying the ‘student's’ t test (parameters: two-sided, unequal variance).

[1012] Up to five lines (events) per transgenic construct can be tested in successive experimental levels (up to 4). Only constructs that displayed positive performance can be subjected to the next experimental level. Usually in the first level five plants per construct can be tested and in the subsequent levels 30-60 plants can be tested. Biomass performance can be evaluated as described above. Data are shown for constructs that displayed increased biomass performance in at least two successive experimental levels.

[1013] Biomass production can be measured by weighing plant rosettes. Biomass increase can be calculated as ratio of average weight for transgenic plants compared to average weight of wild type control plants from the same experiment.

### EXAMPLE 2

[1014] Engineering Arabidopsis plants with enhanced stress tolerance and/or increased biomass production by over-expressing Yield Increase Protein (YIP) encoding genes from Saccharomyces cereviesae or E. coli using tissue-specific and/or stress inducible promoters.

[1015] Transgenic Arabidopsis plants are created as in example 1 to express the Yield Increase Protein (YIP) encoding transgenes under the control of a tissue-specific and/or stress inducible promoter.

[1016] T2 generation plants are produced and are grown, with and without stress conditions, respectively. Biomass production is determined after a total time of 29 to 30 days starting with the sowing. The transgenic Arabidopsis plant produces more biomass than non-transgenic control plants.

### EXAMPLE 3

[1017] Over-Expression of Stress Related Genes from S. cerevissiae or E. coli Provides Tolerance of Multiple Abiotic Stresses

[1018] To determine salt tolerance, seeds of A. thaliana can be sterilized (100% bleach, 0.1% Tri-tonX for five minutes two times and rinsed five times with ddH2O). Seeds can be plated on non-selection media (½ MS, 0.6% phytagar, 0.5 g/L MES, 1% sucrose, 2 μg/ml benamyl). Seedscan be allowed to germinate for approximately ten days. At the 4-5 leaf stage, transgenic plants were potted into 5.5 cm diameter pots and allowed to grow (22° C., continuous light) for approximately seven days, watering as needed. To begin the assay, two liters of 100 mM NaCl and ⅛ MS can be added to the tray under the pots. To the tray containing the control plants, three liters of ⅛ MS can be added. The concentrations of NaCl supplementation can be increased stepwise by 50 mM every 4 days up to 200 mM. After the salt treatment with 200 mM, fresh and survival and biomass production of the plants can be determined.

[1019] To determine drought tolerance, seeds of the transgenic linescan be germinated and grown for approximately 10 days to the 4-5 leaf stage as above. The plants can be then transferred to drought conditions and can be grown through the flowering and seed set stages of development. Photosynthesis can be measured using chlorophyll fluorescence as an indicator of photosynthetic fitness and integrity of the photosystems. Survival and plant biomass production as an indicators for seed yield can be determined.

[1020] Plants that have tolerance to salinity or low temperature have higher survival rates and biomass production including seed yield and dry matter production than susceptible plants.

### EXAMPLE 4

[1021] Engineering Alfalfa Plants with Enhanced Abiotic Environmental Stress Tolerance and/or Increased Biomass Production by Over-Expressing YIP Genes from S. cerevissiae or E. coli

[1022] A regenerating clone of alfalfa (Medicago sativa) can be transformed using state of the art methods (e.g. McKersie et al., Plant Physiol 119, 839(1999)). Regeneration and transformation of alfalfa can be genotype dependent and therefore a regenerating plant can be required. Methods to obtain regenerating plants have been described. For example, these can be selected from the cultivar Rangelander (Agriculture Canada) or any other commercial alfalfa variety as described by Brown D. C. W. and Atanassov A. (Plant Cell Tissue Organ Culture 4, 111(1985)). Alternatively, the RA3 variety (University of Wisconsin) can be can be selected for use in tissue culture (Walker et al., Am. J. Bot. 65, 654 (1978)).

[1023] Petiole explants can be cocultivated with an overnight culture of Agrobacterium tumefaciens C58C1 pMP90 (McKersie et al., Plant Physiol 119, 839(1999)) or LBA4404 containing a binary vector. Many different binary vector systems have been described for plant transfor-mation (e.g. An G., in Agrobacterium Protocols, Methods in Molecular Biology, Vol 44, pp 47-62, Gartland K. M. A. and Davey M. R. eds. Humana Press, Totowa, N.J.). Many can be based on the vector pBIN19 described by Bevan (Nucleic Acid Research. 12, 8711 (1984)) that includes a plant gene expression cassette flanked by the left and right border sequences from the Ti plasmid of Agrobacterium tumefaciens. A plant gene expression cassette consists of at least two genes—a selection marker gene and a plant promoter regulating the transcription of the cDNA or genomic DNA of the trait gene. Various selection marker genes can be used including the Arabidopsis gene encoding a mutated acetohydroxy acid synthase (AHAS) enzyme (U.S. Pat. Nos. 5,7673,666 and 6,225,105). Similarly, various promoters can be used to regulate the trait gene that provides constitutive, developmental, tissue or environmental regulation of gene transcription. In this example, the 34S promoter (GenBank Accession numbers M59930 and X16673) can be used to provide constitutive expression of the trait gene.

[1024] The explants can be cocultivated for 3 days in the dark on SH induction medium containing 288 mg/L Pro, 53 mg/L thioproline, 4.35 g/L K₂SO₄, and 100 μm acetosyringinone. The explants can be washed in half-strength Murashige-Skoog medium (Murashige and Skoog, 1962) and plated on the same SH induction medium without acetosyringinone but with a suitable selection agent and suitable antibiotic to inhibit Agrobacterium growth. After several weeks, somatic embryos can be transferred to BOi2Y development medium containing no growth regulators, no antibiotics, and 50 g/L sucrose. Somatic embryos can be subsequently germinated on half-strength Murashige-Skoog medium. Rooted seedlings can be transplanted into pots and grown in a greenhouse.

[1025] T1 or T2 generation plants can be produced and subjected to yield increase and/or stress tolerance experiments, e.g. as described above in example 1 or 2. For the assessment of yield increase or tolerance to environmental stress, biomass production and/or dry matter production and/or seed yield is compared to non-transgenic wild type plants.

### EXAMPLE 5

[1026] Engineering Ryegrass Plants with Enhanced Stress Tolerance and/or Increased Yield/Biomass Production by Over-Expressing YIP Genes from S. cerevissiae or E. coli

[1027] Seeds of several different ryegrass varieties may be used as explant sources for transformation, including the commercial variety Gunne available from Svalöf Weibull seed company or the variety Affinity. Seeds can be surface-sterilized sequentially with 1% Tween-20 for 1 minute, 100% bleach for 60 minutes, 3 rinses with 5 minutes each with deionized and distilled H₂O, and then germinated for 3-4 days on moist, sterile filter paper in the dark. Seedlings can be further sterilized for 1 minute with 1% Tween-20, 5 minutes with 75% bleach, and rinsed 3 times with dd H₂O, 5 min each.

[1028] Surface-sterilized seeds can be placed on the callus induction medium containing Murashige and Skoog basal salts and vitamins, 20 g/L sucrose, 150 mg/L asparagine, 500 mg/L casein hydrolysate, 3 g/L Phytagel, 10 mg/L BAP, and 5 mg/L dicamba. Plates can be incubated in the dark at 25° C. for 4 weeks for seed germination and embryogenic callus induction.

[1029] After 4 weeks on the callus induction medium, the shoots and roots of the seedlings can be trimmed away, the callus can be transferred to fresh media, maintained in culture for another 4 weeks, and then transferred to MSO medium in light for 2 weeks. Several pieces of callus (11-17 weeks old) can be either strained through a 10 mesh sieve and put onto callus induction medium, or cultured in 100 ml of liquid ryegrass callus induction media (same medium as for callus induction with agar) in a 250 ml flask. The flask can be wrapped in foil and shaken at 175 rpm in the dark at 23° C. for 1 week. Sieving the liquid culture with a 40-mesh sieve collected the cells. The fraction collected on the sieve can be plated and cultured on solid ryegrass callus induction medium for 1 week in the dark at 25° C. The callus can be then transferred to and cultured on MS medium containing 1% sucrose for 2 weeks.

[1030] Transformation can be accomplished with either Agrobacterium of with particle bombardment methods. An expression vector can be created containing a constitutive plant promoter and the cDNA of the gene in a pUC vector. The plasmid DNA can be prepared from E. coli cells using with Qiagen kit according to manufacturer's instruction. Approximately 2 g of embryogenic callus can be spread in the center of a sterile filter paper in a Petri dish. An aliquot of liquid MSO with 10 g/L sucrose can be added to the filter paper. Gold particles (1.0 μm in size) can be coated with plasmid DNA according to method of Sanford et al., 1993 and delivered to the embryogenic callus with the following parameters: 500 μg particles and 2 μg DNA per shot, 1300 psi and a target distance of 8.5 cm from stopping plate to plate of callus and 1 shot per plate of callus.

[1031] After the bombardment, calli can be transferred back to the fresh callus development medium and maintained in the dark at room temperature for a 1-week period. The callus can be then transferred to growth conditions in the light at 25° C. to initiate embryo differentiation with the appropriate selection agent, e.g. 250 nM Arsenal, 5 mg/L PPT or 50 mg/L kanamycin. Shoots resistant to the selection agent can be appearing and once rotted can be transferred to soil.

[1032] Samples of the primary transgenic plants (T0) can be analyzed by PCR to confirm the presence of T-DNA. These results can be confirmed by Southern hybridization in which DNA can be electrophoresed on a 1% agarose gel and transferred to a positively charged nylon membrane (Roche Diagnostics). The PCR DIG Probe Synthesis Kit (Roche Diagnostics) can be used to prepare a digoxigenin-labelled probe by PCR, and used as recommended by the manufacturer.

[1033] Transgenic T0 ryegrass plants can be propagated vegetatively by excising tillers. The transplanted tillers can be maintained in the greenhouse for 2 months until well established. The shoots can be defoliated and allowed to grow for 2 weeks.

[1034] T1 or T2 generation plants can be produced and subjected to yield increase and/or stress tolerance experiments, e.g. as described above in example 1 or 2. For the assessment of yield increase or tolerance to environmental stress, biomass production and/or dry matter production and/or seed yield can be compared to non-transgenic wild type plants.

### EXAMPLE 6

[1035] Engineering Soybean Plants with Enhanced Stress Tolerance and/or Increased Biomass Production by Over-Expressing YIP Genes from S. cerevissiae or E. coli

[1036] Soybean can be transformed according to the following modification of the method described in the Texas A&M patent U.S. Pat. No. 5,164,310. Several commercial soybean varieties can be amenable to transformation by this method. The cultivar Jack (available from the Illinois Seed Foundation) can be a commonly used for transformation. Seeds can be sterilized by immersion in 70% (v/v) ethanol for 6 min and in 25% commercial bleach (NaOCI) supplemented with 0.1% (v/v) Tween for 20 min, followed by rinsing 4 times with sterile double distilled water. Seven-day seedlings can be propagated by removing the radicle, hypocotyl and one cotyledon from each seedling. Then, the epicotyl with one cotyledon can be transferred to fresh germination media in petri dishes and incubated at 25° C. under a 16-h photoperiod (approx. 100 μmol/m²s) for three weeks. Axillary nodes (approx. 4 mm in length) were cut from 3-4 week-old plants. Axillary nodes can be excised and incubated in Agrobacterium LBA4404 culture.

[1037] Many different binary vector systems have been described for plant transformation (e.g. An G., in Agrobacterium Protocols. Methods in Molecular Biology Vol. 44, p. 47-62, Gartland K. M. A. and Davey M. R. eds. Humana Press, Totowa, N.J.). Many can be based on the vector pBIN19 described by Bevan (Nucleic Acid Research. 12, 8711 (1984)) that includes a plant gene expression cassette flanked by the left and right border sequences from the Ti plasmid of Agrobacterium tumefaciens. A plant gene expression cassette consists of at least two genes—a selection marker gene and a plant promoter regulating the transcription of the cDNA or genomic DNA of the trait gene. Various selection marker genes can be used including the Arabidopsis gene encoding a mutated acetohydroxy acid synthase (AHAS) enzyme (U.S. Pat. Nos. 5,7673,666 and 6,225,105). Similarly, various promoters can be used to regulate the trait gene to provide constitutive, developmental, tissue or environmental regulation of gene transcription. In this example, the 34S promoter (GenBank Accession numbers M59930 and X16673) can be used to provide constitutive expression of the trait gene.

[1038] After the co-cultivation treatment, the explants can be washed and transferred to selection media supplemented with 500 mg/L timentin. Shoots can be excised and placed on a shoot elongation medium. Shoots longer than 1 cm can be placed on rooting medium for two to four weeks prior to transplanting to soil.

[1039] The primary transgenic plants (T0) can be analyzed by PCR to confirm the presence of T-DNA. These results can be confirmed by Southern hybridization in which DNA can be electrophoresed on a 1% agarose gel and transferred to a positively charged nylon membrane (Roche Diagnostics). The PCR DIG Probe Synthesis Kit (Roche Diagnostics) can be used to prepare a digoxigenin-labelled probe by PCR, and used as recommended by the manufacturer.

[1040] T1 or T2 generation plants can be produced and subjected to yield increase and/or stress tolerance experiments, e.g. as described above in example 1 or 2. For the assessment of yield increase or tolerance to environmental stress, biomass production and/or dry matter production and/or seed yield can be compared to non-transgenic wild type plants.

### EXAMPLE 7

[1041] Engineering Rapeseed/Canola Plants with Enhanced Stress Tolerance and/or Increased Biomass Production by Over-Expressing YIP Related Genes from S. cerevissiae or E. coli

[1042] Cotyledonary petioles and hypocotyls of 5-6 day-old young seedlings can be used as explants for tissue culture and transformed according to Babic et al. (Plant Cell Rep 17, 183 (1998)). The commercial cultivar Westar (Agriculture Canada) can be the standard variety used for transformation, but other varieties can be used.

[1043] Agrobacterium tumefaciens LBA4404 containing a binary vector can be used for canola transformation. Many different binary vector systems have been described for plant transformation (e.g. An G., in Agrobacterium Protocols. Methods in Molecular Biology Vol. 44, p. 47-62, Gartland K. M. A. and Davey M. R. eds. Humana Press, Totowa, N.J.). Many can be based on the vector pBIN19 described by Bevan (Nucleic Acid Research. 12, 8711(1984)) that includes a plant gene expression cassette flanked by the left and right border sequences from the Ti plasmid of Agrobacterium tumefaciens. A plant gene expression cassette consists of at least two genes—a selection marker gene and a plant promoter regulating the transcription of the cDNA or genomic DNA of the trait gene. Various selection marker genes can be used including the Arabidopsis gene encoding a mutated acetohydroxy acid synthase (AHAS) enzyme (U.S. Pat. Nos. 5,7673,666 and 6,225,105). Similarly, various promoters can be used to regulate the trait gene to provide constitutive, developmental, tissue or environmental regulation of gene transcription. In this example, the 34S promoter (GenBank Accession numbers M59930 and X16673) can be used to provide constitutive expression of the trait gene.

[1044] Canola seeds can be surface-sterilized in 70% ethanol for 2 min., and then in 30% Clorox with a drop of Tween-20 for 10 min, followed by three rinses with sterilized distilled water. Seeds can be then germinated in vitro 5 days on half strength MS medium without hormones, 1% sucrose, 0.7% Phytagar at 23° C., 16 h light. The cotyledon petiole explants with the cotyledon attached can be excised from the in vitro seedlings, and inoculated with Agrobacterium by dipping the cut end of the petiole explant into the bacterial suspension. The explants can be then cultured for 2 days on MSBAP-3 medium containing 3 mg/L BAP, 3% sucrose, 0.7% Phytagar at 23° C., 16 h light. After two days of co-cultivation with Agrobacterium, the petiole explants can be transferred to MSBAP-3 medium containing 3 mg/L BAP, cefotaxime, carbenicillin, or timentin (300 mg/L) for 7 days, and then cultured on MSBAP-3 medium with cefotaxime, carbenicillin, or timentin and selection agent until shoot regeneration. When the shoots were 5-10 mm in length, they can be cut and transferred to shoot elongation medium (MSBAP-0.5, containing 0.5 mg/L BAP). Shoots of about 2 cm in length can be transferred to the rooting medium (MSO) for root induction.

[1045] Samples of the primary transgenic plants (T0) can be analyzed by PCR to confirm the presence of T-DNA. These results can be confirmed by Southern hybridization in which DNA can be electrophoresed on a 1% agarose gel and transferred to a positively charged nylon membrane (Roche Diagnostics). The PCR DIG Probe Synthesis Kit (Roche Diagnostics) can be used to prepare a digoxigenin-labelled probe by PCR, and used as recommended by the manufacturer.

[1046] T1 or T2 generation plants can be produced and subjected to yield increase and/or stress tolerance experiments, e.g. as described above in example 1 or 2. For the assessment of yield increase or tolerance to environmental stress, biomass production and/or dry matter production and/or seed yield can be compared to non-transgenic wild type plants.

### EXAMPLE 8

[1047] Engineering Corn Plants with Enhanced Stress Tolerance and/or Increased Biomass Production by Over-Expressing YIP Genes from S. cerevissiae or E. coli

[1048] Transformation of maize (Zea Mays L.) can be performed with a modification of the method described by Ishida et al. (Nature Biotech 14745 (1996)). Transformation can be genotype-dependent in corn and only specific genotypes can be amenable to transformation and regeneration. The inbred line A188 (University of Minnesota) or hybrids with A188 as a parent can be good sources of donor material for transformation (Fromm et al. Biotech 8, 833 (1990)), but other genotypes can be used successfully as well. Ears can be harvested from corn plants at approximately 11 days after pollination (DAP) when the length of immature embryos can be about 1 to 1.2 mm. Immature embryos can be co-cultivated with Agrobacterium tumefaciens that carry “super binary” vectors and transgenic plants can be recovered through organogenesis. The super binary vector system of Japan Tobacco can be described in WO patents WO 94/00977 and WO 95/06722. Vectors were constructed as described. Various selection marker genes can be used including the maize gene encoding a mutated acetohydroxy acid synthase (AHAS) enzyme (U.S. Pat. No. 6,025,541). Similarly, various promoters can be used to regulate the trait gene to provide constitutive, developmental, tissue or environmental regulation of gene transcription. In this example, the 34S promoter (GenBank Accession numbers M59930 and X16673) was used to provide constitutive expression of the trait gene.

[1049] Excised embryos can be grown on callus induction medium, then maize regeneration medium, containing imidazolinone as a selection agent. The Petri plates can be incubated in the light at 25° C. for 2-3 weeks, or until shoots develop. The green shoots can be transferred from each embryo to maize rooting medium and incubated at 25° C. for 2-3 weeks, until roots develop. The rooted shoots can be transplanted to soil in the greenhouse. T1 seeds can be produced from plants that exhibit tolerance to the imidazolinone herbicides and which can be PCR positive for the transgenes.

[1050] The T1 transgenic plants can be then evaluated for increased yield capacities or their enhanced stress tolerance, and/or increased biomass production according to the method described in Example 1 or 2. The T1 generation of single locus insertions of the T-DNA will segregate for the transgene in a 3:1 ratio. Those progeny containing one or two copies of the transgene can be tolerant regarding the imidazolinone herbicide, and exhibit an enhancement of stress tolerance and/or increased biomass production than those progeny lacking the transgenes.

[1051] T1 or T2 generation plants can be produced and subjected to yield increase and/or stress tolerance experiments, e.g. as described above in example 1 or 2. For the assessment of yield increase or tolerance to environmental stress, biomass production and/or dry matter production and/or seed yield can be compared to non-transgenic wild type plants.

[1052] Homozygous T2 plants exhibited similar phenotypes. Hybrid plants (F1 progeny) of homozygous transgenic plants and non-transgenic plants also exhibit enhanced tolerance to environmental stress and/or increased yield production.

### EXAMPLE 9

[1053] Engineering Wheat Plants with Enhanced Stress Tolerance and/or Increased Biomass Production by Over-Expressing YIP Genes from S. cerevissiae or E. coli

[1054] Transformation of wheat can be performed with the method described by Ishida et al. (Nature Biotech. 14745 (1996)). The cultivar Bobwhite (available from CYMMIT, Mexico) can be commonly used in transformation. Immature embryos can be co-cultivated with Agrobacterium tumefaciens that carry “super binary” vectors, and transgenic plants can be recovered through organogenesis. The super binary vector system of Japan Tobacco can be described in WO patents WO 94/00977 and WO 95/06722. Vectors were constructed as described. Various selection marker genes can be used including the maize gene encoding a mutated acetohydroxy acid synthase (AHAS) enzyme (U.S. Pat. No. 6,025,541). Similarly, various promoters can be used to regulate the trait gene to provide constitutive, developmental, tissue or environmental regulation of gene transcription. In this example, the 34S promoter (GenBank Accession numbers M59930 and X16673) was used to provide constitutive expression of the trait gene.

[1055] After incubation with Agrobacterium, the embryos can be grown on callus induction medium, then regeneration medium, containing imidazolinone as a selection agent. The Petri plates can be incubated in the light at 25° C. for 2-3 weeks, or until shoots develop. The green shoots can be transferred from each embryo to rooting medium and incubated at 25° C. for 2-3 weeks, until roots develop. The rooted shoots can be transplanted to soil in the greenhouse. T1 seeds can be produced from plants that exhibit tolerance to the imidazolinone herbicides and which can be PCR positive for the transgenes.

[1056] The T1 transgenic plants can be then evaluated for increase yield/biomass production and/or their enhanced tolerance to environmental stress according to the method described in example 1 or 2. The T1 generation of single locus insertions of the T-DNA will segregate for the transgene in a 3:1 ratio. Those progeny containing one or two copies of the transgene can be tolerant regarding the imidazolinone herbicide, and exhibit an enhanced tolerance to stress and/or increased yield/biomass production compared to the progeny lacking the transgenes. Homozygous T2 plants exhibit similar phenotypes. Plants with higher tolerance to environmental stress and/or increased biomass production and/or dry matter production and/or seed yield when compared to non-transgenic wild type plants can be produced.

### EXAMPLE 10

[1057] Identification of Identical and Heterologous Genes

[1058] Gene sequences can be used to identify identical or heterologous genes from cDNA or genomic libraries. Identical genes (e. g. full-length cDNA clones) can be isolated via nucleic acid hybridization using for example cDNA libraries. Depending on the abundance of the gene of interest, 100,000 up to 1,000,000 recombinant bacteriophages can be plated and transferred to nylon membranes. After denaturation with alkali, DNA can be immobilized on the membrane by e. g. UV cross linking. Hybridization can be carried out at high stringency conditions. In aqueous solution, hybridization and washing can be performed at an ionic strength of 1 M NaCl and a temperature of 68° C. Hybridization probes can be generated by e.g. radioactive (³²P) nick transcription labeling (High Prime, Roche, Mannheim, Germany). Signals can be detected by autoradiography.

[1059] Partially identical or heterologous genes that can be related but not identical can be identified in a manner analogous to the above-described procedure using low stringency hybridization and washing conditions. For aqueous hybridization, the ionic strength can be normally kept at 1 M NaCl while the temperature can be progressively lowered from 68 to 42° C.

[1060] Isolation of gene sequences with homology (or sequence identity/similarity) only in a distinct domain of (for example 10-20 amino acids) can be carried out by using synthetic radio labeled oligonucleotide probes. Radiolabeled oligonucleotides can be prepared by phosphorylation of the 5-prime end of two complementary oligonucleotides with T4 polynucleotide kinase. The complementary oligonucleotides can be annealed and ligated to form concatemers. The double stranded concatemers can be than radiolabeled by, for example, nick transcription. Hybridization can be normally performed at low stringency conditions using high oligonucleotide concentrations.

[1061] Oligonucleotide hybridization solution:

[1062] 6×SSC

[1063] 0.01 M sodium phosphate

[1064] 1 mM EDTA (pH 8)

[1065] 0.5% SDS

[1066] 100 μg/ml denatured salmon sperm DNA

[1067] 0.1% nonfat dried milk

[1068] During hybridization, temperature can be lowered stepwise to 5-10° C. below the estimated oligonucleotide Tₘ or down to room temperature followed by washing steps and autoradiography. Washing can be performed with low stringency such as 3 washing steps using 4×SSC. Further details can be described by Sambrook J. et al., 1989, “Molecular Cloning: A Laboratory Manual,” Cold Spring Harbor Laboratory Press or Ausubel F. M. et al., 1994, “Current Protocols in Molecular Biology,” John Wiley & Sons.

### EXAMPLE 11

[1069] Identification of Identical Genes by Screening Expression Libraries with Antibodies

[1070] c-DNA clones can be used to produce recombinant polypeptide for example in E. coli (e.g. Qiagen QIAexpress pQE system). Recombinant polypeptides can be then normally affinity purified via Ni-NTA affinity chromatography (Qiagen). Recombinant polypeptides can be then used to produce specific antibodies for example by using standard techniques for rabbit immunization. Antibodies can be affinity purified using a Ni-NTA column saturated with the recombinant antigen as described by Gu et al., BioTechniques 17, 257 (1994). The antibody can than be used to screen expression cDNA libraries to identify identical or heterologous genes via an immunological screening (Sambrook, J. et al., 1989, “Molecular Cloning: A Laboratory Manual,” Cold Spring Harbor Laboratory Press or Ausubel, F. M. et al., 1994, “Current Protocols in Molecular Biology”, John Wiley & Sons).

### EXAMPLE 12

[1071] In Vivo Mutagenesis

[1072] In vivo mutagenesis of microorganisms can be performed by passage of plasmid (or other vector) DNA through E. coli or other microorganisms (e.g. Bacillus spp. or yeasts such as S. cerevisiae) which can be impaired in their capabilities to maintain the integrity of their genetic information. Typical mutator strains have mutations in the genes for the DNA repair system (e.g., mutHLS, mutD, mutT, etc.; for reference, see Rupp W. D., DNA repair mechanisms, in: E. coli and Salmonella, p. 2277-2294, ASM, 1996, Washington.) Such strains can be well known to those skilled in the art. The use of such strains can be illustrated, for example, in Greener A. and Callahan M., Strategies 7, 32 (1994). Transfer of mutated DNA molecules into plants can be preferably done after selection and testing in microorganisms. Transgenic plants can be generated according to various examples within the exemplification of this document.

### EXAMPLE 13

[1073] Engineering Arabidopsis plants with enhanced stress tolerance and/or increased biomass production by over-expressing YIP encoding genes for example from Brassica napus, Glycine max, Zea mays or Oryza sativa using tissue-specific or stress-inducible promoters.

[1074] Transgenic Arabidopsis plants over-expressing YIP encoding genes from for example Brassica napus, Glycine max, Zea mays and Oryza sativa can be created as described in example 1 to express the YIP protein encoding transgenes under the control of a tissue-specific or stress-inducible promoter. T2 generation plants can be produced and grown under normal or stress conditions. Plants with higher yield and/or tolerance to environmental stress show increased biomass production and/or dry matter production and/or seed yield when compared to non-transgenic wild type plants.

### EXAMPLE 14

[1075] Engineering Alfalfa Plants with Enhanced Stress Tolerance and/or Increased Biomass Production by Over-Expressing YIP Genes for Example from Brassica napus, Glycine max, Zea mays or Oryza sativa for Example

[1076] A regenerating clone of alfalfa (Medicago sativa) can be transformed using the method of McKersie et al., (Plant Physiol. 119, 839 (1999)). Regeneration and transformation of alfalfa can be genotype dependent and therefore a regenerating plant can be required. Methods to obtain regenerating plants have been described. For example, these can be selected from the cultivar Rangelander (Agriculture Canada) or any other commercial alfalfa variety as described by Brown and Atanassov (Plant Cell Tissue Organ Culture 4, 111 (1985)). Alternatively, the RA3 variety (University of Wisconsin) has been selected for use in tissue culture (Walker et al., Am. J. Bot. 65, 54 (1978)).

[1077] Petiole explants can be cocultivated with an overnight culture of Agrobacterium tumefaciens C58C1 pMP90 (McKersie et al., Plant Physiol 119, 839 (1999)) or LBA4404 containing a binary vector. Many different binary vector systems have been described for plant transformation (e.g. An G., in Agrobacterium Protocols. Methods in Molecular Biology Vol. 44, p. 47-62, Gartland K. M. A. and Davey M. R. eds. Humana Press, Totowa, N.J.). Many can be based on the vector pBIN19 described by Bevan (Nucleic Acid Research. 12, 8711 (1984)) that includes a plant gene expression cassette flanked by the left and right border sequences from the Ti plasmid of Agrobacterium tumefaciens. A plant gene expression cassette consists of at least two genes—a selection marker gene and a plant promoter regulating the transcription of the cDNA or genomic DNA of the trait gene. Various selection marker genes can be used including the Arabidopsis gene encoding a mutated acetohydroxy acid synthase (AHAS) enzyme (U.S. Pat. Nos. 5,7673,666 and 6,225,105). Similarly, various promoters can be used to regulate the trait gene that provides constitutive, developmental, tissue or environmental regulation of gene transcription. In this example, the 34S promoter (GenBank Accession numbers M59930 and X16673) was used to provide constitutive expression of the trait gene.

[1078] The explants can be cocultivated for 3 days in the dark on SH induction medium containing 288 mg/L Pro, 53 mg/L thioproline, 4.35 g/L K2504, and 100 μm acetosyringinone. The explants were washed in half-strength Murashige-Skoog medium (Murashige and Skoog, 1962) and plated on the same SH induction medium without acetosyringinone but with a suitable selection agent and suitable antibiotic to inhibit Agrobacterium growth. After several weeks, somatic embryos can be transferred to BOi2Y development medium containing no growth regulators, no antibiotics, and 50 g/L sucrose. Somatic embryos can be subsequently germinated on half-strength Murashige-Skoog medium. Rooted seedlings can be transplanted into pots and grown in a greenhouse.

[1079] The T0 transgenic plants can be propagated by node cuttings and rooted in Turface growth medium. T1 or T2 generation plants can be produced and subjected to experiments comprising normal or stress conditions as described in previous examples. Plants with increased yield production and/or higher tolerance to stress have increased biomass production and/or dry matter production and/or seed yield when compared to a control, e.g. a non-transgenic wild type plants.

[1080] For the assessment of yield increase, e.g. tolerance to low temperature, biomass production, intrinsic yield and/or dry matter production and/or seed yield can be compared to e.g. corresponding non-transgenic wild type plants.

[1081] For example, plants with an increased yield, e.g. an increased yield-related trait, e.g. higher tolerance to stress, e.g. with an increased nutrient use efficiency or an increased intrinsic yield, and e.g. with higher tolerance to low temperature may show increased biomass production and/or dry matter production and/or seed yield under low temperature when compared to plants lacking the transgene, e.g. to corresponding non-transgenic wild type plants.

### EXAMPLE 15

[1082] Engineering Ryegrass Plants with Enhanced Stress Tolerance and/or Increased Biomass Production by Over-Expressing YIP Genes for Example from Brassica napus, Glycine max, Zea mays or Oryza sativa

[1083] Seeds of several different ryegrass varieties may be used as explant sources for transformation, including the commercial variety Gunne available from Svalöf Weibull seed company or the variety Affinity. Seeds can be surface-sterilized sequentially with 1% Tween-20 for 1 minute, 100% bleach for 60 minutes, 3 rinses of 5 minutes each with deionized and distilled H₂O, and then germinated for 3-4 days on moist, sterile filter paper in the dark. Seedlings can be further sterilized for 1 minute with 1% Tween-20, 5 minutes with 75% bleach, and rinsed 3 times with double destilled H₂O, 5 min each.

[1084] Surface-sterilized seeds can be placed on the callus induction medium containing Murashige and Skoog basal salts and vitamins, 20 g/L sucrose, 150 mg/L asparagine, 500 mg/L casein hydrolysate, 3 g/L Phytagel, 10 mg/L BAP, and 5 mg/L dicamba. Plates can be incubated in the dark at 25° C. for 4 weeks for seed germination and embryogenic callus induction.

[1085] After 4 weeks on the callus induction medium, the shoots and roots of the seedlings can be trimmed away, the callus can be transferred to fresh media, maintained in culture for another 4 weeks, and then transferred to MSO medium in light for 2 weeks. Several pieces of callus (11-17 weeks old) can be either strained through a 10 mesh sieve and put onto callus induction medium, or cultured in 100 ml of liquid ryegrass callus induction media (same medium as for callus induction with agar) in a 250 ml flask. The flask can be wrapped in foil and shaken at 175 rpm in the dark at 23° C. for 1 week. Sieving the liquid culture with a 40-mesh sieve collect the cells. The fraction collected on the sieve can be plated and cultured on solid ryegrass callus induction medium for 1 week in the dark at 25° C. The callus can be then transferred to and cultured on MS medium containing 1% sucrose for 2 weeks.

[1086] Transformation can be accomplished with either Agrobacterium of with particle bombardment methods. An expression vector can be created containing a constitutive plant promoter and the cDNA of the gene in a pUC vector. The plasmid DNA can be prepared from E. coli cells using with Qiagen kit according to manufacturer's instruction. Approximately 2 g of embryogenic callus can be spread in the center of a sterile filter paper in a Petri dish. An aliquot of liquid MSO with 10 g/l sucrose can be added to the filter paper. Gold particles (1.0 μm in size) can be coated with plasmid DNA according to method of Sanford et al., 1993 and delivered to the embryogenic callus with the following parameters: 500 μg particles and 2 μg DNA per shot, 1300 psi and a target distance of 8.5 cm from stopping plate to plate of callus and 1 shot per plate of callus.

[1087] After the bombardment, calli can be transferred back to the fresh callus development medium and maintained in the dark at room temperature for a 1-week period. The callus can be then transferred to growth conditions in the light at 25° C. to initiate embryo differentiation with the appropriate selection agent, e.g. 250 nM Arsenal, 5 mg/L PPT or 50 mg/L kanamycin. Shoots resistant to the selection agent appeared and once rooted can be transferred to soil.

[1088] Samples of the primary transgenic plants (TO) can be analyzed by PCR to confirm the presence of T-DNA. These results can be confirmed by Southern hybridization in which DNA can be electrophoresed on a 1% agarose gel and transferred to a positively charged nylon membrane (Roche Diagnostics). The PCR DIG Probe Synthesis Kit (Roche Diagnostics) can be used to prepare a digoxigenin-labelled probe by PCR, and used as recommended by the manufacturer.

[1089] Transgenic T0 ryegrass plants can be propagated vegetatively by excising tillers. The transplanted tillers can be maintained in the greenhouse for 2 months until well established. T1 or T2 generation plants can be produced and subjected to normal or stress experiments, e.g. as described above in example 1 or 2. Biomass production and/or dry matter production and/or seed yield can be compared to a control, e.g. a non-transgenic wild type plants.

[1090] For the assessment of yield increase, e.g. tolerance to low temperature, biomass production, intrinsic yield and/or dry matter production and/or seed yield can be compared to e.g. corresponding non-transgenic wild type plants.

[1091] For example, plants with an increased yield, e.g. an increased yield-related trait, e.g. higher tolerance to stress, e.g. with an increased nutrient use efficiency or an increased intrinsic yield, and e.g. with higher tolerance to low temperature may show increased biomass production and/or dry matter production and/or seed yield under low temperature when compared to plants lacking the transgene, e.g. to corresponding non-transgenic wild type plants.

### EXAMPLE 16

[1092] Engineering Soybean Plants with Enhanced Stress Tolerance and/or Increased biomass Production by Over-Expressing YIP Genes for Example from Brassica napus, Glycine max, Zea mays or Oryza sativa

[1093] Soybean can be transformed according to the following modification of the method described in the Texas A&M patent U.S. Pat. No. 5,164,310. Several commercial soybean varieties can be amenable to transformation by this method. The cultivar Jack (available from the Illinois Seed Foundation) can be a commonly used for transformation. Seeds can be sterilized by immersion in 70% (v/v) ethanol for 6 min and in 25% commercial bleach (NaOCI) supplemented with 0.1% (v/v) Tween for 20 min, followed by rinsing 4 times with sterile double distilled water. Seven-day old seedlings can be propagated by removing the radicle, hypocotyl and one cotyledon from each seedling. Then, the epicotyl with one cotyledon can be transferred to fresh germination media in petri dishes and incubated at 25° C. under a 16 h photoperiod (approx. 100 μmol/ms) for three weeks. Axillary nodes (approx. 4 mm in length) can be cut from 3-4 week-old plants. Axillary nodes can be excised and incubated in Agrobacterium LBA4404 culture.

[1094] Many different binary vector systems have been described for plant transformation (e.g. An G., in Agrobacterium Protocols. Methods in Molecular Biology Vol 44, p. 47-62, Gartland K. M. A. and Davey M. R. eds. Humana Press, Totowa, N.J.). Many can be based on the vector pBIN19 described by Bevan (Nucleic Acid Research. 12, 8711 (1984)) that includes a plant gene expression cassette flanked by the left and right border sequences from the Ti plasmid of Agrobacterium tumefaciens. A plant gene expression cassette consists of at least two genes—a selection marker gene and a plant promoter regulating the transcription of the cDNA or genomic DNA of the trait gene. Various selection marker genes can be used including the Arabidopsis gene encoding a mutated acetohydroxy acid synthase (AHAS) enzyme (U.S. Pat. Nos. 5,7673,666 and 6,225,105). Similarly, various promoters can be used to regulate the trait gene to provide constitutive, developmental, tissue or environmental regulation of gene transcription. In this example, the 34S promoter (GenBank Accession numbers M59930 and X16673) can be used to provide constitutive expression of the trait gene.

[1095] After the co-cultivation treatment, the explants can be washed and transferred to selection media supplemented with 500 mg/L timentin. Shoots can be excised and placed on a shoot elongation medium. Shoots longer than 1 cm can be placed on rooting medium for two to four weeks prior to transplanting to soil.

[1096] The primary transgenic plants (T0) can be analyzed by PCR to confirm the presence of T-DNA. These results can be confirmed by Southern hybridization in which DNA can be electrophoresed on a 1% agarose gel and transferred to a positively charged nylon membrane (Roche Diagnostics). The PCR DIG Probe Synthesis Kit (Roche Diagnostics) can be used to prepare a digoxigenin-labelled probe by PCR, and used as recommended by the manufacturer.

[1097] T1 or T2 generation plants can be produced and subjected to experiments, e.g. as described above in example 1 or 2. For the assessment of yield increase or tolerance to stress, biomass production and/or dry matter production and/or seed yield can be compared to a control, e.g. a non-transgenic wild type plants.

[1098] For the assessment of yield increase, e.g. tolerance to low temperature, biomass production, intrinsic yield and/or dry matter production and/or seed yield can be compared to e.g. corresponding non-transgenic wild type plants.

[1099] For example, plants with an increased yield, e.g. an increased yield-related trait, e.g. higher tolerance to stress, e.g. with an increased nutrient use efficiency or an increased intrinsic yield, and e.g. with higher tolerance to low temperature may show increased biomass production and/or dry matter production and/or seed yield under low temperature when compared to plants lacking the transgene, e.g. to corresponding non-transgenic wild type plants.

### EXAMPLE 17

[1100] Engineering Rapeseed/Canola Plants with Enhanced Stress Tolerance and/or Increased Bio-Mass Production by Over-Expressing YIP Genes

[1101] Cotyledonary petioles and hypocotyls of 5-6 day-old young seedlings can be used as explants for tissue culture and transformed according to Babic et al. (Plant Cell Rep 17, 183(1998)). The commercial cultivar Westar (Agriculture Canada) can be the standard variety used for transformation, but other varieties can be used.

[1102] Agrobacterium tumefaciens LBA4404 containing a binary vector can be used for canola transformation. Many different binary vector systems have been described for plant transformation (e.g. An G., in Agrobacterium Protocols. Methods in Molecular Biology Vol. 44, p. 47-62, Gartland K. M. A. and Davey M. R. eds. Humana Press, Totowa, N.J.). Many can be based on the vector pBIN19 described by Bevan (Nucleic Acid Research. 12, 8711 (1984)) that includes a plant gene expression cassette flanked by the left and right border sequences from the Ti plasmid of Agrobacterium tumefaciens. A plant gene expression cassette consists of at least two genes—a selection marker gene and a plant promoter regulating the transcription of the cDNA or genomic DNA of the trait gene. Various selection marker genes can be used including the Arabidopsis gene encoding a mutated acetohydroxy acid synthase (AHAS) enzyme (U.S. Pat. Nos. 5,7673,666 and 6,225,105). Similarly, various promoters can be used to regulate the trait gene to provide constitutive, developmental, tissue or environmental regulation of gene transcription. In this example, the 34S promoter (GenBank Accession numbers M59930 and X16673) can be used to provide constitutive expression of the trait gene.

[1103] Canola seeds can be surface-sterilized in 70% ethanol for 2 min., and then in 30% Clorox with a drop of Tween-20 for 10 min, followed by three rinses with sterilized distilled water. Seeds can be then germinated in vitro 5 days on half strength MS medium without hormones, 1% sucrose, 0.7% Phytagar at 23° C., 16 h light. The cotyledon petiole explants with the cotyledon attached can be excised from the in vitro seedlings, and inoculated with Agrobacterium by dipping the cut end of the petiole explant into the bacterial suspension. The explants can be then cultured for 2 days on MSBAP-3 medium containing 3 mg/L BAP, 3% sucrose, 0.7% Phytagar at 23° C., 16 h light. After two days of co-cultivation with Agrobacterium, the petiole explants can be transferred to MSBAP-3 medium containing 3 mg/l BAP, cefotaxime, carbenicillin, or timentin (300 mg/L) for 7 days, and then cultured on MSBAP-3 medium with cefotaxime, carbenicillin, or timentin and selection agent until shoot regeneration. When the shoots can be 5-10 mm in length, they can be cut and transferred to shoot elongation medium (MSBAP-0.5, containing 0.5 mg/L BAP). Shoots of about 2 cm in length can be transferred to the rooting medium (MSO) for root induction.

[1104] Samples of the primary transgenic plants (TO) can be analyzed by PCR to confirm the presence of T-DNA. These results can be confirmed by Southern hybridization in which DNA can be electrophoresed on a 1% agarose gel and transferred to a positively charged nylon membrane (Roche Diagnostics). The PCR DIG Probe Synthesis Kit (Roche Diagnostics) can be used to prepare a digoxigenin-labelled probe by PCR, and used as recommended by the manufacturer.

[1105] T1 or T2 generation plants can be produced and subjected to experiments, e.g. as described above in example 1 or 2. For the assessment of yield increase or tolerance to stress, biomass production and/or dry matter production and/or seed yield can be compared to a control, e.g. a non-transgenic wild type plants.

[1106] For the assessment of yield increase, e.g. tolerance to low temperature, biomass production, intrinsic yield and/or dry matter production and/or seed yield can be compared to e.g. corresponding non-transgenic wild type plants.

[1107] For example, plants with an increased yield, e.g. an increased yield-related trait, e.g. higher tolerance to stress, e.g. with an increased nutrient use efficiency or an increased intrinsic yield, and e.g. with higher tolerance to low temperature may show increased biomass production and/or dry matter production and/or seed yield under low temperature when compared to plants lacking the transgene, e.g. to corresponding non-transgenic wild type plants.

### EXAMPLE 18

[1108] Engineering Corn Plants with Enhanced Stress Tolerance and/or Increased Biomass Production by Over-Expressing YIP Genes

[1109] Transformation of corn (Zea mays L.) can be performed with a modification of the method described by Ishida et al. (Nature Biotech 14745(1996)). Transformation can be genotype-dependent in corn and only specific genotypes can be amenable to transformation and regeneration. The inbred line A188 (University of Minnesota) or hybrids with A188 as a parent can be good sources of donor material for transformation (Fromm et al. Biotech 8, 833 (1990), but other genotypes can be used successfully as well. Ears can be harvested from corn plants at approximately 11 days after pollination (DAP) when the length of immature embryos can be about 1 to 1.2 mm. Immature embryos can be co-cultivated with Agrobacterium tumefaciens that carry “super binary” vectors and transgenic plants can be recovered through organogenesis. The super binary vector system of Japan Tobacco can be described in WO patents WO 94/00977 and WO 95/06722. Vectors can be constructed as described. Various selection marker genes can be used including the corn gene encoding a mutated acetohydroxy acid synthase (AHAS) enzyme (U.S. Pat. No. 6,025,541). Similarly, various promoters can be used to regulate the trait gene to provide constitutive, developmental, tissue or environmental regulation of gene transcription. In this example, the 34S promoter (GenBank Accession numbers M59930 and X16673) can be used to provide constitutive expression of the trait gene.

[1110] Excised embryos can be grown on callus induction medium, then corn regeneration medium, containing imidazolinone as a selection agent. The Petri plates were incubated in the light at 25° C. for 2-3 weeks, or until shoots develop. The green shoots from each embryo can be transferred to corn rooting medium and incubated at 25° C. for 2-3 weeks, until roots develop. The rooted shoots can be transplanted to soil in the greenhouse. T1 seeds can be produced from plants that exhibit tolerance to the imidazolinone herbicides and can be PCR positive for the transgenes.

[1111] The T1 transgenic plants can be then evaluated for increased yield, or enhanced tolerance to stress and/or increased biomass production according to the methods described in Example 1 or 2. The T1 generation of single locus insertions of the T-DNA will segregate for the transgene in a 1:2:1 ratio. Those progeny containing one or two copies of the transgene (¾ of the progeny) can be tolerant regarding the imidazolinone herbicide, and exhibit enhanced tolerance tostress and/or increased yield/biomass production compared to those progeny lacking the transgenes. Tolerant plants have higher seed yields. Homozygous T2 plants exhibit similar phenotypes. Hybrid plants (F1 progeny) of homozygous transgenic plants and non-transgenic plants also exhibit enhanced tolerance to stress and/or increased biomass production.

### EXAMPLE 19

[1112] Engineering Wheat Plants with Enhanced Stress Tolerance and/or Increased Yield/Biomass Production by Over-Expressing YIP Genes

[1113] Transformation of wheat can be performed with the method described by Ishida et al. (Nature Biotech. 14745 (1996)). The cultivar Bobwhite (available from CYMMIT, Mexico) can be commonly used in transformation. Immature embryos can be co-cultivated with Agrobacterium tumefaciens that carry “super binary” vectors, and transgenic plants can be recovered through organogenesis. The super binary vector system of Japan Tobacco can be described in WO patents WO 94/00977 and WO 95/06722. Vectors can be constructed as described. Various selection marker genes can be used including the maize gene encoding a mutated acetohydroxy acid synthase (AHAS) enzyme (U.S. Pat. No. 6,025,541). Similarly, various promoters can be used to regulate the trait gene to provide constitutive, developmental, tissue or environmental regulation of gene transcription. In this example, the 34S promoter (GenBank Accession numbers M59930 and X16673) can be used to provide constitutive expression of the trait gene.

[1114] After incubation with Agrobacterium, the embryos can be grown on callus induction medium, then regeneration medium, containing imidazolinone as a selection agent. The Petri plates can be incubated in the light at 25° C. for 2-3 weeks, or until shoots develop. The green shoots can be transferred from each embryo to rooting medium and incubated at 25° C. for 2-3 weeks, until roots develop. The rooted shoots can be transplanted to soil in the greenhouse. T1 seeds can be produced from plants that exhibit tolerance to the imidazolinone herbicides and which can be PCR positive for the transgenes.

[1115] T1 or T2 generation plants can be produced and subjected to experiments, e.g. as described above in example 1 or 2. For the assessment of yield increase or tolerance to stress, biomass production and/or dry matter production and/or seed yield can be compared to a control, e.g. a non-transgenic wild type plants.

[1116] For the assessment of yield increase, e.g. tolerance to low temperature, biomass production, intrinsic yield and/or dry matter production and/or seed yield can be compared to e.g. corresponding non-transgenic wild type plants.

[1117] For example, plants with an increased yield, e.g. an increased yield-related trait, e.g. higher tolerance to stress, e.g. with an increased nutrient use efficiency or an increased intrinsic yield, and e.g. with higher tolerance to low temperature may show increased biomass production and/or dry matter production and/or seed yield under low temperature when compared to plants lacking the transgene, e.g. to corresponding non-transgenic wild type plants.

### EXAMPLE 20

[1118] Engineering Rice Plants with Increased Yield Under Condition of Transient and Repetitive Abiotic Stress by Over-Expressing Stress Related Genes from Saccharomyces cerevisiae or E. coli or Synechocystis

[1119] Rice Transformation

[1120] The Agrobacterium containing the expression vector of the invention can be used to transform Oryza sativa plants. Mature dry seeds of the rice japonica cultivar Nipponbare can be dehusked. Sterilization can be carried out by incubating for one minute in 70% ethanol, followed by 30 minutes in 0.2% HgCl₂, followed by a 6 times 15 minutes wash with sterile distilled water. The sterile seeds can be then germinated on a medium containing 2,4-D (callus induction medium). After incubation in the dark for four weeks, embryogenic, scutellum-derived calli can be excised and propagated on the same medium. After two weeks, the calli can be multiplied or propagated by subculture on the same medium for another 2 weeks. Embryogenic callus pieces can be sub-cultured on fresh medium 3 days before co-cultivation (to boost cell division activity).

[1121] Agrobacterium strain LBA4404 containing the expression vector of the invention can be used for co-cultivation. Agrobacterium can be inoculated on AB medium with the appropriate antibiotics and cultured for 3 days at 28° C. The bacteria can be then collected and suspended in liquid co-cultivation medium to a density (OD600) of about 1. The suspension can be then transferred to a Petri dish and the calli immersed in the suspension for 15 minutes. The callus tissues can be then blotted dry on a filter paper and transferred to solidified, co-cultivation medium and incubated for 3 days in the dark at 25° C. Co-cultivated calli can be grown on 2,4-D-containing medium for 4 weeks in the dark at 28° C. in the presence of a selection agent. During this period, rapidly growing resistant callus islands developed. After transfer of this material to a regeneration medium and incubation in the light, the embryogenic potential can be released and shoots developed in the next four to five weeks. Shoots can be excised from the calli and incubated for 2 to 3 weeks on an auxin-containing medium from which they can be transferred to soil. Hardened shoots can be grown under high humidity and short days in a greenhouse.

[1122] Approximately 35 independent TO rice transformants can be generated for one construct. The primary transformants can be transferred from a tissue culture chamber to a green-house After a quantitative PCR analysis to verify copy number of the T-DNA insert, only single copy transgenic plants that exhibit tolerance to the selection agent can be kept for harvest of T1 seed. Seeds can be then harvested three to five months after transplanting. The method yielded single locus transformants at a rate of over 50 % (Aldemita and Hodges1996, Chan et al. 1993, Hiei et al. 1994).

[1123] For the cycling drought assay repetitive stress can be applied to plants without leading to desiccation. The water supply throughout the experiment can be limited and plants can be subjected to cycles of drought and re-watering. For measuring biomass production, plant fresh weight can be determined one day after the final watering by cutting shoots and weighing them.

### EXAMPLE 21

[1124] Engineering Rice Plants with Increased Yield Under Condition of Transient and Repetitive Abiotic Stress by Over-Expressing Yield and Stress Related Genes for Example from A. thaliana, Brassica napus, Glycine max, Zea mays or Oryza sativa for Example

[1125] Rice Transformation

[1126] The Agrobacterium containing the expression vector of the invention can be used to transform Oryza sativa plants. Mature dry seeds of the rice japonica cultivar Nipponbare can be dehusked. Sterilization can be carried out by incubating for one minute in 70% ethanol, followed by 30 minutes in 0.2% HgCl₂, followed by a 6 times 15 minutes wash with sterile distilled water. The sterile seeds can be then germinated on a medium containing 2,4-D (callus induction medium). After incubation in the dark for four weeks, embryogenic, scutellum-derived calli can be excised and propagated on the same medium. After two weeks, the calli can be multiplied or propagated by subculture on the same medium for another 2 weeks. Embryogenic callus pieces can be sub-cultured on fresh medium 3 days before co-cultivation (to boost cell division activity).

[1127] Agrobacterium strain LBA4404 containing the expression vector of the invention can be used for co-cultivation. Agrobacterium can be inoculated on AB medium with the appropriate antibiotics and cultured for 3 days at 28° C. The bacteria can be then collected and suspended in liquid co-cultivation medium to a density (OD600) of about 1. The suspension can be then transferred to a Petri dish and the calli immersed in the suspension for 15 minutes. The callus tissues can be then blotted dry on a filter paper and transferred to solidified, co-cultivation medium and incubated for 3 days in the dark at 25° C. Co-cultivated calli can be grown on 2,4-D-containing medium for 4 weeks in the dark at 28° C. in the presence of a selection agent. During this period, rapidly growing resistant callus islands developed. After transfer of this material to a regeneration medium and incubation in the light, the embryogenic potential can be released and shoots developed in the next four to five weeks. Shoots can be excised from the calli and incubated for 2 to 3 weeks on an auxin-containing medium from which they can be transferred to soil. Hardened shoots can be grown under high humidity and short days in a greenhouse.

[1128] Approximately 35 independent T0 rice transformants can be generated for one construct. The primary transformants can be transferred from a tissue culture chamber to a green-house. After a quantitative PCR analysis to verify copy number of the T-DNA insert, only single copy transgenic plants that exhibit tolerance to the selection agent can be kept for harvest of T1 seed. Seeds can be then harvested three to five months after transplanting. The method yielded single locus transformants at a rate of over 50 % (Aldemita and Hodges1996, Chan et al. 1993, Hiei et al. 1994).

[1129] For the cycling drought assay repetitive stress can be applied to plants without leading to desiccation. The water supply throughout the experiment can be limited and plants can be subjected to cycles of drought and re-watering. For measuring biomass production, plant fresh weight can be determined one day after the final watering by cutting shoots and weighing them. At an equivalent degree of drought stress, tolerant plants can be able to resume normal growth whereas susceptible plants have died or suffer significant injury resulting in shorter leaves and less dry matter.

### FIGURES

[1130] FIG. 1a Vector VC-MME220-1 SEQ ID NO: 1 used for cloning a gene of interest for non-targeted expression.

[1131] FIG. 1b Vector VC-MME220-1qcz SEQ ID NO: 2902 used for cloning a gene of interest for non-targeted expression.

[1132] FIG. 2a Vector VC-MME221-1 SEQ ID NO: 2 used for cloning a gene of interest for non-targeted expression.

[1133] FIG. 2b Vector VC-MME221-1qcz SEQ ID NO: 2905 used for cloning a gene of interest for non-targeted expression.

[1134] FIG. 3a Vector VC-MME354-1 SEQ ID NO: 3 used for cloning a gene of interest for targeted expression.

[1135] FIG. 3b Vector VC-MME354-1QCZ SEQ ID NO: 2900 used for cloning a gene of interest for targeted expression.

[1136] FIG. 4a Vector VC-MME432-1 SEQ ID NO: 5 used for cloning a gene of interest for targeted expression.

[1137] FIG. 4b Vector VC-MME432-1qcz SEQ ID NO: 2903 used for cloning a gene of interest for targeted expression.

[1138] FIG. 5a Vector VC-MME0489-1p SEQ ID NO: 15 used for cloning a gene of interest for non-targeted expression and cloning of a targeting sequence.

[1139] FIG. 5b Vector VC-MME0489-1QCZ SEQ ID NO: 2906 used for cloning a gene of interest for non-targeted expression and cloning of a targeting sequence.

[1140] FIG. 6 Vector pMTX0270p SEQ ID NO: 16 used for cloning of a targeting sequence.

[1141] FIG. 7 Vector VC-MME0289-1qcz SEQ ID NO: 38 used for cloning a gene of interest for non-targeted expression.

[1142] FIG. 8 Vector VC-MME445-1qz SEQ ID NO: 3752 used for mitochondric targeted expression.

TABLE IA
Nucleic acid sequence ID numbers

| | 1. | 2. | 3. | 4. | 5. | 6. | 7. |
|---|---|---|---|---|---|---|---|
| Application | Hit | Project | Locus | Organism | Lead SEQ ID | Target | SEQ IDs of Nucleic Acid Homologs |
| 1 | 1 | BM_OEX_1 | AT3G60210 | Arabidopsis | 39 | Cytoplasmic | 41, 43, 45, 47, 49, 51, 53, 55, 57, 59, 61, 63, 65, 67, 69, 71, 73, 75, 77, 79, 81, 83, 85, |
| | | | | thaliana | | | 87, 89, 91, 93, 95, 97, 99, 101, 103, 105, 107, 109, 111, 113, 115, 117, 119, 121 |
| 1 | 2 | BM_OEX_1 | AVINDRAFT_2382 | Azotobacter | 137 | Cytoplasmic | 139, 141, 143, 145, 147, 149, 151, 153, 155, 157, 159, 161, 163, |
| | | | | vinelandii | | | 165, 167, 169, 171, 173, 175, 177, 179, 181, 183, 185, 187, 189, |
| | | | | | | | 191, 193, 195, 197, 199, 201, 203, 205, 207, 209, 211, 213, 215, |
| | | | | | | | 217, 219, 221, 223, 225, 227, 229, 231, 233, 235, 237, 239, 241, |
| | | | | | | | 243, 245, 247, 249, 251, 253, 255, 257, 259, 261, 263, 265, 267, |
| | | | | | | | 269, 271, 273, 275, 277, 279, 281, 283, 285, 287, 289, 291, 293, |
| | | | | | | | 295, 297, 299, 301, 303, 305, 307, 309, 311, 313, 315, 317, 319, |
| | | | | | | | 321, 323, 325, 327, 329, 331, 333, 335, 337, 339, 341, 343, 345, |
| | | | | | | | 347, 349, 351, 353, 355, 357, 359, 361, 363, 365, 367, 369, 371, |
| | | | | | | | 373, 375, 377, 379, 381, 383, 385, 387, 389, 391, 393, 395, 397, |
| | | | | | | | 399, 401, 403, 405, 407, 409, 411, 413, 415, 417, 419, 421, 423, |
| | | | | | | | 425, 427, 429, 431, 433, 435, 437, 439, 441, 443, 445, 447, 449, |
| | | | | | | | 451, 453, 455, 457, 459, 461, 463, 465, 467, 469, 471, 473, 475, |
| | | | | | | | 477, 479, 481, 483, 485, 487, 489, 491, 493, 495, 497, 499, 501, |
| | | | | | | | 503, 505, 507, 509, 511, 513, 515, 517, 519, 521, 523, 525, 527, |
| | | | | | | | 529, 531, 533, 535, 537, 539, 541, 543, 545, 547, 549, 551, 553, |
| | | | | | | | 555, 557, 559, 561, 563, 565, 567, 569, 571, 573, 575, 577, 579, |
| | | | | | | | 581, 583, 585, 587, 589, 591, 593, 595, 597, 599, 601, 603, 605, |
| | | | | | | | 607, 609, 611, 613, 615, 617, 619, 621, 623, 625, 627, 629, 631, |
| | | | | | | | 1247, 1249, 1251, 1253, 1255, 1257, 1259, 1261, 1263, 1265, |
| | | | | | | | 1267, 1269, 1271, 1273, 1275, 1277, 1279, 1281, 1283, 1285, |
| | | | | | | | 1287, 1289, 1291, 1293, 1295, 1297, 1299, 1301, 1303, 1305, |
| | | | | | | | 1307, 1309, 1311, 1313, 1315, 1317 |
| 1 | 5 | BM_OEX_1 | B0730 | E. coli | 1327 | Cytoplasmic | 1329, 1331, 1333, 1335, 1337, 1339, 1341, 1343, 1345, 1347, |
| | | | | | | | 1349, 1351, 1353, 1355, 1357, 1359, 1361, 1363, 1365, 1367, |
| | | | | | | | 1369, 1371, 1373, 1375, 1377, 1379, 1381, 1383, 1385, 1387, |
| | | | | | | | 1389, 1391, 1393, 1395, 1397, 1399, 1401, 1403, 1405, 1407, |
| | | | | | | | 1409, 1411, 1413, 1415, 1417, 1419 |
| 1 | 6 | BM_OEX_1 | B1926 | E. coli | 1425 | Cytoplasmic | 1427, 1429, 1431, 1433, 1435, 1437, 1439, 1441 |
| 1 | 7 | BM_OEX_1 | B2426 | E. coli | 1449 | Cytoplasmic | 1451, 1453, 1455, 1457, 1459, 1461, 1463, 1465, 1467, 1469, |
| | | | | | | | 1471, 1473, 1475, 1477, 1479, 1481, 1483, 1485, 1487, 1489, |
| | | | | | | | 1491, 1493, 1495, 1497, 1499, 1501, 1503, 1505, 1507, 1509, |
| | | | | | | | 1511, 1513, 1515, 1517, 1519, 1521, 1523, 1525, 1527, 1529, |
| | | | | | | | 1531, 1533, 1535, 1537, 1539, 1541, 1543, 1545, 1547, 1549, |
| | | | | | | | 1551, 1553, 1555, 1557, 1559, 1561, 1563, 1565, 1567, 1569, |
| | | | | | | | 1571, 1573, 1575, 1577, 1579, 1581, 1583, 1585, 1587, 1589, |
| | | | | | | | 1591, 1593, 1595, 1597, 1599, 1601, 1603, 1605, 1607, 1609, |
| | | | | | | | 1611, 1613, 1615, 1617, 1619, 1621, 1623, 1625, 1627, 1629, |
| | | | | | | | 1631, 1633, 1635, 1637, 1639, 1641, 1643, 1645, 1647, 1649, |
| | | | | | | | 1651, 1653, 1655, 1657, 1659, 1661, 1663, 1665, 1667, 1669, |
| | | | | | | | 1671, 1673, 1675, 1677, 1679, 1681, 1683, 1685, 1687, 1689, |
| | | | | | | | 1691, 1693, 1695, 1697, 1699, 1701, 1703, 1705, 1707, 1709, |
| | | | | | | | 1711, 1713, 1715, 1717, 1719, 1721, 1723, 1725, 1727, 1729, |
| | | | | | | | 1731, 1733, 1735, 1737, 1739, 1741, 1743, 1745, 1747, 1749, |
| | | | | | | | 1751, 1753, 1755, 1757, 1759, 1761, 1763, 1765, 1767, 1769, |
| | | | | | | | 1771, 1773, 1775, 1777, 1779, 1781, 1783, 1785, 1787, 1789, |
| | | | | | | | 1791, 1793, 1795, 1797, 1799, 1801, 1803, 1805, 1807, 1809, |
| | | | | | | | 1811, 1813, 1815, 1817, 1819, 1821, 1823, 1825, 1827, 1829, |
| | | | | | | | 1831, 1833, 1835, 1837, 1839, 1841, 1843, 1845, 1847, 1849, |
| | | | | | | | 1851, 1853, 1855, 1857, 1859, 1861, 1863, 1865, 1867, 1869, |
| | | | | | | | 1871, 1873, 1875, 1877, 1879, 1881, 1883, 1885, 1887, 1889, |
| | | | | | | | 1891, 1893, 1895, 1897, 1899, 1901, 1903, 1905, 1907, 1909, |
| | | | | | | | 1911, 1913, 1915, 1917, 1919, 1921, 1923, 1925, 1927, 1929, |
| | | | | | | | 1931, 1933, 1935, 1937, 1939, 1941, 1943, 1945, 1947, 1949, |
| | | | | | | | 1951, 1953, 1955, 1957, 1959, 1961, 1963, 1965, 1967, 1969, |
| | | | | | | | 1971, 1973, 1975, 1977, 1979, 1981, 1983, 1985, 1987, 1989, |
| | | | | | | | 1991 |
| 1 | 8 | BM_OEX_1 | GM02LC13630 | Glycine max | 2172 | Cytoplasmic | 2174, 2176, 2178, 2180, 2182, 2184, 2186, 2188, 2190, 2192, 2194, 2196, 2198, 2200, |
| | | | | | | | 2202, 2204, 2206, 2208 |
| 1 | 9 | BM_OEX_1 | SLL0418 | Synechocystis | 2214 | Mitochondrial | 2216, 2218, 2220, 2222, 2224, 2226, 2228, 2230, 2232, 2234, |
| | | | | sp. | | | 2236, 2238, 2240, 2242, 2244, 2246, 2248, 2250, 2252, 2254, |
| | | | | | | | 2256, 2258, 2260, 2262, 2264, 2266, 2268, 2270, 2272, 2274, |
| | | | | | | | 2276, 2278, 2280, 2282, 2284, 2286, 2288, 2290, 2292, 2294, |
| | | | | | | | 2296, 2298, 2300, 2302, 2304, 2306, 2308, 2310, 2312, 2314, |
| | | | | | | | 2316, 2318, 2320, 2322, 2324, 2326, 2328 |
| 1 | 10 | BM_OEX_1 | YCR085W | Saccharomyces cerevisiae | 2341 | Cytoplasmic | — |
| 1 | 11 | BM_OEX_1 | YDL155W | Saccharomyces | 2345 | Cytoplasmic | 2347, 2349, 2351, 2353, 2355, 2357, 2359, 2361, 2363, 2365, |
| | | | | cerevisiae | | | 2367, 2369, 2371, 2373, 2375, 2377, 2379, 2381, 2383, 2385, |
| | | | | | | | 2387, 2389, 2391, 2393, 2395, 2397, 2399, 2401, 2403, 2405, |
| | | | | | | | 2407, 2409, 2411, 2413, 2415, 2417, 2419, 2421, 2423, 2425, |
| | | | | | | | 2427, 2429, 2431, 2433, 2435, 2437, 2439, 2441, 2443 |
| 1 | 12 | BM_OEX_1 | YHL019C | Saccharomyces | 2463 | Cytoplasmic | 2465, 2467, 2469, 2471, 2473, 2475, 2477, 2479, 2481, 2483, |
| | | | | cerevisiae | | | 2485, 2487, 2489, 2491, 2493, 2495, 2497, 2499 |
| 1 | 13 | BM_OEX_1 | YJR066W | Saccharomyces | 2510 | Cytoplasmic | 2512, 2514, 2516, 2518, 2520, 2522, 2524, 2526, 2528, 2530, |
| | | | | cerevisiae | | | 2532, 2534, 2536, 2538, 2540, 2542, 2544, 2546, 2548, 2550, |
| | | | | | | | 2552, 2554, 2556, 2558, 2560, 2562, 2564, 2566, 2568, 2570, |
| | | | | | | | 2572, 2574, 2576, 2578 |
| 1 | 14 | BM_OEX_1 | YKR015C | Saccharomyces | 2595 | Cytoplasmic | — |
| | | | | cerevisiae | | | |
| 1 | 15 | BM_OEX_1 | YNL025C | Saccharomyces | 2599 | Cytoplasmic | 2601, 2603, 2605, 2607, 2609, 2611, 2613, 2615, 2617, 2619, 2621, 2623, 2625, 2627, |
| | | | | cerevisiae | | | 2629, 2631, 2633 |
| 1 | 16 | BM_OEX_1 | YOL073C | Saccharomyces | 2645 | Plastidic | 2647, 2649, 2651, 2653 |
| | | | | cerevisiae | | | |
| 1 | 17 | BM_OEX_1 | YPL167C | Saccharomyces | 2661 | Cytoplasmic | 2663, 2665, 2667, 2669, 2671, 2673, 2675, 2677, 2679, 2681, 2683, 2685, 2687, 2689, |
| | | | | cerevisiae | | | 2691, 2693, 2695, 2697, 2699, 2701, 2703, 2705, 2707, 2709, 2711, 2713, 2715, |
| | | | | | | | 2717, 2719, 2721, 2723 |
| 1 | 18 | BM_OEX_1 | YPL223C | Saccharomyces | 2736 | Cytoplasmic | 2738 |
| | | | | cerevisiae | | | |
| 1 | 19 | BM_OEX_1 | YPL249C-A | Saccharomyces | 2742 | Cytoplasmic | 2744, 2746, 2748, 2750, 2752, 2754, 2756, 2758, 2760, 2762, |
| | | | | cerevisiae | | | 2764, 2766, 2768, 2770, 2772, 2774, 2776, 2778, 2780, 2782, |
| | | | | | | | 2784, 2786, 2788, 2790, 2792, 2794, 2796, 2798, 2800, 2802, |
| | | | | | | | 2804, 2806, 2808, 2810, 2812, 2814, 2816, 2818, 2820, 2822, |
| | | | | | | | 2824, 2826, 2828, 2830, 2832, 2834, 2836, 2838, 2840, 2842, |
| | | | | | | | 2844, 2846, 2848, 2850, 2852, 2854, 2856, 2858, 2860, 2862 |
| 1 | 20 | BM_OEX_1 | B2426_2 | E. coli | 2907 | Cytoplasmic | 2909, 2911, 2913, 2915, 2917, 2919, 2921, 2923, 2925, 2927, |
| | | | | | | | 2929, 2931, 2933, 2935, 2937, 2939, 2941, 2943, 2945, 2947, |
| | | | | | | | 2949, 2951, 2953, 2955, 2957, 2959, 2961, 2963, 2965, 2967, |
| | | | | | | | 2969, 2971, 2973, 2975, 2977, 2979, 2981, 2983, 2985, 2987, |
| | | | | | | | 2989, 2991, 2993, 2995, 2997, 2999, 3001, 3003, 3005, 3007, |
| | | | | | | | 3009, 3011, 3013, 3015, 3017, 3019, 3021, 3023, 3025, 3027, |
| | | | | | | | 3029, 3031, 3033, 3035, 3037, 3039, 3041, 3043, 3045, 3047, |
| | | | | | | | 3049, 3051, 3053, 3055, 3057, 3059, 3061, 3063, 3065, 3067, |
| | | | | | | | 3069, 3071, 3073, 3075, 3077, 3079, 3081, 3083, 3085, 3087, |
| | | | | | | | 3089, 3091, 3093, 3095, 3097, 3099, 3101, 3103, 3105, 3107, |
| | | | | | | | 3109, 3111, 3113, 3115, 3117, 3119, 3121, 3123, 3125, 3127, |
| | | | | | | | 3129, 3131, 3133, 3135, 3137, 3139, 3141, 3143, 3145, 3147, |
| | | | | | | | 3149, 3151, 3153, 3155, 3157, 3159, 3161, 3163, 3165, 3167, |
| | | | | | | | 3169, 3171, 3173, 3175, 3177, 3179, 3181, 3183, 3185, 3187, |
| | | | | | | | 3189, 3191, 3193, 3195, 3197, 3199, 3201, 3203, 3205, 3207, |
| | | | | | | | 3209, 3211, 3213, 3215, 3217, 3219, 3221, 3223, 3225, 3227, |
| | | | | | | | 3229, 3231, 3233, 3235, 3237, 3239, 3241, 3243, 3245, 3247, |
| | | | | | | | 3249, 3251, 3253, 3255, 3257, 3259, 3261, 3263, 3265, 3267, |
| | | | | | | | 3269, 3271, 3273, 3275, 3277, 3279, 3281, 3283, 3285, 3287, |
| | | | | | | | 3289, 3291, 3293, 3295, 3297, 3299, 3301, 3303, 3305, 3307, |
| | | | | | | | 3309, 3311, 3313, 3315, 3317, 3319, 3321, 3323, 3325, 3327, |
| | | | | | | | 3329, 3331, 3333, 3335, 3337, 3339, 3341, 3343, 3345, 3347, |
| | | | | | | | 3349, 3351, 3353, 3355, 3357, 3359, 3361, 3363, 3365, 3367, |
| | | | | | | | 3369, 3371, 3373, 3375, 3377, 3379, 3381, 3383, 3385, 3387, |
| | | | | | | | 3389, 3391, 3393, 3395, 3397, 3399, 3401, 3403, 3405, 3407, |
| | | | | | | | 3409, 3411, 3413, 3415, 3417, 3419, 3421, 3423, 3425, 3427, |
| | | | | | | | 3429, 3431, 3433, 3435, 3437, 3439, 3441, 3443, 3445, 3447, |
| | | | | | | | 3449, 3451 |
| 1 | 21 | BM_OEX_1 | GM02LC13630_2 | Glycine max | 3632 | Cytoplasmic | 3634, 3636, 3638, 3640, 3642, 3644, 3646, 3648, 3650, 3652, 3654, 3656, 3658, 3660, |
| | | | | | | | 3662, 3664, 3666, 3668 |
| 1 | 22 | BM_OEX_1 | YPL167C_2 | Saccharomyces | 3676 | Cytoplasmic | 3678, 3680, 3682, 3684, 3686 |
| | | | | cerevisiae | | | |
| 1 | 23 | BM_OEX_1 | YPL249C- | Saccharomyces | 3698 | Cytoplasmic | — |
| | | | A_2 | cerevisiae | | | |

TABLE IB
Nucleic acid sequence ID numbers

| | 1. | 2. | 3. | 4. | 5. | 6. | 7. |
|---|---|---|---|---|---|---|---|
| Application | Hit | Project | Locus | Organism | Lead SEQ ID | Target | SEQ IDs of Nucleic Acid Homologs |
| 1 | 1 | BM_OEX_1 | AT3G60210 | Arabidopsis thaliana | 39 | Cytoplasmic | 123, 125, 127, 129, 3704 |
| 1 | 2 | BM_OEX_1 | AVINDRAFT_2382 | Azotobacter | 137 | Cytoplasmic | 939, 941, 943, 945, 947, 949, 951, 953, 955, 957, 959, 961, 963, 965, 967, 969, |
| | | | | vinelandii | | | 971, 973, 975 |
| 1 | 3 | BM_OEX_1 | AVINDRAFT_2913 | Azotobacter | 982 | Cytoplasmic | 1180, 1182, 1184, 1186, 1188, 1190, 1192, 1194, 1196, 1198, |
| | | | | vinelandii | | | 1200, 1202, 1204, 1206, 1208, 1210, 1212, 1214, 1216, 1218, |
| | | | | | | | 1220, 3708 |
| 1 | 4 | BM_OEX_1 | B0252 | E. coli | 1225 | Cytoplasmic | — |
| 1 | 5 | BM_OEX_1 | B0730 | E. coli | 1327 | Cytoplasmic | — |
| 1 | 6 | BM_OEX_1 | B1926 | E. coli | 1425 | Cytoplasmic | — |
| 1 | 7 | BM_OEX_1 | B2426 | E. coli | 1449 | Cytoplasmic | 1993, 1995, 1997, 1999, 2001, 2003, 2005, 2007, 2009, 2011, |
| | | | | | | | 2013, 2015, 2017, 2019, 2021, 2023, 2025, 2027, 2029, 2031, |
| | | | | | | | 2033, 2035, 2037, 2039, 2041, 2043, 2045, 2047, 2049, 2051, |
| | | | | | | | 2053, 2055, 2057, 2059, 2061, 2063, 2065, 2067, 2069, 2071, |
| | | | | | | | 2073, 2075, 2077, 2079, 2081, 2083, 2085, 2087, 2089, 2091, |
| | | | | | | | 2093, 2095, 2097, 2099, 2101, 2103, 2105, 2107, 2109, 2111, |
| | | | | | | | 2113, 2115, 2117, 2119, 2121, 2123, 2125, 2127, 2129, 2131, |
| | | | | | | | 2133, 2135, 2137, 2139, 2141, 2143, 2145, 2147, 2149, 2151, |
| | | | | | | | 2153, 2155, 2157, 2159, 2161, 2163, 2165, 2167, 3718, 3720 |
| 1 | 8 | BM_OEX_1 | GM02LC13630 | Glycine max | 2172 | Cytoplasmic | — |
| 1 | 9 | BM_OEX_1 | SLL0418 | Synechocystis | 2214 | Mitochondrial | 2330 |
| | | | | sp. | | | |
| 1 | 10 | BM_OEX_1 | YCR085W | Saccharomyces cerevisiae | 2341 | Cytoplasmic | — |
| 1 | 11 | BM_OEX_1 | YDL155W | Saccharomyces | 2345 | Cytoplasmic | 2445, 2447, 2449, 2451, 2453, 2455, 2457, 3724 |
| | | | | cerevisiae | | | |
| 1 | 12 | BM_OEX_1 | YHL019C | Saccharomyces | 2463 | Cytoplasmic | — |
| | | | | cerevisiae | | | |
| 1 | 13 | BM_OEX_1 | YJR066W | Saccharomyces | 2510 | Cytoplasmic | — |
| | | | | cerevisiae | | | |
| 1 | 14 | BM_OEX_1 | YKR015C | Saccharomyces | 2595 | Cytoplasmic | — |
| | | | | cerevisiae | | | |
| 1 | 15 | BM_OEX_1 | YNL025C | Saccharomyces | 2599 | Cytoplasmic | 2635, 2637 |
| | | | | cerevisiae | | | |
| 1 | 16 | BM_OEX_1 | YOL073C | Saccharomyces | 2645 | Plastidic | — |
| | | | | cerevisiae | | | |
| 1 | 17 | BM_OEX_1 | YPL167C | Saccharomyces | 2661 | Cytoplasmic | — |
| | | | | cerevisiae | | | |
| 1 | 18 | BM_OEX_1 | YPL223C | Saccharomyces | 2736 | Cytoplasmic | — |
| | | | | cerevisiae | | | |
| 1 | 19 | BM_OEX_1 | YPL249C-A | Saccharomyces | 2742 | Cytoplasmic | 2864, 2866, 2868, 2870, 2872, 2874, 2876, 2878, 2880, 2882, |
| | | | | cerevisiae | | | 2884, 2886, 2888, 2890, 2892, 2894, 3728, 3730, 3732, 3734, |
| | | | | | | | 3736, 3738, 3740, 3742, 3744, 3746, 3748, 3750 |
| 1 | 20 | BM_OEX_1 | B2426_2 | E. coli | 2907 | Cytoplasmic | 3453, 3455, 3457, 3459, 3461, 3463, 3465, 3467, 3469, 3471, |
| | | | | | | | 3473, 3475, 3477, 3479, 3481, 3483, 3485, 3487, 3489, 3491, |
| | | | | | | | 3493, 3495, 3497, 3499, 3501, 3503, 3505, 3507, 3509, 3511, |
| | | | | | | | 3513, 3515, 3517, 3519, 3521, 3523, 3525, 3527, 3529, 3531, |
| | | | | | | | 3533, 3535, 3537, 3539, 3541, 3543, 3545, 3547, 3549, 3551, |
| | | | | | | | 3553, 3555, 3557, 3559, 3561, 3563, 3565, 3567, 3569, 3571, |
| | | | | | | | 3573, 3575, 3577, 3579, 3581, 3583, 3585, 3587, 3589, 3591, |
| | | | | | | | 3593, 3595, 3597, 3599, 3601, 3603, 3605, 3607, 3609, 3611, |
| | | | | | | | 3613, 3615, 3617, 3619, 3621, 3623, 3625, 3627, 3712, 3714 |
| 1 | 21 | BM_OEX_1 | GM02LC13630_2 | Glycine max | 3632 | Cytoplasmic | 3670 |
| 1 | 22 | BM_OEX_1 | YPL167C_2 | Saccharomyces | 3676 | Cytoplasmic | — |
| | | | | cerevisiae | | | |
| 1 | 23 | BM_OEX_1 | YPL249C- | Saccharomyces | 3698 | Cytoplasmic | — |
| | | | A_2 | cerevisiae | | | |

TABLE IIA
Amino acid sequence ID numbers

| | 1. | 2. | 3. | 4. | 5. | 6. | 7. |
|---|---|---|---|---|---|---|---|
| Application | Hit | Project | Locus | Organism | Lead SEQ ID | Target | SEQ IDs of Polypeptide Homologs |
| 1 | 1 | BM_OEX_1 | AT3G60210 | Arabidopsis thaliana | 40 | Cytoplasmic | 42, 44, 46, 48, 50, 52, 54, 56, 58, 60, 62, 64, 66, 68, 70, 72, 74, 76, 78, 80, 82, 84, 86, |
| | | | | | | | 88, 90, 92, 94, 96, 98, 100, 102, 104, 106, 108, 110, 112, 114, 116, 118, 120, 122 |
| 1 | 2 | BM_OEX_1 | AVINDRAFT_2382 | Azotobacter vinelandii | 138 | Cytoplasmic | 140, 142, 144, 146, 148, 150, 152, 154, 156, 158, 160, 162, 164, |
| | | | | | | | 166, 168, 170, 172, 174, 176, 178, 180, 182, 184, 186, 188, 190, |
| | | | | | | | 192, 194, 196, 198, 200, 202, 204, 206, 208, 210, 212, 214, 216, |
| | | | | | | | 218, 220, 222, 224, 226, 228, 230, 232, 234, 236, 238, 240, 242, |
| | | | | | | | 244, 246, 248, 250, 252, 254, 256, 258, 260, 262, 264, 266, 268, |
| | | | | | | | 270, 272, 274, 276, 278, 280, 282, 284, 286, 288, 290, 292, 294, |
| | | | | | | | 296, 298, 300, 302, 304, 306, 308, 310, 312, 314, 316, 318, 320, |
| | | | | | | | 322, 324, 326, 328, 330, 332, 334, 336, 338, 340, 342, 344, 346, |
| | | | | | | | 348, 350, 352, 354, 356, 358, 360, 362, 364, 366, 368, 370, 372, |
| | | | | | | | 374, 376, 378, 380, 382, 384, 386, 388, 390, 392, 394, 396, 398, |
| | | | | | | | 400, 402, 404, 406, 408, 410, 412, 414, 416, 418, 420, 422, 424, |
| | | | | | | | 426, 428, 430, 432, 434, 436, 438, 440, 442, 444, 446, 448, 450, |
| | | | | | | | 452, 454, 456, 458, 460, 462, 464, 466, 468, 470, 472, 474, 476, |
| | | | | | | | 478, 480, 482, 484, 486, 488, 490, 492, 494, 496, 498, 500, 502, |
| | | | | | | | 504, 506, 508, 510, 512, 514, 516, 518, 520, 522, 524, 526, 528, |
| | | | | | | | 530, 532, 534, 536, 538, 540, 542, 544, 546, 548, 550, 552, 554, |
| | | | | | | | 556, 558, 560, 562, 564, 566, 568, 570, 572, 574, 576, 578, 580, |
| | | | | | | | 582, 584, 586, 588, 590, 592, 594, 596, 598, 600, 602, 604, 606, |
| | | | | | | | 608, 610, 612, 614, 616, 618, 620, 622, 624, 626, 628, 630, 632, |
| | | | | | | | 634, 636, 638, 640, 642, 644, 646, 648, 650, 652, 654, 656, 658, |
| | | | | | | | 660, 662, 664, 666, 668, 670, 672, 674, 676, 678, 680, 682, 684, |
| | | | | | | | 686, 688, 690, 692, 694, 696, 698, 700, 702, 704, 706, 708, 710, |
| | | | | | | | 712, 714, 716, 718, 720, 722, 724, 726, 728, 730, 732, 734, 736, |
| | | | | | | | 738, 740, 742, 744, 746, 748, 750, 752, 754, 756, 758, 760, 762, |
| | | | | | | | 764, 766, 768, 770, 772, 774, 776, 778, 780, 782, 784, 786, 788, |
| | | | | | | | 790, 792, 794, 796, 798, 800, 802, 804, 806, 808, 810, 812, 814, |
| | | | | | | | 816, 818, 820, 822, 824, 826, 828, 830, 832, 834, 836, 838, 840, |
| | | | | | | | 842, 844, 846, 848, 850, 852, 854, 856, 858, 860, 862, 864, 866, |
| | | | | | | | 868, 870, 872, 874, 876, 878, 880, 882, 884, 886, 888, 890, 892, |
| | | | | | | | 894, 896, 898, 900, 902, 904, 906, 908, 910, 912, 914, 916, 918, |
| | | | | | | | 920, 922, 924, 926, 928, 930, 932, 934, 936, 938 |
| 1 | 3 | BM_OEX_1 | AVINDRAFT_2913 | Azotobacter | 983 | Cytoplasmic | 985, 987, 989, 991, 993, 995, 997, 999, 1001, 1003, 1005, 1007, |
| | | | | vinelandii | | | 1009, 1011, 1013, 1015, 1017, 1019, 1021, 1023, 1025, 1027, |
| | | | | | | | 1029, 1031, 1033, 1035, 1037, 1039, 1041, 1043, 1045, 1047, |
| | | | | | | | 1049, 1051, 1053, 1055, 1057, 1059, 1061, 1063, 1065, 1067, |
| | | | | | | | 1069, 1071, 1073, 1075, 1077, 1079, 1081, 1083, 1085, 1087, |
| | | | | | | | 1089, 1091, 1093, 1095, 1097, 1099, 1101, 1103, 1105, 1107, |
| | | | | | | | 1109, 1111, 1113, 1115, 1117, 1119, 1121, 1123, 1125, 1127, |
| | | | | | | | 1129, 1131, 1133, 1135, 1137, 1139, 1141, 1143, 1145, 1147, |
| | | | | | | | 1149, 1151, 1153, 1155, 1157, 1159, 1161, 1163, 1165, 1167, |
| | | | | | | | 1169, 1171, 1173, 1175, 1177, 1179 |
| 1 | 4 | BM_OEX_1 | B0252 | E. coli | 1226 | Cytoplasmic | 1228, 1230, 1232, 1234, 1236, 1238, 1240, 1242, 1244, 1246, |
| | | | | | | | 1248, 1250, 1252, 1254, 1256, 1258, 1260, 1262, 1264, 1266, |
| | | | | | | | 1268, 1270, 1272, 1274, 1276, 1278, 1280, 1282, 1284, 1286, |
| | | | | | | | 1288, 1290, 1292, 1294, 1296, 1298, 1300, 1302, 1304, 1306, |
| | | | | | | | 1308, 1310, 1312, 1314, 1316, 1318 |
| 1 | 5 | BM_OEX_1 | B0730 | E. coli | 1328 | Cytoplasmic | 1330, 1332, 1334, 1336, 1338, 1340, 1342, 1344, 1346, 1348, |
| | | | | | | | 1350, 1352, 1354, 1356, 1358, 1360, 1362, 1364, 1366, 1368, |
| | | | | | | | 1370, 1372, 1374, 1376, 1378, 1380, 1382, 1384, 1386, 1388, |
| | | | | | | | 1390, 1392, 1394, 1396, 1398, 1400, 1402, 1404, 1406, 1408, |
| | | | | | | | 1410, 1412, 1414, 1416, 1418, 1420 |
| 1 | 6 | BM_OEX_1 | B1926 | E. coli | 1426 | Cytoplasmic | 1428, 1430, 1432, 1434, 1436, 1438, 1440, 1442 |
| 1 | 7 | BM_OEX_1 | B2426 | E. coli | 1450 | Cytoplasmic | 1452, 1454, 1456, 1458, 1460, 1462, 1464, 1466, 1468, 1470, |
| | | | | | | | 1472, 1474, 1476, 1478, 1480, 1482, 1484, 1486, 1488, 1490, |
| | | | | | | | 1492, 1494, 1496, 1498, 1500, 1502, 1504, 1506, 1508, 1510, |
| | | | | | | | 1512, 1514, 1516, 1518, 1520, 1522, 1524, 1526, 1528, 1530, |
| | | | | | | | 1532, 1534, 1536, 1538, 1540, 1542, 1544, 1546, 1548, 1550, |
| | | | | | | | 1552, 1554, 1556, 1558, 1560, 1562, 1564, 1566, 1568, 1570, |
| | | | | | | | 1572, 1574, 1576, 1578, 1580, 1582, 1584, 1586, 1588, 1590, |
| | | | | | | | 1592, 1594, 1596, 1598, 1600, 1602, 1604, 1606, 1608, 1610, |
| | | | | | | | 1612, 1614, 1616, 1618, 1620, 1622, 1624, 1626, 1628, 1630, |
| | | | | | | | 1632, 1634, 1636, 1638, 1640, 1642, 1644, 1646, 1648, 1650, |
| | | | | | | | 1652, 1654, 1656, 1658, 1660, 1662, 1664, 1666, 1668, 1670, |
| | | | | | | | 1672, 1674, 1676, 1678, 1680, 1682, 1684, 1686, 1688, 1690, |
| | | | | | | | 1692, 1694, 1696, 1698, 1700, 1702, 1704, 1706, 1708, 1710, |
| | | | | | | | 1712, 1714, 1716, 1718, 1720, 1722, 1724, 1726, 1728, 1730, |
| | | | | | | | 1732, 1734, 1736, 1738, 1740, 1742, 1744, 1746, 1748, 1750, |
| | | | | | | | 1752, 1754, 1756, 1758, 1760, 1762, 1764, 1766, 1768, 1770, |
| | | | | | | | 1772, 1774, 1776, 1778, 1780, 1782, 1784, 1786, 1788, 1790, |
| | | | | | | | 1792, 1794, 1796, 1798, 1800, 1802, 1804, 1806, 1808, 1810, |
| | | | | | | | 1812, 1814, 1816, 1818, 1820, 1822, 1824, 1826, 1828, 1830, |
| | | | | | | | 1832, 1834, 1836, 1838, 1840, 1842, 1844, 1846, 1848, 1850, |
| | | | | | | | 1852, 1854, 1856, 1858, 1860, 1862, 1864, 1866, 1868, 1870, |
| | | | | | | | 1872, 1874, 1876, 1878, 1880, 1882, 1884, 1886, 1888, 1890, |
| | | | | | | | 1892, 1894, 1896, 1898, 1900, 1902, 1904, 1906, 1908, 1910, |
| | | | | | | | 1912, 1914, 1916, 1918, 1920, 1922, 1924, 1926, 1928, 1930, |
| | | | | | | | 1932, 1934, 1936, 1938, 1940, 1942, 1944, 1946, 1948, 1950, |
| | | | | | | | 1952, 1954, 1956, 1958, 1960, 1962, 1964, 1966, 1968, 1970, |
| | | | | | | | 1972, 1974, 1976, 1978, 1980, 1982, 1984, 1986, 1988, 1990, |
| | | | | | | | 1992 |
| 1 | 8 | BM_OEX_1 | GM02LC13630 | Glycine max | 2173 | Cytoplasmic | 2175, 2177, 2179, 2181, 2183, 2185, 2187, 2189, 2191, 2193, 2195, 2197, 2199, 2201, |
| | | | | | | | 2203, 2205, 2207, 2209 |
| 1 | 9 | BM_OEX_1 | SLL0418 | Synechocystis | 2215 | Mitochondrial | 2217, 2219, 2221, 2223, 2225, 2227, 2229, 2231, 2233, 2235, |
| | | | | sp. | | | 2237, 2239, 2241, 2243, 2245, 2247, 2249, 2251, 2253, 2255, |
| | | | | | | | 2257, 2259, 2261, 2263, 2265, 2267, 2269, 2271, 2273, 2275, |
| | | | | | | | 2277, 2279, 2281, 2283, 2285, 2287, 2289, 2291, 2293, 2295, |
| | | | | | | | 2297, 2299, 2301, 2303, 2305, 2307, 2309, 2311, 2313, 2315, |
| | | | | | | | 2317, 2319, 2321, 2323, 2325, 2327, 2329 |
| 1 | 10 | BM_OEX_1 | YCR085W | Saccharomyces cerevisiae | 2342 | Cytoplasmic | — |
| 1 | 11 | BM_OEX_1 | YDL155W | Saccharomyces | 2346 | Cytoplasmic | 2348, 2350, 2352, 2354, 2356, 2358, 2360, 2362, 2364, 2366, |
| | | | | cerevisiae | | | 2368, 2370, 2372, 2374, 2376, 2378, 2380, 2382, 2384, 2386, |
| | | | | | | | 2388, 2390, 2392, 2394, 2396, 2398, 2400, 2402, 2404, 2406, |
| | | | | | | | 2408, 2410, 2412, 2414, 2416, 2418, 2420, 2422, 2424, 2426, |
| | | | | | | | 2428, 2430, 2432, 2434, 2436, 2438, 2440, 2442, 2444 |
| 1 | 12 | BM_OEX_1 | YHL019C | Saccharomyces | 2464 | Cytoplasmic | 2466, 2468, 2470, 2472, 2474, 2476, 2478, 2480, 2482, 2484, |
| | | | | cerevisiae | | | 2486, 2488, 2490, 2492, 2494, 2496, 2498, 2500 |
| 1 | 13 | BM_OEX_1 | YJR066W | Saccharomyces | 2511 | Cytoplasmic | 2513, 2515, 2517, 2519, 2521, 2523, 2525, 2527, 2529, 2531, |
| | | | | cerevisiae | | | 2533, 2535, 2537, 2539, 2541, 2543, 2545, 2547, 2549, 2551, |
| | | | | | | | 2553, 2555, 2557, 2559, 2561, 2563, 2565, 2567, 2569, 2571, |
| | | | | | | | 2573, 2575, 2577, 2579 |
| 1 | 14 | BM_OEX_1 | YKR015C | Saccharomyces | 2596 | Cytoplasmic | — |
| | | | | cerevisiae | | | |
| 1 | 15 | BM_OEX_1 | YNL025C | Saccharomyces | 2600 | Cytoplasmic | 2602, 2604, 2606, 2608, 2610, 2612, 2614, 2616, 2618, 2620, |
| | | | | cerevisiae | | | 2622, 2624, 2626, 2628, 2630, 2632, 2634 |
| 1 | 16 | BM_OEX_1 | YOL073C | Saccharomyces | 2646 | Plastidic | 2648, 2650, 2652, 2654 |
| | | | | cerevisiae | | | |
| 1 | 17 | BM_OEX_1 | YPL167C | Saccharomyces | 2662 | Cytoplasmic | 2664, 2666, 2668, 2670, 2672, 2674, 2676, 2678, 2680, 2682, |
| | | | | cerevisiae | | | 2684, 2686, 2688, 2690, 2692, 2694, 2696, 2698, 2700, 2702, |
| | | | | | | | 2704, 2706, 2708, 2710, 2712, 2714, 2716, 2718, 2720, 2722, |
| | | | | | | | 2724 |
| 1 | 18 | BM_OEX_1 | YPL223C | Saccharomyces | 2737 | Cytoplasmic | 2739 |
| | | | | cerevisiae | | | |
| 1 | 19 | BM_OEX_1 | YPL249C-A | Saccharomyces | 2743 | Cytoplasmic | 2745, 2747, 2749, 2751, 2753, 2755, 2757, 2759, 2761, 2763, |
| | | | | cerevisiae | | | 2765, 2767, 2769, 2771, 2773, 2775, 2777, 2779, 2781, 2783, |
| | | | | | | | 2785, 2787, 2789, 2791, 2793, 2795, 2797, 2799, 2801, 2803, |
| | | | | | | | 2805, 2807, 2809, 2811, 2813, 2815, 2817, 2819, 2821, 2823, |
| | | | | | | | 2825, 2827, 2829, 2831, 2833, 2835, 2837, 2839, 2841, 2843, |
| | | | | | | | 2845, 2847, 2849, 2851, 2853, 2855, 2857, 2859, 2861, 2863 |
| 1 | 20 | BM_OEX_1 | B2426_2 | E. coli | 2908 | Cytoplasmic | 2910, 2912, 2914, 2916, 2918, 2920, 2922, 2924, 2926, 2928, |
| | | | | | | | 2930, 2932, 2934, 2936, 2938, 2940, 2942, 2944, 2946, 2948, |
| | | | | | | | 2950, 2952, 2954, 2956, 2958, 2960, 2962, 2964, 2966, 2968, |
| | | | | | | | 2970, 2972, 2974, 2976, 2978, 2980, 2982, 2984, 2986, 2988, |
| | | | | | | | 2990, 2992, 2994, 2996, 2998, 3000, 3002, 3004, 3006, 3008, |
| | | | | | | | 3010, 3012, 3014, 3016, 3018, 3020, 3022, 3024, 3026, 3028, |
| | | | | | | | 3030, 3032, 3034, 3036, 3038, 3040, 3042, 3044, 3046, 3048, |
| | | | | | | | 3050, 3052, 3054, 3056, 3058, 3060, 3062, 3064, 3066, 3068, |
| | | | | | | | 3070, 3072, 3074, 3076, 3078, 3080, 3082, 3084, 3086, 3088, |
| | | | | | | | 3090, 3092, 3094, 3096, 3098, 3100, 3102, 3104, 3106, 3108, |
| | | | | | | | 3110, 3112, 3114, 3116, 3118, 3120, 3122, 3124, 3126, 3128, |
| | | | | | | | 3130, 3132, 3134, 3136, 3138, 3140, 3142, 3144, 3146, 3148, |
| | | | | | | | 3150, 3152, 3154, 3156, 3158, 3160, 3162, 3164, 3166, 3168, |
| | | | | | | | 3170, 3172, 3174, 3176, 3178, 3180, 3182, 3184, 3186, 3188, |
| | | | | | | | 3190, 3192, 3194, 3196, 3198, 3200, 3202, 3204, 3206, 3208, |
| | | | | | | | 3210, 3212, 3214, 3216, 3218, 3220, 3222, 3224, 3226, 3228, |
| | | | | | | | 3230, 3232, 3234, 3236, 3238, 3240, 3242, 3244, 3246, 3248, |
| | | | | | | | 3250, 3252, 3254, 3256, 3258, 3260, 3262, 3264, 3266, 3268, |
| | | | | | | | 3270, 3272, 3274, 3276, 3278, 3280, 3282, 3284, 3286, 3288, |
| | | | | | | | 3290, 3292, 3294, 3296, 3298, 3300, 3302, 3304, 3306, 3308, |
| | | | | | | | 3310, 3312, 3314, 3316, 3318, 3320, 3322, 3324, 3326, 3328, |
| | | | | | | | 3330, 3332, 3334, 3336, 3338, 3340, 3342, 3344, 3346, 3348, |
| | | | | | | | 3350, 3352, 3354, 3356, 3358, 3360, 3362, 3364, 3366, 3368, |
| | | | | | | | 3370, 3372, 3374, 3376, 3378, 3380, 3382, 3384, 3386, 3388, |
| | | | | | | | 3390, 3392, 3394, 3396, 3398, 3400, 3402, 3404, 3406, 3408, |
| | | | | | | | 3410, 3412, 3414, 3416, 3418, 3420, 3422, 3424, 3426, 3428, |
| | | | | | | | 3430, 3432, 3434, 3436, 3438, 3440, 3442, 3444, 3446, 3448, |
| | | | | | | | 3450, 3452 |
| 1 | 21 | BM_OEX_1 | GM02LC13630_2 | Glycine max | 3633 | Cytoplasmic | 3635, 3637, 3639, 3641, 3643, 3645, 3647, 3649, 3651, 3653, 3655, 3657, 3659, |
| | | | | | | | 3661, 3663, 3665, 3667, 3669 |
| 1 | 22 | BM_OEX_1 | YPL167C_2 | Saccharomyces | 3677 | Cytoplasmic | 3679, 3681, 3683, 3685, 3687 |
| | | | | cerevisiae | | | |
| 1 | 23 | BM_OEX_1 | YPL249C-A_2 | Saccharomyces | 3699 | Cytoplasmic | — |
| | | | | cerevisiae | | | |

TABLE IIB
Amino acid sequence ID numbers

| | 1. | 2. | 3. | 4. | 5. | 6. | 7. |
|---|---|---|---|---|---|---|---|
| Application | Hit | Project | Locus | Organism | Lead SEQ ID | Target | SEQ IDs of Polypeptide Homologs |
| 1 | 1 | BM_OEX_1 | AT3G60210 | Arabidopsis | 40 | Cytoplasmic | 124, 126, 128, 130, 3705 |
| | | | | thaliana | | | |
| 1 | 2 | BM_OEX_1 | AVINDRAFT_2382 | Azotobacter | 138 | Cytoplasmic | 940, 942, 944, 946, 948, 950, 952, 954, 956, 958, 960, 962, 964, 966, 968, 970, |
| | | | | vinelandii | | | 972, 974, 976 |
| 1 | 3 | BM_OEX_1 | AVINDRAFT_2913 | Azotobacter | 983 | Cytoplasmic | 1181, 1183, 1185, 1187, 1189, 1191, 1193, 1195, 1197, 1199, 1201, 1203, 1205, |
| | | | | vinelandii | | | 1207, 1209, 1211, 1213, 1215, 1217, 1219, 1221, 3709 |
| 1 | 4 | BM_OEX_1 | B0252 | E. coli | 1226 | Cytoplasmic | — |
| 1 | 5 | BM_OEX_1 | B0730 | E. coli | 1328 | Cytoplasmic | — |
| 1 | 6 | BM_OEX_1 | B1926 | E. coli | 1426 | Cytoplasmic | — |
| 1 | 7 | BM_OEX_1 | B2426 | E. coli | 1450 | Cytoplasmic | 1994, 1996, 1998, 2000, 2002, 2004, 2006, 2008, 2010, 2012, |
| | | | | | | | 2014, 2016, 2018, 2020, 2022, 2024, 2026, 2028, 2030, 2032, |
| | | | | | | | 2034, 2036, 2038, 2040, 2042, 2044, 2046, 2048, 2050, 2052, |
| | | | | | | | 2054, 2056, 2058, 2060, 2062, 2064, 2066, 2068, 2070, 2072, |
| | | | | | | | 2074, 2076, 2078, 2080, 2082, 2084, 2086, 2088, 2090, 2092, |
| | | | | | | | 2094, 2096, 2098, 2100, 2102, 2104, 2106, 2108, 2110, 2112, |
| | | | | | | | 2114, 2116, 2118, 2120, 2122, 2124, 2126, 2128, 2130, 2132, |
| | | | | | | | 2134, 2136, 2138, 2140, 2142, 2144, 2146, 2148, 2150, 2152, |
| | | | | | | | 2154, 2156, 2158, 2160, 2162, 2164, 2166, 2168, 3719, 3721 |
| 1 | 8 | BM_OEX_1 | GM02LC13630 | Glycine max | 2173 | Cytoplasmic | — |
| 1 | 9 | BM_OEX_1 | SLL0418 | Synechocystis | 2215 | Mitochondrial | 2331 |
| | | | | sp. | | | |
| 1 | 10 | BM_OEX_1 | YCR085W | Saccharomyces cerevisiae | 2342 | Cytoplasmic | — |
| 1 | 11 | BM_OEX_1 | YDL155W | Saccharomyces | 2346 | Cytoplasmic | 2446, 2448, 2450, 2452, 2454, 2456, 2458, 3725 |
| | | | | cerevisiae | | | |
| 1 | 12 | BM_OEX_1 | YHL019C | Saccharomyces | 2464 | Cytoplasmic | — |
| | | | | cerevisiae | | | |
| 1 | 13 | BM_OEX_1 | YJR066W | Saccharomyces | 2511 | Cytoplasmic | — |
| | | | | cerevisiae | | | |
| 1 | 14 | BM_OEX_1 | YKR015C | Saccharomyces | 2596 | Cytoplasmic | — |
| | | | | cerevisiae | | | |
| 1 | 15 | BM_OEX_1 | YNL025C | Saccharomyces | 2600 | Cytoplasmic | 2636, 2638 |
| | | | | cerevisiae | | | |
| 1 | 16 | BM_OEX_1 | YOL073C | Saccharomyces | 2646 | Plastidic | — |
| | | | | cerevisiae | | | |
| 1 | 17 | BM_OEX_1 | YPL167C | Saccharomyces | 2662 | Cytoplasmic | — |
| | | | | cerevisiae | | | |
| 1 | 18 | BM_OEX_1 | YPL223C | Saccharomyces | 2737 | Cytoplasmic | — |
| | | | | cerevisiae | | | |
| 1 | 19 | BM_OEX_1 | YPL249C-A | Saccharomyces | 2743 | Cytoplasmic | 2865, 2867, 2869, 2871, 2873, 2875, 2877, 2879, 2881, 2883, 2885, 2887, 2889, |
| | | | | cerevisiae | | | 2891, 2893, 2895, 3729, 3731, 3733, 3735, 3737, 3739, 3741, 3743, 3745, 3747, |
| | | | | | | | 3749, 3751 |
| 1 | 20 | BM_OEX_1 | B2426_2 | E. coli | 2908 | Cytoplasmic | 3454, 3456, 3458, 3460, 3462, 3464, 3466, 3468, 3470, 3472, |
| | | | | | | | 3474, 3476, 3478, 3480, 3482, 3484, 3486, 3488, 3490, 3492, |
| | | | | | | | 3494, 3496, 3498, 3500, 3502, 3504, 3506, 3508, 3510, 3512, |
| | | | | | | | 3514, 3516, 3518, 3520, 3522, 3524, 3526, 3528, 3530, 3532, |
| | | | | | | | 3534, 3536, 3538, 3540, 3542, 3544, 3546, 3548, 3550, 3552, |
| | | | | | | | 3554, 3556, 3558, 3560, 3562, 3564, 3566, 3568, 3570, 3572, |
| | | | | | | | 3574, 3576, 3578, 3580, 3582, 3584, 3586, 3588, 3590, 3592, |
| | | | | | | | 3594, 3596, 3598, 3600, 3602, 3604, 3606, 3608, 3610, 3612, |
| | | | | | | | 3614, 3616, 3618, 3620, 3622, 3624, 3626, 3628, 3713, 3715 |
| 1 | 21 | BM_OEX_1 | GM02LC13630_2 | Glycine max | 3633 | Cytoplasmic | 3671 |
| 1 | 22 | BM_OEX_1 | YPL167C_2 | Saccharomyces | 3677 | Cytoplasmic | — |
| | | | | cerevisiae | | | |
| 1 | 23 | BM_OEX_1 | YPL249C-A_2 | Saccharomyces | 3699 | Cytoplasmic | — |
| | | | | cerevisiae | | | |

TABLE III
Primer nucleic acid sequence ID numbers

| | 1. | 2. | 3. | 4. | 5. | 6. | 7. |
|---|---|---|---|---|---|---|---|
| Application | Hit | Project | Locus | Organism | Lead SEQ ID | Target | SEQ IDs of Primers |
| 1 | 1 | BM_OEX_1 | AT3G60210 | Arabidopsis | 39 | Cytoplasmic | 131, 132 |
| | | | | thaliana | | | |
| 1 | 2 | BM_OEX_1 | AVINDRAFT_2382 | Azotobacter | 137 | Cytoplasmic | 977, 978 |
| | | | | vinelandii | | | |
| 1 | 3 | BM_OEX_1 | AVINDRAFT_2913 | Azotobacter | 982 | Cytoplasmic | 1222, 1223 |
| | | | | vinelandii | | | |
| 1 | 4 | BM_OEX_1 | B0252 | E. coli | 1225 | Cytoplasmic | 1319, 1320 |
| 1 | 5 | BM_OEX_1 | B0730 | E. coli | 1327 | Cytoplasmic | 1421, 1422 |
| 1 | 6 | BM_OEX_1 | B1926 | E. coli | 1425 | Cytoplasmic | 1443, 1444 |
| 1 | 7 | BM_OEX_1 | B2426 | E. coli | 1449 | Cytoplasmic | 2169, 2170 |
| 1 | 8 | BM_OEX_1 | GM02LC13630 | Glycine max | 2172 | Cytoplasmic | 2210, 2211 |
| 1 | 9 | BM_OEX_1 | SLL0418 | Synechocystis | 2214 | Mitochondrial | 2332, 2333 |
| | | | | sp. | | | |
| 1 | 10 | BM_OEX_1 | YCR085W | Saccharomyces | 2341 | Cytoplasmic | 2343, 2344 |
| | | | | cerevisiae | | | |
| 1 | 11 | BM_OEX_1 | YDL155W | Saccharomyces | 2345 | Cytoplasmic | 2459, 2460 |
| | | | | cerevisiae | | | |
| 1 | 12 | BM_OEX_1 | YHL019C | Saccharomyces | 2463 | Cytoplasmic | 2501, 2502 |
| | | | | cerevisiae | | | |
| 1 | 13 | BM_OEX_1 | YJR066W | Saccharomyces | 2510 | Cytoplasmic | 2580, 2581 |
| | | | | cerevisiae | | | |
| 1 | 14 | BM_OEX_1 | YKR015C | Saccharomyces | 2595 | Cytoplasmic | 2597, 2598 |
| | | | | cerevisiae | | | |
| 1 | 15 | BM_OEX_1 | YNL025C | Saccharomyces | 2599 | Cytoplasmic | 2639, 2640 |
| | | | | cerevisiae | | | |
| 1 | 16 | BM_OEX_1 | YOL073C | Saccharomyces | 2645 | Plastidic | 2655, 2656 |
| | | | | cerevisiae | | | |
| 1 | 17 | BM_OEX_1 | YPL167C | Saccharomyces | 2661 | Cytoplasmic | 2725, 2726 |
| | | | | cerevisiae | | | |
| 1 | 18 | BM_OEX_1 | YPL223C | Saccharomyces | 2736 | Cytoplasmic | 2740, 2741 |
| | | | | cerevisiae | | | |
| 1 | 19 | BM_OEX_1 | YPL249C-A | Saccharomyces | 2742 | Cytoplasmic | 2896, 2897 |
| | | | | cerevisiae | | | |
| 1 | 20 | BM_OEX_1 | B2426_2 | E. coli | 2907 | Cytoplasmic | 3629, 3630 |
| 1 | 21 | BM_OEX_1 | GM02LC13630_2 | Glycine max | 3632 | Cytoplasmic | 3672, 3673 |
| 1 | 22 | BM_OEX_1 | YPL167C_2 | Saccharomyces | 3676 | Cytoplasmic | 3688, 3689 |
| | | | | cerevisiae | | | |
| 1 | 23 | BM_OEX_1 | YPL249C-A_2 | Saccharomyces | 3698 | Cytoplasmic | 3700, 3701 |
| | | | | cerevisiae | | | |

TABLE IV
Consensus nucleic acid sequence ID numbers

| | 1. | 2. | 3. | 4. | 5. | 6. | 7. |
|---|---|---|---|---|---|---|---|
| Application | Hit | Project | Locus | Organism | SEQ ID | Target | Lead SEQ IDs of Consensus/Pattern Sequences |
| 1 | 1 | BM_OEX_1 | AT3G60210 | Arabidopsis | 40 | Cytoplasmic | 133, 134, 135, 136 |
| | | | | thaliana | | | |
| 1 | 2 | BM_OEX_1 | AVINDRAFT_2382 | Azotobacter | 138 | Cytoplasmic | 979, 980, 981 |
| | | | | vinelandii | | | |
| 1 | 3 | BM_OEX_1 | AVINDRAFT_2913 | Azotobacter | 983 | Cytoplasmic | 1224 |
| | | | | vinelandii | | | |
| 1 | 4 | BM_OEX_1 | B0252 | E. coli | 1226 | Cytoplasmic | 1321, 1322, 1323, 1324, 1325, 1326 |
| 1 | 5 | BM_OEX_1 | B0730 | E. coli | 1328 | Cytoplasmic | 1423, 1424 |
| 1 | 6 | BM_OEX_1 | B1926 | E. coli | 1426 | Cytoplasmic | 1445, 1446, 1447, 1448 |
| 1 | 7 | BM_OEX_1 | B2426 | E. coli | 1450 | Cytoplasmic | 2171 |
| 1 | 8 | BM_OEX_1 | GM02LC13630 | Glycine max | 2173 | Cytoplasmic | 2212, 2213 |
| 1 | 9 | BM_OEX_1 | SLL0418 | Synechocystis | 2215 | Mitochondrial | 2334, 2335, 2336, 2337, 2338, 2339, 2340 |
| | | | | sp. | | | |
| 1 | 10 | BM_OEX_1 | YCR085W | Saccharomyces | 2342 | Cytoplasmic | — |
| | | | | cerevisiae | | | |
| 1 | 11 | BM_OEX_1 | YDL155W | Saccharomyces | 2346 | Cytoplasmic | 2461, 2462 |
| | | | | cerevisiae | | | |
| 1 | 12 | BM_OEX_1 | YHL019C | Saccharomyces | 2464 | Cytoplasmic | 2503, 2504, 2505, 2506, 2507, 2508, 2509 |
| | | | | cerevisiae | | | |
| 1 | 13 | BM_OEX_1 | YJR066W | Saccharomyces | 2511 | Cytoplasmic | 2582, 2583, 2584, 2585, 2586, 2587, 2588, |
| | | | | cerevisiae | | | 2589, 2590, 2591, 2592, 2593, 2594 |
| 1 | 14 | BM_OEX_1 | YKR015C | Saccharomyces | 2596 | Cytoplasmic | — |
| | | | | cerevisiae | | | |
| 1 | 15 | BM_OEX_1 | YNL025C | Saccharomyces | 2600 | Cytoplasmic | 2641, 2642, 2643, 2644 |
| | | | | cerevisiae | | | |
| 1 | 16 | BM_OEX_1 | YOL073C | Saccharomyces | 2646 | Plastidic | 2657, 2658, 2659, 2660 |
| | | | | cerevisiae | | | |
| 1 | 17 | BM_OEX_1 | YPL167C | Saccharomyces | 2662 | Cytoplasmic | 2727, 2728, 2729, 2730, 2731, 2732, |
| | | | | cerevisiae | | | 2733, 2734, 2735 |
| 1 | 18 | BM_OEX_1 | YPL223C | Saccharomyces | 2737 | Cytoplasmic | — |
| | | | | cerevisiae | | | |
| 1 | 19 | BM_OEX_1 | YPL249C-A | Saccharomyces | 2743 | Cytoplasmic | 2898, 2899 |
| | | | | cerevisiae | | | |
| 1 | 20 | BM_OEX_1 | B2426_2 | E. coli | 2908 | Cytoplasmic | 3631 |
| 1 | 21 | BM_OEX_1 | GM02LC13630_2 | Glycine max | 3633 | Cytoplasmic | 3674, 3675 |
| 1 | 22 | BM_OEX_1 | YPL167C_2 | Saccharomyces | 3677 | Cytoplasmic | 3690, 3691, 3692, 3693, 3694, |
| | | | | cerevisiae | | | 3695, 3696, 3697 |
| 1 | 23 | BM_OEX_1 | YPL249C-A_2 | Saccharomyces | 3699 | Cytoplasmic | — |
| | | | | cerevisiae | | | |

The application's sequence listing, which the Patent Office published only in electronic form, follows.

SEQUENCE LISTING (3756 sequences)

SEQ ID NO: 1 - DNA, 9045 bp, Artificial Sequence
  VC-MME220-1
agcttggacaatcagtaaattgaacggagaatattattcataaaaatacgatagtaacgggtgatatattcattagaatgaaccgaaaccggcggtaaggatctgagctacacatgctcaggttttttacaacgtgcacaacagaattgaaagcaaatatcatgcgatcataggcgtctcgcatatctcattaaagcagggcatgccggtcgagtcaaatctcggtgacgggcaggaccggacggggcggtaccggcaggctgaagtccagctgccagaaacccacgtcatgccagttcccgtgcttgaagccggccgcccgcagcatgccgcggggggcatatccgagcgcctcgtgcatgcgcacgctcgggtcgttgggcagcccgatgacagcgaccacgctcttgaagccctgtgcctccagggacttcagcaggtgggtgtagagcgtggagcccagtcccgtccgctggtggcggggggagacgtacacggtcgactcggccgtccagtcgtaggcgttgcgtgccttccaggggcccgcgtaggcgatgccggcgacctcgccgtccacctcggcgacgagccagggatagcgctcccgcagacggacgaggtcgtccgtccactcctgcggttcctgcggctcggtacggaagttgaccgtgcttgtctcgatgtagtggttgacgatggtgcagaccgccggcatgtccgcctcggtggcacggcggatgtcggccgggcgtcgttctgggctcatggtagactcgacggatccacgtgtggaagatatgaatttttttgagaaactagataagattaatgaatatcggtgttttggttttttcttgtggccgtctttgtttatattgagatttttcaaatcagtgcgcaagacgtgacgtaagtatccgagtcagtttttatttttctactaatttggtcgaagctttgggcggatcctctagattcgacggtatcgataagctcgcggatccctgaaagcgacgttggatgttaacatctacaaattgccttttcttatcgaccatgtacgtaagcgcttacgtttttggtggacccttgaggaaactggtagctgttgtgggcctgtggtctcaagatggatcattaatttccaccttcacctacgatggggggcatcgcaccggtgagtaatattgtacggctaagagcgaatttggcctgtaggatccctgaaagcgacgttggatgttaacatctacaaattgccttttcttatcgaccatgtacgtaagcgcttacgtttttggtggacccttgaggaaactggtagctgttgtgggcctgtggtctcaagatggatcattaatttccaccttcacctacgatggggggcatcgcaccggtgagtaatattgtacggctaagagcgaatttggcctgtaggatccctgaaagcgacgttggatgttaacatctacaaattgccttttcttatcgaccatgtacgtaagcgcttacgtttttggtggacccttgaggaaactggtagctgttgtgggcctgtggtctcaagatggatcattaatttccaccttcacctacgatggggggcatcgcaccggtgagtaatattgtacggctaagagcgaatttggcctgtaggatccgcgagctggtcaatcccattgcttttgaagcagctcaacattgatctctttctcgatcgagggagatttttcaaatcagtgcgcaagacgtgacgtaagtatccgagtcagtttttatttttctactaatttggtcgtttatttcggcgtgtaggacatggcaaccgggcctgaatttcgcgggtattctgtttctattccaactttttcttgatccgcagccattaacgacttttgaatagatacgctgacacgccaagcctcgctagtcaaaagtgtaccaaacaacgctttacagcaagaacggaatgcgcgtgacgctcgcggtgacgccatttcgccttttcagaaatggataaatagccttgcttcctattatatcttcccaaattaccaatacattacactagcatctgaatttcataaccaatctcgatacaccaaatcgaagatctcccgggttgctcttccatggcaatgattaattaacgaagagcaagagctcgaatttccccgatcgttcaaacatttggcaataaagtttcttaagattgaatcctgttgccggtcttgcgatgattatcatataatttctgttgaattacgttaagcatgtaataattaacatgtaatgcatgacgttatttatgagatgggtttttatgattagagtcccgcaattatacatttaatacgcgatagaaaacaaaatatagcgcgcaaactaggataaattatcgcgcgcggtgtcatctatgttactagatcgggaattggcatgcaagcttggcactggccgtcgttttacaacgtcgtgactgggaaaaccctggcgttacccaacttaatcgccttgcagcacatccccctttcgccagctggcgtaatagcgaagaggcccgcaccgatcgcccttcccaacagttgcgcagcctgaatggcgaatgctagagcagcttgagcttggatcagattgtcgtttcccgccttcagtttaaactatcagtgtttgacaggatatattggcgggtaaacctaagagaaaagagcgtttattagaataatcggatatttaaaagggcgtgaaaaggtttatccgttcgtccatttgtatgtgcatgccaaccacagggttcccctcgggatcaaagtactttgatccaacccctccgctgctatagtgcagtcggcttctgacgttcagtgcagccgtcttctgaaaacgacatgtcgcacaagtcctaagttacgcgacaggctgccgccctgcccttttcctggcgttttcttgtcgcgtgttttagtcgcataaagtagaatacttgcgactagaaccggagacattacgccatgaacaagagcgccgccgctggcctgctgggctatgcccgcgtcagcaccgacgaccaggacttgaccaaccaacgggccgaactgcacgcggccggctgcaccaagctgttttccgagaagatcaccggcaccaggcgcgaccgcccggagctggccaggatgcttgaccacctacgccctggcgacgttgtgacagtgaccaggctagaccgcctggcccgcagcacccgcgacctactggacattgccgagcgcatccaggaggccggcgcgggcctgcgtagcctggcagagccgtgggccgacaccaccacgccggccggccgcatggtgttgaccgtgttcgccggcattgccgagttcgagcgttccctaatcatcgaccgcacccggagcgggcgcgaggccgccaaggcccgaggcgtgaagtttggcccccgccctaccctcaccccggcacagatcgcgcacgcccgcgagctgatcgaccaggaaggccgcaccgtgaaagaggcggctgcactgcttggcgtgcatcgctcgaccctgtaccgcgcacttgagcgcagcgaggaagtgacgcccaccgaggccaggcggcgcggtgccttccgtgaggacgcattgaccgaggccgacgccctggcggccgccgagaatgaacgccaagaggaacaagcatgaaaccgcaccaggacggccaggacgaaccgtttttcattaccgaagagatcgaggcggagatgatcgcggccgggtacgtgttcgagccgcccgcgcacgtctcaaccgtgcggctgcatgaaatcctggccggtttgtctgatgccaagctggcggcctggccggccagcttggccgctgaagaaaccgagcgccgccgtctaaaaaggtgatgtgtatttgagtaaaacagcttgcgtcatgcggtcgctgcgtatatgatgcgatgagtaaataaacaaatacgcaaggggaacgcatgaaggttatcgctgtacttaaccagaaaggcgggtcaggcaagacgaccatcgcaacccatctagcccgcgccctgcaactcgccggggccgatgttctgttagtcgattccgatccccagggcagtgcccgcgattgggcggccgtgcgggaagatcaaccgctaaccgttgtcggcatcgaccgcccgacgattgaccgcgacgtgaaggccatcggccggcgcgacttcgtagtgatcgacggagcgccccaggcggcggacttggctgtgtccgcgatcaaggcagccgacttcgtgctgattccggtgcagccaagcccttacgacatatgggccaccgccgacctggtggagctggttaagcagcgcattgaggtcacggatggaaggctacaagcggcctttgtcgtgtcgcgggcgatcaaaggcacgcgcatcggcggtgaggttgccgaggcgctggccgggtacgagctgcccattcttgagtcccgtatcacgcagcgcgtgagctacccaggcactgccgccgccggcacaaccgttcttgaatcagaacccgagggcgacgctgcccgcgaggtccaggcgctggccgctgaaattaaatcaaaactcatttgagttaatgaggtaaagagaaaatgagcaaaagcacaaacacgctaagtgccggccgtccgagcgcacgcagcagcaaggctgcaacgttggccagcctggcagacacgccagccatgaagcgggtcaactttcagttgccggcggaggatcacaccaagctgaagatgtacgcggtacgccaaggcaagaccattaccgagctgctatctgaatacatcgcgcagctaccagagtaaatgagcaaatgaataaatgagtagatgaattttagcggctaaaggaggcggcatggaaaatcaagaacaaccaggcaccgacgccgtggaatgccccatgtgtggaggaacgggcggttggccaggcgtaagcggctgggttgcctgccggccctgcaatggcactggaacccccaagcccgaggaatcggcgtgagcggtcgcaaaccatccggcccggtacaaatcggcgcggcgctgggtgatgacctggtggagaagttgaaggccgcgcaggccgcccagcggcaacgcatcgaggcagaagcacgccccggtgaatcgtggcaagcggccgctgatcgaatccgcaaagaatcccggcaaccgccggcagccggtgcgccgtcgattaggaagccgcccaagggcgacgagcaaccagattttttcgttccgatgctctatgacgtgggcacccgcgatagtcgcagcatcatggacgtggccgttttccgtctgtcgaagcgtgaccgacgagctggcgaggtgatccgctacgagcttccagacgggcacgtagaggtttccgcagggccggccggcatggccagtgtgtgggattacgacctggtactgatggcggtttcccatctaaccgaatccatgaaccgataccgggaagggaagggagacaagcccggccgcgtgttccgtccacacgttgcggacgtactcaagttctgccggcgagccgatggcggaaagcagaaagacgacctggtagaaacctgcattcggttaaacaccacgcacgttgccatgcagcgtacgaagaaggccaagaacggccgcctggtgacggtatccgagggtgaagccttgattagccgctacaagatcgtaaagagcgaaaccgggcggccggagtacatcgagatcgagctagctgattggatgtaccgcgagatcacagaaggcaagaacccggacgtgctgacggttcaccccgattactttttgatcgatcccggcatcggccgttttctctaccgcctggcacgccgcgccgcaggcaaggcagaagccagatggttgttcaagacgatctacgaacgcagtggcagcgccggagagttcaagaagttctgtttcaccgtgcgcaagctgatcgggtcaaatgacctgccggagtacgatttgaaggaggaggcggggcaggctggcccgatcctagtcatgcgctaccgcaacctgatcgagggcgaagcatccgccggttcctaatgtacggagcagatgctagggcaaattgccctagcaggggaaaaaggtcgaaaaggtctctttcctgtggatagcacgtacattgggaacccaaagccgtacattgggaaccggaacccgtacattgggaacccaaagccgtacattgggaaccggtcacacatgtaagtgactgatataaaagagaaaaaaggcgatttttccgcctaaaactctttaaaacttattaaaactcttaaaacccgcctggcctgtgcataactgtctggccagcgcacagccgaagagctgcaaaaagcgcctacccttcggtcgctgcgctccctacgccccgccgcttcgcgtcggcctatcgcggccgctggccgctcaaaaatggctggcctacggccaggcaatctaccagggcgcggacaagccgcgccgtcgccactcgaccgccggcgcccacatcaaggcaccctgcctcgcgcgtttcggtgatgacggtgaaaacctctgacacatgcagctcccggagacggtcacagcttgtctgtaagcggatgccgggagcagacaagcccgtcagggcgcgtcagcgggtgttggcgggtgtcggggcgcagccatgacccagtcacgtagcgatagcggagtgtatactggcttaactatgcggcatcagagcagattgtactgagagtgcaccatatgcggtgtgaaataccgcacagatgcgtaaggagaaaataccgcatcaggcgctcttccgcttcctcgctcactgactcgctgcgctcggtcgttcggctgcggcgagcggtatcagctcactcaaaggcggtaatacggttatccacagaatcaggggataacgcaggaaagaacatgtgagcaaaaggccagcaaaaggccaggaaccgtaaaaaggccgcgttgctggcgtttttccataggctccgcccccctgacgagcatcacaaaaatcgacgctcaagtcagaggtggcgaaacccgacaggactataaagataccaggcgtttccccctggaagctccctcgtgcgctctcctgttccgaccctgccgcttaccggatacctgtccgcctttctcccttcgggaagcgtggcgctttctcatagctcacgctgtaggtatctcagttcggtgtaggtcgttcgctccaagctgggctgtgtgcacgaaccccccgttcagcccgaccgctgcgccttatccggtaactatcgtcttgagtccaacccggtaagacacgacttatcgccactggcagcagccactggtaacaggattagcagagcgaggtatgtaggcggtgctacagagttcttgaagtggtggcctaactacggctacactagaaggacagtatttggtatctgcgctctgctgaagccagttaccttcggaaaaagagttggtagctcttgatccggcaaacaaaccaccgctggtagcggtggtttttttgtttgcaagcagcagattacgcgcagaaaaaaaggatctcaagaagatcctttgatcttttctacggggtctgacgctcagtggaacgaaaactcacgttaagggattttggtcatgcattctaggtactaaaacaattcatccagtaaaatataatattttattttctcccaatcaggcttgatccccagtaagtcaaaaaatagctcgacatactgttcttccccgatatcctccctgatcgaccggacgcagaaggcaatgtcataccacttgtccgccctgccgcttctcccaagatcaataaagccacttactttgccatctttcacaaagatgttgctgtctcccaggtcgccgtgggaaaagacaagttcctcttcgggcttttccgtctttaaaaaatcatacagctcgcgcggatctttaaatggagtgtcttcttcccagttttcgcaatccacatcggccagatcgttattcagtaagtaatccaattcggctaagcggctgtctaagctattcgtatagggacaatccgatatgtcgatggagtgaaagagcctgatgcactccgcatacagctcgataatcttttcagggctttgttcatcttcatactcttccgagcaaaggacgccatcggcctcactcatgagcagattgctccagccatcatgccgttcaaagtgcaggacctttggaacaggcagctttccttccagccatagcatcatgtccttttcccgttccacatcataggtggtccctttataccggctgtccgtcatttttaaatataggttttcattttctcccaccagcttatataccttagcaggagacattccttccgtatcttttacgcagcggtatttttcgatcagttttttcaattccggtgatattctcattttagccatttattatttccttcctcttttctacagtatttaaagataccccaagaagctaattataacaagacgaactccaattcactgttccttgcattctaaaaccttaaataccagaaaacagctttttcaaagttgttttcaaagttggcgtataacatagtatcgacggagccgattttgaaaccgcggtgatcacaggcagcaacgctctgtcatcgttacaatcaacatgctaccctccgcgagatcatccgtgtttcaaacccggcagcttagttgccgttcttccgaatagcatcggtaacatgagcaaagtctgccgccttacaacggctctcccgctgacgccgtcccggactgatgggctgcctgtatcgagtggtgattttgtgccgagctgccggtcggggagctgttggctggctggtggcaggatatattgtggtgtaaacaaattgacgcttagacaacttaataacacattgcggacgtttttaatgtactgaattaacgccgaatta

SEQ ID NO: 2 - DNA, 8883 bp, Artificial Sequence
  VC-MME221-1
agcttggacaatcagtaaattgaacggagaatattattcataaaaatacgatagtaacgggtgatatattcattagaatgaaccgaaaccggcggtaaggatctgagctacacatgctcaggttttttacaacgtgcacaacagaattgaaagcaaatatcatgcgatcataggcgtctcgcatatctcattaaagcagggcatgccggtcgagtcaaatctcggtgacgggcaggaccggacggggcggtaccggcaggctgaagtccagctgccagaaacccacgtcatgccagttcccgtgcttgaagccggccgcccgcagcatgccgcggggggcatatccgagcgcctcgtgcatgcgcacgctcgggtcgttgggcagcccgatgacagcgaccacgctcttgaagccctgtgcctccagggacttcagcaggtgggtgtagagcgtggagcccagtcccgtccgctggtggcggggggagacgtacacggtcgactcggccgtccagtcgtaggcgttgcgtgccttccaggggcccgcgtaggcgatgccggcgacctcgccgtccacctcggcgacgagccagggatagcgctcccgcagacggacgaggtcgtccgtccactcctgcggttcctgcggctcggtacggaagttgaccgtgcttgtctcgatgtagtggttgacgatggtgcagaccgccggcatgtccgcctcggtggcacggcggatgtcggccgggcgtcgttctgggctcatggtagactcgacggatccacgtgtggaagatatgaatttttttgagaaactagataagattaatgaatatcggtgttttggttttttcttgtggccgtctttgtttatattgagatttttcaaatcagtgcgcaagacgtgacgtaagtatccgagtcagtttttatttttctactaatttggtcgaagctttgggcggatcctctagaattcgaatccaaaaattacggatatgaatataggcatatccgtatccgaattatccgtttgacagctagcaacgattgtacaattgcttctttaaaaaaggaagaaagaaagaaagaaaagaatcaacatcagcgttaacaaacggccccgttacggcccaaacggtcatatagagtaacggcgttaagcgttgaaagactcctatcgaaatacgtaaccgcaaacgtgtcatagtcagatcccctcttccttcaccgcctcaaacacaaaaataatcttctacagcctatatatacaacccccccttctatctctcctttctcacaattcatcatctttctttctctacccccaattttaagaaatcctctcttctcctcttcattttcaaggtaaatctctctctctctctctctctctgttattccttgttttaattaggtatgtattattgctagtttgttaatctgcttatcttatgtatgccttatgtgaatatctttatcttgttcatctcatccgtttagaagctataaatttgttgatttgactgtgtatctacacgtggttatgtttatatctaatcagatatgaatttcttcatattgttgcgtttgtgtgtaccaatccgaaatcgttgatttttttcatttaatcgtgtagctaattgtacgtatacatatggatctacgtatcaattgttcatctgtttgtgtttgtatgtatacagatctgaaaacatcacttctctcatctgattgtgttgttacatacatagatatagatctgttatatcattttttttattaattgtgtatatatatatgtgcatagatctggattacatgattgtgattatttacatgattttgttatttacgtatgtatatatgtagatctggactttttggagttgttgacttgattgtatttgtgtgtgtatatgtgtgttctgatcttgatatgttatgtatgtgcagcccgggttgctcttccatggcaatgattaattaacgaagagcaagagctcgaatttccccgatcgttcaaacatttggcaataaagtttcttaagattgaatcctgttgccggtcttgcgatgattatcatataatttctgttgaattacgttaagcatgtaataattaacatgtaatgcatgacgttatttatgagatgggtttttatgattagagtcccgcaattatacatttaatacgcgatagaaaacaaaatatagcgcgcaaactaggataaattatcgcgcgcggtgtcatctatgttactagatcgggaattggcatgcaagcttggcactggccgtcgttttacaacgtcgtgactgggaaaaccctggcgttacccaacttaatcgccttgcagcacatccccctttcgccagctggcgtaatagcgaagaggcccgcaccgatcgcccttcccaacagttgcgcagcctgaatggcgaatgctagagcagcttgagcttggatcagattgtcgtttcccgccttcagtttaaactatcagtgtttgacaggatatattggcgggtaaacctaagagaaaagagcgtttattagaataacggatatttaaaagggcgtgaaaaggtttatccgttcgtccatttgtatgtgcatgccaaccacagggttcccctcgggatcaaagtactttgatccaacccctccgctgctatagtgcagtcggcttctgacgttcagtgcagccgtcttctgaaaacgacatgtcgcacaagtcctaagttacgcgacaggctgccgccctgcccttttcctggcgttttcttgtcgcgtgttttagtcgcataaagtagaatacttgcgactagaaccggagacattacgccatgaacaagagcgccgccgctggcctgctgggctatgcccgcgtcagcaccgacgaccaggacttgaccaaccaacgggccgaactgcacgcggccggctgcaccaagctgttttccgagaagatcaccggcaccaggcgcgaccgcccggagctggccaggatgcttgaccacctacgccctggcgacgttgtgacagtgaccaggctagaccgcctggcccgcagcacccgcgacctactggacattgccgagcgcatccaggaggccggcgcgggcctgcgtagcctggcagagccgtgggccgacaccaccacgccggccggccgcatggtgttgaccgtgttcgccggcattgccgagttcgagcgttccctaatcatcgaccgcacccggagcgggcgcgaggccgccaaggcccgaggcgtgaagtttggcccccgccctaccctcaccccggcacagatcgcgcacgcccgcgagctgatcgaccaggaaggccgcaccgtgaaagaggcggctgcactgcttggcgtgcatcgctcgaccctgtaccgcgcacttgagcgcagcgaggaagtgacgcccaccgaggccaggcggcgcggtgccttccgtgaggacgcattgaccgaggccgacgccctggcggccgccgagaatgaacgccaagaggaacaagcatgaaaccgcaccaggacggccaggacgaaccgtttttcattaccgaagagatcgaggcggagatgatcgcggccgggtacgtgttcgagccgcccgcgcacgtctcaaccgtgcggctgcatgaaatcctggccggtttgtctgatgccaagctggcggcctggccggccagcttggccgctgaagaaaccgagcgccgccgtctaaaaaggtgatgtgtatttgagtaaaacagcttgcgtcatgcggtcgctgcgtatatgatgcgatgagtaaataaacaaatacgcaaggggaacgcatgaaggttatcgctgtacttaaccagaaaggcgggtcaggcaagacgaccatcgcaacccatctagcccgcgccctgcaactcgccggggccgatgttctgttagtcgattccgatccccagggcagtgcccgcgattgggcggccgtgcgggaagatcaaccgctaaccgttgtcggcatcgaccgcccgacgattgaccgcgacgtgaaggccatcggccggcgcgacttcgtagtgatcgacggagcgccccaggcggcggacttggctgtgtccgcgatcaaggcagccgacttcgtgctgattccggtgcagccaagcccttacgacatatgggccaccgccgacctggtggagctggttaagcagcgcattgaggtcacggatggaaggctacaagcggcctttgtcgtgtcgcgggcgatcaaaggcacgcgcatcggcggtgaggttgccgaggcgctggccgggtacgagctgcccattcttgagtcccgtatcacgcagcgcgtgagctacccaggcactgccgccgccggcacaaccgttcttgaatcagaacccgagggcgacgctgcccgcgaggtccaggcgctggccgctgaaattaaatcaaaactcatttgagttaatgaggtaaagagaaaatgagcaaaagcacaaacacgctaagtgccggccgtccgagcgcacgcagcagcaaggctgcaacgttggccagcctggcagacacgccagccatgaagcgggtcaactttcagttgccggcggaggatcacaccaagctgaagatgtacgcggtacgccaaggcaagaccattaccgagctgctatctgaatacatcgcgcagctaccagagtaaatgagcaaatgaataaatgagtagatgaattttagcggctaaaggaggcggcatggaaaatcaagaacaaccaggcaccgacgccgtggaatgccccatgtgtggaggaacgggcggttggccaggcgtaagcggctgggttgtctgccggccctgcaatggcactggaacccccaagcccgaggaatcggcgtgacggtcgcaaaccatccggcccggtacaaatcggcgcggcgctgggtgatgacctggtggagaagttgaaggccgcgcaggccgcccagcggcaacgcatcgaggcagaagcacgccccggtgaatcgtggcaagcggccgctgatcgaatccgcaaagaatcccggcaaccgccggcagccggtgcgccgtcgattaggaagccgcccaagggcgacgagcaaccagattttttcgttccgatgctctatgacgtgggcacccgcgatagtcgcagcatcatggacgtggccgttttccgtctgtcgaagcgtgaccgacgagctggcgaggtgatccgctacgagcttccagacgggcacgtagaggtttccgcagggccggccggcatggccagtgtgtgggattacgacctggtactgatggcggtttcccatctaaccgaatccatgaaccgataccgggaagggaagggagacaagcccggccgcgtgttccgtccacacgttgcggacgtactcaagttctgccggcgagccgatggcggaaagcagaaagacgacctggtagaaacctgcattcggttaaacaccacgcacgttgccatgcagcgtacgaagaaggccaagaacggccgcctggtgacggtatccgagggtgaagccttgattagccgctacaagatcgtaaagagcgaaaccgggcggccggagtacatcgagatcgagctagctgattggatgtaccgcgagatcacagaaggcaagaacccggacgtgctgacggttcaccccgattactttttgatcgatcccggcatcggccgttttctctaccgcctggcacgccgcgccgcaggcaaggcagaagccagatggttgttcaagacgatctacgaacgcagtggcagcgccggagagttcaagaagttctgtttcaccgtgcgcaagctgatcgggtcaaatgacctgccggagtacgatttgaaggaggaggcggggcaggctggcccgatcctagtcatgcgctaccgcaacctgatcgagggcgaagcatccgccggttcctaatgtacggagcagatgctagggcaaattgccctagcaggggaaaaaggtcgaaaaggtctctttcctgtggatagcacgtacattgggaacccaaagccgtacattgggaaccggaacccgtacattgggaacccaaagccgtacattgggaaccggtcacacatgtaagtgactgatataaaagagaaaaaaggcgatttttccgcctaaaactctttaaaacttattaaaactcttaaaacccgcctggcctgtgcataactgtctggccagcgcacagccgaagagctgcaaaaagcgcctacccttcggtcgctgcgctccctacgccccgccgcttcgcgtcggcctatcgcggccgctggccgctcaaaaatggctggcctacggccaggcaatctaccagggcgcggacaagccgcgccgtcgccactcgaccgccggcgcccacatcaaggcaccctgcctcgcgcgtttcggtgatgacggtgaaaacctctgacacatgcagctcccggagacggtcacagcttgtctgtaagcggatgccgggagcagacaagcccgtcagggcgcgtcagcgggtgttggcgggtgtcggggcgcagccatgacccagtcacgtagcgatagcggagtgtatactggcttaactatgcggcatcagagcagattgtactgagagtgcaccatatgcggtgtgaaataccgcacagatgcgtaaggagaaaataccgcatcaggcgctcttccgcttcctcgctcactgactcgctgcgctcggtcgttcggctgcggcgagcggtatcagctcactcaaaggcggtaatacggttatccacagaatcaggggataacgcaggaaagaacatgtgagcaaaaggccagcaaaaggccaggaaccgtaaaaaggccgcgttgctggcgtttttccataggctccgcccccctgacgagcatcacaaaaatcgacgctcaagtcagaggtggcgaaacccgacaggactataaagataccaggcgtttccccctggaagctccctcgtgcgctctcctgttccgaccctgccgcttaccggatacctgtccgcctttctcccttcgggaagcgtggcgctttctcatagctcacgctgtaggtatctcagttcggtgtaggtcgttcgctccaagctgggctgtgtgcacgaaccccccgttcagcccgaccgctgcgccttatccggtaactatcgtcttgagtccaacccggtaagacacgacttatcgccactggcagcagccactggtaacaggattagcagagcgaggtatgtaggcggtgctacagagttcttgaagtggtggcctaactacggctacactagaaggacagtatttggtatctgcgctctgctgaagccagttaccttcggaaaaagagttggtagctcttgatccggcaaacaaaccaccgctggtagcggtggtttttttgtttgcaagcagcagattacgcgcagaaaaaaaggatctcaagaagatcctttgatcttttctacggggtctgacgctcagtggaacgaaaactcacgttaagggattttggtcatgcattctaggtactaaaacaattcatccagtaaaatataatattttattttctcccaatcaggcttgatccccagtaagtcaaaaaatagctcgacatactgttcttccccgatatcctccctgatcgaccggacgcagaaggcaatgtcataccacttgtccgccctgccgcttctcccaagatcaataaagccacttactttgccatctttcacaaagatgttgctgtctcccaggtcgccgtgggaaaagacaagttcctcttcgggcttttccgtctttaaaaaatcatacagctcgcgcggatctttaaatggagtgtcttcttcccagttttcgcaatccacatcggccagatcgttattcagtaagtaatccaattcggctaagcggctgtctaagctattcgtatagggacaatccgatatgtcgatggagtgaaagagcctgatgcactccgcatacagctcgataatcttttcagggctttgttcatcttcatactcttccgagcaaaggacgccatcggcctcactcatgagcagattgctccagccatcatgccgttcaaagtgcaggacctttggaacaggcagctttccttccagccatagcatcatgtccttttcccgttccacatcataggtggtccctttataccggctgtccgtcatttttaaatataggttttcattttctcccaccagcttatataccttagcaggagacattccttccgtatcttttacgcagcggtatttttcgatcagttttttcaattccggtgatattctcattttagccatttattatttccttcctcttttctacagtatttaaagataccccaagaagctaattataacaagacgaactccaattcactgttccttgcattctaaaaccttaaataccagaaaacagctttttcaaagttgttttcaaagttggcgtataacatagtatcgacggagccgattttgaaaccgcggtgatcacaggcagcaacgctctgtcatcgttacaatcaacatgctaccctccgcgagatcatccgtgtttcaaacccggcagcttagttgccgttcttccgaatagcatcggtaacatgagcaaagtctgccgccttacaacggctctcccgctgacgccgtcccggactgatgggctgcctgtatcgagtggtgattttgtgccgagctgccggtcggggagctgttggctggctggtggcaggatatattgtggtgtaaacaaattgacgcttagacaacttaataacacattgcggacgtttttaatgtactgaattaacgccgaatta

SEQ ID NO: 3 - DNA, 9469 bp, Artificial Sequence
  VC-MME354-1
  CDS (2295)..(2404): FNR transit peptide
  CDS (2482)..(2545): FNR transit peptide
agctttgggcggatcctctagaggacaatcagtaaattgaacggagaatattattcataaaaatacgatagtaacgggtgatatattcattagaatgaaccgaaaccggcggtaaggatctgagctacacatgctcaggttttttacaacgtgcacaacagaattgaaagcaaatatcatgcgatcataggcgtctcgcatatctcattaaagcagggcatgccggtcgagtcaaatctcggtgacgggcaggaccggacggggcggtaccggcaggctgaagtccagctgccagaaacccacgtcatgccagttcccgtgcttgaagccggccgcccgcagcatgccgcggggggcatatccgagcgcctcgtgcatgcgcacgctcgggtcgttgggcagcccgatgacagcgaccacgctcttgaagccctgtgcctccagggacttcagcaggtgggtgtagagcgtggagcccagtcccgtccgctggtggcggggggagacgtacacggtcgactcggccgtccagtcgtaggcgttgcgtgccttccaggggcccgcgtaggcgatgccggcgacctcgccgtccacctcggcgacgagccagggatagcgctcccgcagacggacgaggtcgtccgtccactcctgcggttcctgcggctcggtacggaagttgaccgtgcttgtctcgatgtagtggttgacgatggtgcagaccgccggcatgtccgcctcggtggcacggcggatgtcggccgggcgtcgttctgggctcatggtagactcgacggatccacgtgtggaagatatgaatttttttgagaaactagataagattaatgaatatcggtgttttggttttttcttgtggccgtctttgtttatattgagatttttcaaatcagtgcgcaagacgtgacgtaagtatccgagtcagtttttatttttctactaatttggtcgaatctagattcgacggtatcgataagctcgcggatccctgaaagcgacgttggatgttaacatctacaaattgccttttcttatcgaccatgtacgtaagcgcttacgtttttggtggacccttgaggaaactggtagctgttgtgggcctgtggtctcaagatggatcattaatttccaccttcacctacgatggggggcatcgcaccggtgagtaatattgtacggctaagagcgaatttggcctgtaggatccctgaaagcgacgttggatgttaacatctacaaattgccttttcttatcgaccatgtacgtaagcgcttacgtttttggtggacccttgaggaaactggtagctgttgtgggcctgtggtctcaagatggatcattaatttccaccttcacctacgatggggggcatcgcaccggtgagtaatattgtacggctaagagcgaatttggcctgtaggatccctgaaagcgacgttggatgttaacatctacaaattgccttttcttatcgaccatgtacgtaagcgcttacgtttttggtggacccttgaggaaactggtagctgttgtgggcctgtggtctcaagatggatcattaatttccaccttcacctacgatggggggcatcgcaccggtgagtaatattgtacggctaagagcgaatttggcctgtaggatccgcgagctggtcaatcccattgcttttgaagcagctcaacattgatctctttctcgatcgagggagatttttcaaatcagtgcgcaagacgtgacgtaagtatccgagtcagtttttatttttctactaatttggtcgtttatttcggcgtgtaggacatggcaaccgggcctgaatttcgcgggtattctgtttctattccaactttttcttgatccgcagccattaacgacttttgaatagatacgctgacacgccaagcctcgctagtcaaaagtgtaccaaacaacgctttacagcaagaacggaatgcgcgtgacgctcgcggtgacgccatttcgccttttcagaaatggataaatagccttgcttcctattatatcttcccaaattaccaatacattacactagcatctgaatttcataaccaatctcgatacaccaaatcgaagatctccctggaattcgcataaacttatcttcatagttgccactccaatttgctccttgaatctcctccacccaatacataatccactcctccatcacccacttcactactaaatcaaacttaactctgtttttctctctcctcctttcatttcttattcttccaatcatcgtactccgccatgaccaccgctgtcaccgccgctgtttctttcccctctaccaaaaccacctctctctccgcccgaagctcctccgtcatttcccctgacaaaatcagctacaaaaaggtgattcccaatttcactgtgttttttattaataatttgttattttgatgatgagatgattaatttgggtgctgcaggttcctttgtactacaggaatgtatctgcaactgggaaaatgggacccatcagggcccagatcgcctctgaattccagctgaccacccatggcaattcccggggatcagctcgaatttccccgatcgttcaaacatttggcaataaagtttcttaagattgaatcctgttgccggtcttgcgatgattatcatataatttctgttgaattacgttaagcatgtaataattaacatgtaatgcatgacgttatttatgagatgggtttttatgattagagtcccgcaattatacatttaatacgcgatagaaaacaaaatatagcgcgcaaactaggataaattatcgcgcgcggtgtcatctatgttactagatcgggaattggcatgcaagcttggcactggccgtcgttttacaacgtcgtgactgggaaaaccctggcgttacccaacttaatcgccttgcagcacatccccctttcgccagctggcgtaatagcgaagaggcccgcaccgatcgcccttcccaacagttgcgcagcctgaatggcgaatgctagagcagcttgagcttggatcagattgtcgtttcccgccttcagtttaaactatcagtgtttgacaggatatattggcgggtaaacctaagagaaaagagcgtttattagaataatcggatatttaaaagggcgtgaaaaggtttatccgttcgtccatttgtatgtgcatgccaaccacagggttcccctcgggatcaaagtactttgatccaacccctccgctgctatagtgcagtcggcttctgacgttcagtgcagccgtcttctgaaaacgacatgtcgcacaagtcctaagttacgcgacaggctgccgccctgcccttttcctggcgttttcttgtcgcgtgttttagtcgcataaagtagaatacttgcgactagaaccggagacattacgccatgaacaagagcgccgccgctggcctgctgggctatgcccgcgtcagcaccgacgaccaggacttgaccaaccaacgggccgaactgcacgcggccggctgcaccaagctgttttccgagaagatcaccggcaccaggcgcgaccgcccggagctggccaggatgcttgaccacctacgccctggcgacgttgtgacagtgaccaggctagaccgcctggcccgcagcacccgcgacctactggacattgccgagcgcatccaggaggccggcgcgggcctgcgtagcctggcagagccgtgggccgacaccaccacgccggccggccgcatggtgttgaccgtgttcgccggcattgccgagttcgagcgttccctaatcatcgaccgcacccggagcgggcgcgaggccgccaaggcccgaggcgtgaagtttggcccccgccctaccctcaccccggcacagatcgcgcacgcccgcgagctgatcgaccaggaaggccgcaccgtgaaagaggcggctgcactgcttggcgtgcatcgctcgaccctgtaccgcgcacttgagcgcagcgaggaagtgacgcccaccgaggccaggcggcgcggtgccttccgtgaggacgcattgaccgaggccgacgccctggcggccgccgagaatgaacgccaagaggaacaagcatgaaaccgcaccaggacggccaggacgaaccgtttttcattaccgaagagatcgaggcggagatgatcgcggccgggtacgtgttcgagccgcccgcgcacgtctcaaccgtgcggctgcatgaaatcctggccggtttgtctgatgccaagctggcggcctggccggccagcttggccgctgaagaaaccgagcgccgccgtctaaaaaggtgatgtgtatttgagtaaaacagcttgcgtcatgcggtcgctgcgtatatgatgcgatgagtaaataaacaaatacgcaaggggaacgcatgaaggttatcgctgtacttaaccagaaaggcgggtcaggcaagacgaccatcgcaacccatctagcccgcgccctgcaactcgccggggccgatgttctgttagtcgattccgatccccagggcagtgcccgcgattgggcggccgtgcgggaagatcaaccgctaaccgttgtcggcatcgaccgcccgacgattgaccgcgacgtgaaggccatcggccggcgcgacttcgtagtgatcgacggagcgccccaggcggcggacttggctgtgtccgcgatcaaggcagccgacttcgtgctgattccggtgcagccaagcccttacgacatatgggccaccgccgacctggtggagctggttaagcagcgcattgaggtcacggatggaaggctacaagcggcctttgtcgtgtcgcgggcgatcaaaggcacgcgcatcggcggtgaggttgccgaggcgctggccgggtacgagctgcccattcttgagtcccgtatcacgcagcgcgtgagctacccaggcactgccgccgccggcacaaccgttcttgaatcagaacccgagggcgacgctgcccgcgaggtccaggcgctggccgctgaaattaaatcaaaactcatttgagttaatgaggtaaagagaaaatgagcaaaagcacaaacacgctaagtgccggccgtccgagcgcacgcagcagcaaggctgcaacgttggccagcctggcagacacgccagccatgaagcgggtcaactttcagttgccggcggaggatcacaccaagctgaagatgtacgcggtacgccaaggcaagaccattaccgagctgctatctgaatacatcgcgcagctaccagagtaaatgagcaaatgaataaatgagtagatgaattttagcggctaaaggaggcggcatggaaaatcaagaacaaccaggcaccgacgccgtggaatgccccatgtgtggaggaacgggcggttggccaggcgtaagcggctgggttgtctgccggccctgcaatggcactggaacccccaagcccgaggaatcggcgtgacggtcgcaaaccatccggcccggtacaaatcggcgcggcgctgggtgatgacctggtggagaagttgaaggccgcgcaggccgcccagcggcaacgcatcgaggcagaagcacgccccggtgaatcgtggcaagcggccgctgatcgaatccgcaaagaatcccggcaaccgccggcagccggtgcgccgtcgattaggaagccgcccaagggcgacgagcaaccagattttttcgttccgatgctctatgacgtgggcacccgcgatagtcgcagcatcatggacgtggccgttttccgtctgtcgaagcgtgaccgacgagctggcgaggtgatccgctacgagcttccagacgggcacgtagaggtttccgcagggccggccggcatggccagtgtgtgggattacgacctggtactgatggcggtttcccatctaaccgaatccatgaaccgataccgggaagggaagggagacaagcccggccgcgtgttccgtccacacgttgcggacgtactcaagttctgccggcgagccgatggcggaaagcagaaagacgacctggtagaaacctgcattcggttaaacaccacgcacgttgccatgcagcgtacgaagaaggccaagaacggccgcctggtgacggtatccgagggtgaagccttgattagccgctacaagatcgtaaagagcgaaaccgggcggccggagtacatcgagatcgagctagctgattggatgtaccgcgagatcacagaaggcaagaacccggacgtgctgacggttcaccccgattactttttgatcgatcccggcatcggccgttttctctaccgcctggcacgccgcgccgcaggcaaggcagaagccagatggttgttcaagacgatctacgaacgcagtggcagcgccggagagttcaagaagttctgtttcaccgtgcgcaagctgatcgggtcaaatgacctgccggagtacgatttgaaggaggaggcggggcaggctggcccgatcctagtcatgcgctaccgcaacctgatcgagggcgaagcatccgccggttcctaatgtacggagcagatgctagggcaaattgccctagcaggggaaaaaggtcgaaaaggtctctttcctgtggatagcacgtacattgggaacccaaagccgtacattgggaaccggaacccgtacattgggaacccaaagccgtacattgggaaccggtcacacatgtaagtgactgatataaaagagaaaaaaggcgatttttccgcctaaaactctttaaaacttattaaaactcttaaaacccgcctggcctgtgcataactgtctggccagcgcacagccgaagagctgcaaaaagcgcctacccttcggtcgctgcgctccctacgccccgccgcttcgcgtcggcctatcgcggccgctggccgctcaaaaatggctggcctacggccaggcaatctaccagggcgcggacaagccgcgccgtcgccactcgaccgccggcgcccacatcaaggcaccctgcctcgcgcgtttcggtgatgacggtgaaaacctctgacacatgcagctcccggagacggtcacagcttgtctgtaagcggatgccgggagcagacaagcccgtcagggcgcgtcagcgggtgttggcgggtgtcggggcgcagccatgacccagtcacgtagcgatagcggagtgtatactggcttaactatgcggcatcagagcagattgtactgagagtgcaccatatgcggtgtgaaataccgcacagatgcgtaaggagaaaataccgcatcaggcgctcttccgcttcctcgctcactgactcgctgcgctcggtcgttcggctgcggcgagcggtatcagctcactcaaaggcggtaatacggttatccacagaatcaggggataacgcaggaaagaacatgtgagcaaaaggccagcaaaaggccaggaaccgtaaaaaggccgcgttgctggcgtttttccataggctccgcccccctgacgagcatcacaaaaatcgacgctcaagtcagaggtggcgaaacccgacaggactataaagataccaggcgtttccccctggaagctccctcgtgcgctctcctgttccgaccctgccgcttaccggatacctgtccgcctttctcccttcgggaagcgtggcgctttctcatagctcacgctgtaggtatctcagttcggtgtaggtcgttcgctccaagctgggctgtgtgcacgaaccccccgttcagcccgaccgctgcgccttatccggtaactatcgtcttgagtccaacccggtaagacacgacttatcgccactggcagcagccactggtaacaggattagcagagcgaggtatgtaggcggtgctacagagttcttgaagtggtggcctaactacggctacactagaaggacagtatttggtatctgcgctctgctgaagccagttaccttcggaaaaagagttggtagctcttgatccggcaaacaaaccaccgctggtagcggtggtttttttgtttgcaagcagcagattacgcgcagaaaaaaaggatctcaagaagatcctttgatcttttctacggggtctgacgctcagtggaacgaaaactcacgttaagggattttggtcatgcattctaggtactaaaacaattcatccagtaaaatataatattttattttctcccaatcaggcttgatccccagtaagtcaaaaaatagctcgacatactgttcttccccgatatcctccctgatcgaccggacgcagaaggcaatgtcataccacttgtccgccctgccgcttctcccaagatcaataaagccacttactttgccatctttcacaaagatgttgctgtctcccaggtcgccgtgggaaaagacaagttcctcttcgggcttttccgtctttaaaaaatcatacagctcgcgcggatctttaaatggagtgtcttcttcccagttttcgcaatccacatcggccagatcgttattcagtaagtaatccaattcggctaagcggctgtctaagctattcgtatagggacaatccgatatgtcgatggagtgaaagagcctgatgcactccgcatacagctcgataatcttttcagggctttgttcatcttcatactcttccgagcaaaggacgccatcggcctcactcatgagcagattgctccagccatcatgccgttcaaagtgcaggacctttggaacaggcagctttccttccagccatagcatcatgtccttttcccgttccacatcataggtggtccctttataccggctgtccgtcatttttaaatataggttttcattttctcccaccagcttatataccttagcaggagacattccttccgtatcttttacgcagcggtatttttcgatcagttttttcaattccggtgatattctcattttagccatttattatttccttcctcttttctacagtatttaaagataccccaagaagctaattataacaagacgaactccaattcactgttccttgcattctaaaaccttaaataccagaaaacagctttttcaaagttgttttcaaagttggcgtataacatagtatcgacggagccgattttgaaaccgcggtgatcacaggcagcaacgctctgtcatcgttacaatcaacatgctaccctccgcgagatcatccgtgtttcaaacccggcagcttagttgccgttcttccgaatagcatcggtaacatgagcaaagtctgccgccttacaacggctctcccgctgacgccgtcccggactgatgggctgcctgtatcgagtggtgattttgtgccgagctgccggtcggggagctgttggctggctggtggcaggatatattgtggtgtaaacaaattgacgcttagacaacttaataacacattgcggacgtttttaatgtactgaattaacgccgaatta

SEQ ID NO: 4 - protein, 58 aa, Artificial Sequence
  Synthetic Construct
MTTAVTAAVSFPSTKTTSLSARSSSVISPDKISYKKVPLYYRNVSATGKMGPIRAQIA

SEQ ID NO: 5 - DNA, 9465 bp, Artificial Sequence
  VC-MME432-1
  CDS (2290)..(2400): FNR transit peptide
  CDS (2478)..(2540): FNR transit peptide
gctttgggcggatcctctagaggacaatcagtaaattgaacggagaatattattcataaaaatacgatagtaacgggtgatatattcattagaatgaaccgaaaccggcggtaaggatctgagctacacatgctcaggttttttacaacgtgcacaacagaattgaaagcaaatatcatgcgatcataggcgtctcgcatatctcattaaagcagggcatgccggtcgagtcaaatctcggtgacgggcaggaccggacggggcggtaccggcaggctgaagtccagctgccagaaacccacgtcatgccagttcccgtgcttgaagccggccgcccgcagcatgccgcggggggcatatccgagcgcctcgtgcatgcgcacgctcgggtcgttgggcagcccgatgacagcgaccacgctcttgaagccctgtgcctccagggacttcagcaggtgggtgtagagcgtggagcccagtcccgtccgctggtggcggggggagacgtacacggtcgactcggccgtccagtcgtaggcgttgcgtgccttccaggggcccgcgtaggcgatgccggcgacctcgccgtccacctcggcgacgagccagggatagcgctcccgcagacggacgaggtcgtccgtccactcctgcggttcctgcggctcggtacggaagttgaccgtgcttgtctcgatgtagtggttgacgatggtgcagaccgccggcatgtccgcctcggtggcacggcggatgtcggccgggcgtcgttctgggctcatggtagactcgacggatccacgtgtggaagatatgaatttttttgagaaactagataagattaatgaatatcggtgttttggttttttcttgtggccgtctttgtttatattgagatttttcaaatcagtgcgcaagacgtgacgtaagtatccgagtcagtttttatttttctactaatttggtcgaatctagattcgacggtatcgataagctcgcggatccctgaaagcgacgttggatgttaacatctacaaattgccttttcttatcgaccatgtacgtaagcgcttacgtttttggtggacccttgaggaaactggtagctgttgtgggcctgtggtctcaagatggatcattaatttccaccttcacctacgatggggggcatcgcaccggtgagtaatattgtacggctaagagcgaatttggcctgtaggatccctgaaagcgacgttggatgttaacatctacaaattgccttttcttatcgaccatgtacgtaagcgcttacgtttttggtggacccttgaggaaactggtagctgttgtgggcctgtggtctcaagatggatcattaatttccaccttcacctacgatggggggcatcgcaccggtgagtaatattgtacggctaagagcgaatttggcctgtaggatccctgaaagcgacgttggatgttaacatctacaaattgccttttcttatcgaccatgtacgtaagcgcttacgtttttggtggacccttgaggaaactggtagctgttgtgggcctgtggtctcaagatggatcattaatttccaccttcacctacgatggggggcatcgcaccggtgagtaatattgtacggctaagagcgaatttggcctgtaggatccgcgagctggtcaatcccattgcttttgaagcagctcaacattgatctctttctcgatcgagggagatttttcaaatcagtgcgcaagacgtgacgtaagtatccgagtcagtttttatttttctactaatttggtcgtttatttcggcgtgtaggacatggcaaccgggcctgaatttcgcgggtattctgtttctattccaactttttcttgatccgcagccattaacgacttttgaatagatacgctgacacgccaagcctcgctagtcaaaagtgtaccaaacaacgctttacagcaagaacggaatgcgcgtgacgctcgcggtgacgccatttcgccttttcagaaatggataaatagccttgcttcctattatatcttcccaaattaccaatacattacactagcatctgaatttcataaccaatctcgatacaccaaatcgaagatctcccaaacgcataaacttatcttcatagttgccactccaatttgctccttgaatctcctccacccaatacataatccactcctccatcacccacttcactactaaatcaaacttaactctgtttttctctctcctcctttcatttcttattcttccaatcatcgtactccgccatgaccaccgctgtcaccgccgctgtttctttcccctctaccaaaaccacctctctctccgcccgaagctcctccgtcatttcccctgacaaaatcagctacaaaaaggtgattcccaatttcactgtgttttttattaataatttgttattttgatgatgagatgattaatttgggtgctgcaggttcctttgtactacaggaatgtatctgcaactgggaaaatgggacccatcagggcccagatcgcctcttgctcttccatggcaatgattaattaacgaagagcaagagctcgaatttccccgatcgttcaaacatttggcaataaagtttcttaagattgaatcctgttgccggtcttgcgatgattatcatataatttctgttgaattacgttaagcatgtaataattaacatgtaatgcatgacgttatttatgagatgggtttttatgattagagtcccgcaattatacatttaatacgcgatagaaaacaaaatatagcgcgcaaactaggataaattatcgcgcgcggtgtcatctatgttactagatcgggaattggcatgcaagcttggcactggccgtcgttttacaacgtcgtgactgggaaaaccctggcgttacccaacttaatcgccttgcagcacatccccctttcgccagctggcgtaatagcgaagaggcccgcaccgatcgcccttcccaacagttgcgcagcctgaatggcgaatgctagagcagcttgagcttggatcagattgtcgtttcccgccttcagtttaaactatcagtgtttgacaggatatattggcgggtaaacctaagagaaaagagcgtttattagaataatcggatatttaaaagggcgtgaaaaggtttatccgttcgtccatttgtatgtgcatgccaaccacagggttcccctcgggatcaaagtactttgatccaacccctccgctgctatagtgcagtcggcttctgacgttcagtgcagccgtcttctgaaaacgacatgtcgcacaagtcctaagttacgcgacaggctgccgccctgcccttttcctggcgttttcttgtcgcgtgttttagtcgcataaagtagaatacttgcgactagaaccggagacattacgccatgaacaagagcgccgccgctggcctgctgggctatgcccgcgtcagcaccgacgaccaggacttgaccaaccaacgggccgaactgcacgcggccggctgcaccaagctgttttccgagaagatcaccggcaccaggcgcgaccgcccggagctggccaggatgcttgaccacctacgccctggcgacgttgtgacagtgaccaggctagaccgcctggcccgcagcacccgcgacctactggacattgccgagcgcatccaggaggccggcgcgggcctgcgtagcctggcagagccgtgggccgacaccaccacgccggccggccgcatggtgttgaccgtgttcgccggcattgccgagttcgagcgttccctaatcatcgaccgcacccggagcgggcgcgaggccgccaaggcccgaggcgtgaagtttggcccccgccctaccctcaccccggcacagatcgcgcacgcccgcgagctgatcgaccaggaaggccgcaccgtgaaagaggcggctgcactgcttggcgtgcatcgctcgaccctgtaccgcgcacttgagcgcagcgaggaagtgacgcccaccgaggccaggcggcgcggtgccttccgtgaggacgcattgaccgaggccgacgccctggcggccgccgagaatgaacgccaagaggaacaagcatgaaaccgcaccaggacggccaggacgaaccgtttttcattaccgaagagatcgaggcggagatgatcgcggccgggtacgtgttcgagccgcccgcgcacgtctcaaccgtgcggctgcatgaaatcctggccggtttgtctgatgccaagctggcggcctggccggccagcttggccgctgaagaaaccgagcgccgccgtctaaaaaggtgatgtgtatttgagtaaaacagcttgcgtcatgcggtcgctgcgtatatgatgcgatgagtaaataaacaaatacgcaaggggaacgcatgaaggttatcgctgtacttaaccagaaaggcgggtcaggcaagacgaccatcgcaacccatctagcccgcgccctgcaactcgccggggccgatgttctgttagtcgattccgatccccagggcagtgcccgcgattgggcggccgtgcgggaagatcaaccgctaaccgttgtcggcatcgaccgcccgacgattgaccgcgacgtgaaggccatcggccggcgcgacttcgtagtgatcgacggagcgccccaggcggcggacttggctgtgtccgcgatcaaggcagccgacttcgtgctgattccggtgcagccaagcccttacgacatatgggccaccgccgacctggtggagctggttaagcagcgcattgaggtcacggatggaaggctacaagcggcctttgtcgtgtcgcgggcgatcaaaggcacgcgcatcggcggtgaggttgccgaggcgctggccgggtacgagctgcccattcttgagtcccgtatcacgcagcgcgtgagctacccaggcactgccgccgccggcacaaccgttcttgaatcagaacccgagggcgacgctgcccgcgaggtccaggcgctggccgctgaaattaaatcaaaactcatttgagttaatgaggtaaagagaaaatgagcaaaagcacaaacacgctaagtgccggccgtccgagcgcacgcagcagcaaggctgcaacgttggccagcctggcagacacgccagccatgaagcgggtcaactttcagttgccggcggaggatcacaccaagctgaagatgtacgcggtacgccaaggcaagaccattaccgagctgctatctgaatacatcgcgcagctaccagagtaaatgagcaaatgaataaatgagtagatgaattttagcggctaaaggaggcggcatggaaaatcaagaacaaccaggcaccgacgccgtggaatgccccatgtgtggaggaacgggcggttggccaggcgtaagcggctgggttgtctgccggccctgcaatggcactggaacccccaagcccgaggaatcggcgtgacggtcgcaaaccatccggcccggtacaaatcggcgcggcgctgggtgatgacctggtggagaagttgaaggccgcgcaggccgcccagcggcaacgcatcgaggcagaagcacgccccggtgaatcgtggcaagcggccgctgatcgaatccgcaaagaatcccggcaaccgccggcagccggtgcgccgtcgattaggaagccgcccaagggcgacgagcaaccagattttttcgttccgatgctctatgacgtgggcacccgcgatagtcgcagcatcatggacgtggccgttttccgtctgtcgaagcgtgaccgacgagctggcgaggtgatccgctacgagcttccagacgggcacgtagaggtttccgcagggccggccggcatggccagtgtgtgggattacgacctggtactgatggcggtttcccatctaaccgaatccatgaaccgataccgggaagggaagggagacaagcccggccgcgtgttccgtccacacgttgcggacgtactcaagttctgccggcgagccgatggcggaaagcagaaagacgacctggtagaaacctgcattcggttaaacaccacgcacgttgccatgcagcgtacgaagaaggccaagaacggccgcctggtgacggtatccgagggtgaagccttgattagccgctacaagatcgtaaagagcgaaaccgggcggccggagtacatcgagatcgagctagctgattggatgtaccgcgagatcacagaaggcaagaacccggacgtgctgacggttcaccccgattactttttgatcgatcccggcatcggccgttttctctaccgcctggcacgccgcgccgcaggcaaggcagaagccagatggttgttcaagacgatctacgaacgcagtggcagcgccggagagttcaagaagttctgtttcaccgtgcgcaagctgatcgggtcaaatgacctgccggagtacgatttgaaggaggaggcggggcaggctggcccgatcctagtcatgcgctaccgcaacctgatcgagggcgaagcatccgccggttcctaatgtacggagcagatgctagggcaaattgccctagcaggggaaaaaggtcgaaaaggtctctttcctgtggatagcacgtacattgggaacccaaagccgtacattgggaaccggaacccgtacattgggaacccaaagccgtacattgggaaccggtcacacatgtaagtgactgatataaaagagaaaaaaggcgatttttccgcctaaaactctttaaaacttattaaaactcttaaaacccgcctggcctgtgcataactgtctggccagcgcacagccgaagagctgcaaaaagcgcctacccttcggtcgctgcgctccctacgccccgccgcttcgcgtcggcctatcgcggccgctggccgctcaaaaatggctggcctacggccaggcaatctaccagggcgcggacaagccgcgccgtcgccactcgaccgccggcgcccacatcaaggcaccctgcctcgcgcgtttcggtgatgacggtgaaaacctctgacacatgcagctcccggagacggtcacagcttgtctgtaagcggatgccgggagcagacaagcccgtcagggcgcgtcagcgggtgttggcgggtgtcggggcgcagccatgacccagtcacgtagcgatagcggagtgtatactggcttaactatgcggcatcagagcagattgtactgagagtgcaccatatgcggtgtgaaataccgcacagatgcgtaaggagaaaataccgcatcaggcgctcttccgcttcctcgctcactgactcgctgcgctcggtcgttcggctgcggcgagcggtatcagctcactcaaaggcggtaatacggttatccacagaatcaggggataacgcaggaaagaacatgtgagcaaaaggccagcaaaaggccaggaaccgtaaaaaggccgcgttgctggcgtttttccataggctccgcccccctgacgagcatcacaaaaatcgacgctcaagtcagaggtggcgaaacccgacaggactataaagataccaggcgtttccccctggaagctccctcgtgcgctctcctgttccgaccctgccgcttaccggatacctgtccgcctttctcccttcgggaagcgtggcgctttctcatagctcacgctgtaggtatctcagttcggtgtaggtcgttcgctccaagctgggctgtgtgcacgaaccccccgttcagcccgaccgctgcgccttatccggtaactatcgtcttgagtccaacccggtaagacacgacttatcgccactggcagcagccactggtaacaggattagcagagcgaggtatgtaggcggtgctacagagttcttgaagtggtggcctaactacggctacactagaaggacagtatttggtatctgcgctctgctgaagccagttaccttcggaaaaagagttggtagctcttgatccggcaaacaaaccaccgctggtagcggtggtttttttgtttgcaagcagcagattacgcgcagaaaaaaaggatctcaagaagatcctttgatcttttctacggggtctgacgctcagtggaacgaaaactcacgttaagggattttggtcatgcattctaggtactaaaacaattcatccagtaaaatataatattttattttctcccaatcaggcttgatccccagtaagtcaaaaaatagctcgacatactgttcttccccgatatcctccctgatcgaccggacgcagaaggcaatgtcataccacttgtccgccctgccgcttctcccaagatcaataaagccacttactttgccatctttcacaaagatgttgctgtctcccaggtcgccgtgggaaaagacaagttcctcttcgggcttttccgtctttaaaaaatcatacagctcgcgcggatctttaaatggagtgtcttcttcccagttttcgcaatccacatcggccagatcgttattcagtaagtaatccaattcggctaagcggctgtctaagctattcgtatagggacaatccgatatgtcgatggagtgaaagagcctgatgcactccgcatacagctcgataatcttttcagggctttgttcatcttcatactcttccgagcaaaggacgccatcggcctcactcatgagcagattgctccagccatcatgccgttcaaagtgcaggacctttggaacaggcagctttccttccagccatagcatcatgtccttttcccgttccacatcataggtggtccctttataccggctgtccgtcatttttaaatataggttttcattttctcccaccagcttatataccttagcaggagacattccttccgtatcttttacgcagcggtatttttcgatcagttttttcaattccggtgatattctcattttagccatttattatttccttcctcttttctacagtatttaaagataccccaagaagctaattataacaagacgaactccaattcactgttccttgcattctaaaaccttaaataccagaaaacagctttttcaaagttgttttcaaagttggcgtataacatagtatcgacggagccgattttgaaaccgcggtgatcacaggcagcaacgctctgtcatcgttacaatcaacatgctaccctccgcgagatcatccgtgtttcaaacccggcagcttagttgccgttcttccgaatagcatcggtaacatgagcaaagtctgccgccttacaacggctctcccgctgacgccgtcccggactgatgggctgcctgtatcgagtggtgattttgtgccgagctgccggtcggggagctgttggctggctggtggcaggatatattgtggtgtaaacaaattgacgcttagacaacttaataacacattgcggacgtttttaatgtactgaattaacgccgaattaa

SEQ ID NO: 6 - protein, 58 aa, Artificial Sequence; identical to SEQ ID NO: 4
  Synthetic Construct

SEQ ID NO: 7 - DNA, 19 bp, Artificial Sequence
  adapter sequence added to gene specific primers for cloning purposes
ggaattccagctgaccacc

SEQ ID NO: 8 - DNA, 20 bp, Artificial Sequence
  adapter sequence added to gene specific primers for cloning purposes
gatccccgggaattgccatg

SEQ ID NO: 9 - DNA, 10 bp, Artificial Sequence
  adapter sequence added to gene specific primers for cloning purposes
ttgctcttcc

SEQ ID NO: 10 - DNA, 10 bp, Artificial Sequence
  adapter sequence added to gene specific primers for cloning purposes
ttgctcttcg

SEQ ID NO: 11 - DNA, 34 bp, Artificial Sequence
  Amplification of the targeting sequence of the gene FNR from Spinacia oleracea to generate the S.cerevisiae plastidic targeting vector VC-MME354-1
atagaattcgcataaacttatcttcatagttgcc

SEQ ID NO: 12 - DNA, 27 bp, Artificial Sequence
  Amplification of the targeting sequence of the gene FNR from Spinacia oleracea to generate the S.cerevisiae plastidic targeting vector VC-MME354-1
atagaattcagaggcgatctgggccct

SEQ ID NO: 13 - DNA, 36 bp, Artificial Sequence
  Amplification of the targeting sequence of the gene FNR from Spinacia oleracea to generate the E.coli plastidic targeting vector VC-MME432-1
atagtttaaacgcataaacttatcttcatagttgcc

SEQ ID NO: 14 - DNA, 34 bp, Artificial Sequence
  Amplification of the targeting sequence of the gene FNR from Spinacia oleracea to generate the E.coli plastidic targeting vector VC-MME432-1
ataccatggaagagcaagaggcgatctgggccct

SEQ ID NO: 15 - DNA, 9044 bp, Artificial Sequence
  VC-MME489-1p
agctttgggcggatcctctagaggacaatcagtaaattgaacggagaatattattcataaaaatacgatagtaacgggtgatatattcattagaatgaaccgaaaccggcggtaaggatctgagctacacatgctcaggttttttacaacgtgcacaacagaattgaaagcaaatatcatgcgatcataggcgtctcgcatatctcattaaagcagggcatgccggtcgagtcaaatctcggtgacgggcaggaccggacggggcggtaccggcaggctgaagtccagctgccagaaacccacgtcatgccagttcccgtgcttgaagccggccgcccgcagcatgccgcggggggcatatccgagcgcctcgtgcatgcgcacgctcgggtcgttgggcagcccgatgacagcgaccacgctcttgaagccctgtgcctccagggacttcagcaggtgggtgtagagcgtggagcccagtcccgtccgctggtggcggggggagacgtacacggtcgactcggccgtccagtcgtaggcgttgcgtgccttccaggggcccgcgtaggcgatgccggcgacctcgccgtccacctcggcgacgagccagggatagcgctcccgcagacggacgaggtcgtccgtccactcctgcggttcctgcggctcggtacggaagttgaccgtgcttgtctcgatgtagtggttgacgatggtgcagaccgccggcatgtccgcctcggtggcacggcggatgtcggccgggcgtcgttctgggctcatggtagactcgacggatccacgtgtggaagatatgaatttttttgagaaactagataagattaatgaatatcggtgttttggttttttcttgtggccgtctttgtttatattgagatttttcaaatcagtgcgcaagacgtgacgtaagtatccgagtcagtttttatttttctactaatttggtcgaatctagattcgacggtatcgataagctcgcggatccctgaaagcgacgttggatgttaacatctacaaattgccttttcttatcgaccatgtacgtaagcgcttacgtttttggtggacccttgaggaaactggtagctgttgtgggcctgtggtctcaagatggatcattaatttccaccttcacctacgatggggggcatcgcaccggtgagtaatattgtacggctaagagcgaatttggcctgtaggatccctgaaagcgacgttggatgttaacatctacaaattgccttttcttatcgaccatgtacgtaagcgcttacgtttttggtggacccttgaggaaactggtagctgttgtgggcctgtggtctcaagatggatcattaatttccaccttcacctacgatggggggcatcgcaccggtgagtaatattgtacggctaagagcgaatttggcctgtaggatccctgaaagcgacgttggatgttaacatctacaaattgccttttcttatcgaccatgtacgtaagcgcttacgtttttggtggacccttgaggaaactggtagctgttgtgggcctgtggtctcaagatggatcattaatttccaccttcacctacgatggggggcatcgcaccggtgagtaatattgtacggctaagagcgaatttggcctgtaggatccgcgagctggtcaatcccattgcttttgaagcagctcaacattgatctctttctcgatcgagggagatttttcaaatcagtgcgcaagacgtgacgtaagtatccgagtcagtttttatttttctactaatttggtcgtttatttcggcgtgtaggacatggcaaccgggcctgaatttcgcgggtattctgtttctattccaactttttcttgatccgcagccattaacgacttttgaatagatacgctgacacgccaagcctcgctagtcaaaagtgtaccaaacaacgctttacagcaagaacggaatgcgcgtgacgctcgcggtgacgccatttcgccttttcagaaatggataaatagccttgcttcctattatatcttcccaaattaccaatacattacactagcatctgaatttcataaccaatctcgatacaccaaatcgaagatctccctggaattccagctgaccacccatggcaattcccggggatcagctcgaatttccccgatcgttcaaacatttggcaataaagtttcttaagattgaatcctgttgccggtcttgcgatgattatcatataatttctgttgaattacgttaagcatgtaataattaacatgtaatgcatgacgttatttatgagatgggtttttatgattagagtcccgcaattatacatttaatacgcgatagaaaacaaaatatagcgcgcaaactaggataaattatcgcgcgcggtgtcatctatgttactagatcgggaattggcatgcaagcttggcactggccgtcgttttacaacgtcgtgactgggaaaaccctggcgttacccaacttaatcgccttgcagcacatccccctttcgccagctggcgtaatagcgaagaggcccgcaccgatcgcccttcccaacagttgcgcagcctgaatggcgaatgctagagcagcttgagcttggatcagattgtcgtttcccgccttcagtttaaactatcagtgtttgacaggatatattggcgggtaaacctaagagaaaagagcgtttattagaataatcggatatttaaaagggcgtgaaaaggtttatccgttcgtccatttgtatgtgcatgccaaccacagggttcccctcgggatcaaagtactttgatccaacccctccgctgctatagtgcagtcggcttctgacgttcagtgcagccgtcttctgaaaacgacatgtcgcacaagtcctaagttacgcgacaggctgccgccctgcccttttcctggcgttttcttgtcgcgtgttttagtcgcataaagtagaatacttgcgactagaaccggagacattacgccatgaacaagagcgccgccgctggcctgctgggctatgcccgcgtcagcaccgacgaccaggacttgaccaaccaacgggccgaactgcacgcggccggctgcaccaagctgttttccgagaagatcaccggcaccaggcgcgaccgcccggagctggccaggatgcttgaccacctacgccctggcgacgttgtgacagtgaccaggctagaccgcctggcccgcagcacccgcgacctactggacattgccgagcgcatccaggaggccggcgcgggcctgcgtagcctggcagagccgtgggccgacaccaccacgccggccggccgcatggtgttgaccgtgttcgccggcattgccgagttcgagcgttccctaatcatcgaccgcacccggagcgggcgcgaggccgccaaggcccgaggcgtgaagtttggcccccgccctaccctcaccccggcacagatcgcgcacgcccgcgagctgatcgaccaggaaggccgcaccgtgaaagaggcggctgcactgcttggcgtgcatcgctcgaccctgtaccgcgcacttgagcgcagcgaggaagtgacgcccaccgaggccaggcggcgcggtgccttccgtgaggacgcattgaccgaggccgacgccctggcggccgccgagaatgaacgccaagaggaacaagcatgaaaccgcaccaggacggccaggacgaaccgtttttcattaccgaagagatcgaggcggagatgatcgcggccgggtacgtgttcgagccgcccgcgcacgtctcaaccgtgcggctgcatgaaatcctggccggtttgtctgatgccaagctggcggcctggccggccagcttggccgctgaagaaaccgagcgccgccgtctaaaaaggtgatgtgtatttgagtaaaacagcttgcgtcatgcggtcgctgcgtatatgatgcgatgagtaaataaacaaatacgcaaggggaacgcatgaaggttatcgctgtacttaaccagaaaggcgggtcaggcaagacgaccatcgcaacccatctagcccgcgccctgcaactcgccggggccgatgttctgttagtcgattccgatccccagggcagtgcccgcgattgggcggccgtgcgggaagatcaaccgctaaccgttgtcggcatcgaccgcccgacgattgaccgcgacgtgaaggccatcggccggcgcgacttcgtagtgatcgacggagcgccccaggcggcggacttggctgtgtccgcgatcaaggcagccgacttcgtgctgattccggtgcagccaagcccttacgacatatgggccaccgccgacctggtggagctggttaagcagcgcattgaggtcacggatggaaggctacaagcggcctttgtcgtgtcgcgggcgatcaaaggcacgcgcatcggcggtgaggttgccgaggcgctggccgggtacgagctgcccattcttgagtcccgtatcacgcagcgcgtgagctacccaggcactgccgccgccggcacaaccgttcttgaatcagaacccgagggcgacgctgcccgcgaggtccaggcgctggccgctgaaattaaatcaaaactcatttgagttaatgaggtaaagagaaaatgagcaaaagcacaaacacgctaagtgccggccgtccgagcgcacgcagcagcaaggctgcaacgttggccagcctggcagacacgccagccatgaagcgggtcaactttcagttgccggcggaggatcacaccaagctgaagatgtacgcggtacgccaaggcaagaccattaccgagctgctatctgaatacatcgcgcagctaccagagtaaatgagcaaatgaataaatgagtagatgaattttagcggctaaaggaggcggcatggaaaatcaagaacaaccaggcaccgacgccgtggaatgccccatgtgtggaggaacgggcggttggccaggcgtaagcggctgggttgtctgccggccctgcaatggcactggaacccccaagcccgaggaatcggcgtgacggtcgcaaaccatccggcccggtacaaatcggcgcggcgctgggtgatgacctggtggagaagttgaaggccgcgcaggccgcccagcggcaacgcatcgaggcagaagcacgccccggtgaatcgtggcaagcggccgctgatcgaatccgcaaagaatcccggcaaccgccggcagccggtgcgccgtcgattaggaagccgcccaagggcgacgagcaaccagattttttcgttccgatgctctatgacgtgggcacccgcgatagtcgcagcatcatggacgtggccgttttccgtctgtcgaagcgtgaccgacgagctggcgaggtgatccgctacgagcttccagacgggcacgtagaggtttccgcagggccggccggcatggccagtgtgtgggattacgacctggtactgatggcggtttcccatctaaccgaatccatgaaccgataccgggaagggaagggagacaagcccggccgcgtgttccgtccacacgttgcggacgtactcaagttctgccggcgagccgatggcggaaagcagaaagacgacctggtagaaacctgcattcggttaaacaccacgcacgttgccatgcagcgtacgaagaaggccaagaacggccgcctggtgacggtatccgagggtgaagccttgattagccgctacaagatcgtaaagagcgaaaccgggcggccggagtacatcgagatcgagctagctgattggatgtaccgcgagatcacagaaggcaagaacccggacgtgctgacggttcaccccgattactttttgatcgatcccggcatcggccgttttctctaccgcctggcacgccgcgccgcaggcaaggcagaagccagatggttgttcaagacgatctacgaacgcagtggcagcgccggagagttcaagaagttctgtttcaccgtgcgcaagctgatcgggtcaaatgacctgccggagtacgatttgaaggaggaggcggggcaggctggcccgatcctagtcatgcgctaccgcaacctgatcgagggcgaagcatccgccggttcctaatgtacggagcagatgctagggcaaattgccctagcaggggaaaaaggtcgaaaaggtctctttcctgtggatagcacgtacattgggaacccaaagccgtacattgggaaccggaacccgtacattgggaacccaaagccgtacattgggaaccggtcacacatgtaagtgactgatataaaagagaaaaaaggcgatttttccgcctaaaactctttaaaacttattaaaactcttaaaacccgcctggcctgtgcataactgtctggccagcgcacagccgaagagctgcaaaaagcgcctacccttcggtcgctgcgctccctacgccccgccgcttcgcgtcggcctatcgcggccgctggccgctcaaaaatggctggcctacggccaggcaatctaccagggcgcggacaagccgcgccgtcgccactcgaccgccggcgcccacatcaaggcaccctgcctcgcgcgtttcggtgatgacggtgaaaacctctgacacatgcagctcccggagacggtcacagcttgtctgtaagcggatgccgggagcagacaagcccgtcagggcgcgtcagcgggtgttggcgggtgtcggggcgcagccatgacccagtcacgtagcgatagcggagtgtatactggcttaactatgcggcatcagagcagattgtactgagagtgcaccatatgcggtgtgaaataccgcacagatgcgtaaggagaaaataccgcatcaggcgctcttccgcttcctcgctcactgactcgctgcgctcggtcgttcggctgcggcgagcggtatcagctcactcaaaggcggtaatacggttatccacagaatcaggggataacgcaggaaagaacatgtgagcaaaaggccagcaaaaggccaggaaccgtaaaaaggccgcgttgctggcgtttttccataggctccgcccccctgacgagcatcacaaaaatcgacgctcaagtcagaggtggcgaaacccgacaggactataaagataccaggcgtttccccctggaagctccctcgtgcgctctcctgttccgaccctgccgcttaccggatacctgtccgcctttctcccttcgggaagcgtggcgctttctcatagctcacgctgtaggtatctcagttcggtgtaggtcgttcgctccaagctgggctgtgtgcacgaaccccccgttcagcccgaccgctgcgccttatccggtaactatcgtcttgagtccaacccggtaagacacgacttatcgccactggcagcagccactggtaacaggattagcagagcgaggtatgtaggcggtgctacagagttcttgaagtggtggcctaactacggctacactagaaggacagtatttggtatctgcgctctgctgaagccagttaccttcggaaaaagagttggtagctcttgatccggcaaacaaaccaccgctggtagcggtggtttttttgtttgcaagcagcagattacgcgcagaaaaaaaggatctcaagaagatcctttgatcttttctacggggtctgacgctcagtggaacgaaaactcacgttaagggattttggtcatgcattctaggtactaaaacaattcatccagtaaaatataatattttattttctcccaatcaggcttgatccccagtaagtcaaaaaatagctcgacatactgttcttccccgatatcctccctgatcgaccggacgcagaaggcaatgtcataccacttgtccgccctgccgcttctcccaagatcaataaagccacttactttgccatctttcacaaagatgttgctgtctcccaggtcgccgtgggaaaagacaagttcctcttcgggcttttccgtctttaaaaaatcatacagctcgcgcggatctttaaatggagtgtcttcttcccagttttcgcaatccacatcggccagatcgttattcagtaagtaatccaattcggctaagcggctgtctaagctattcgtatagggacaatccgatatgtcgatggagtgaaagagcctgatgcactccgcatacagctcgataatcttttcagggctttgttcatcttcatactcttccgagcaaaggacgccatcggcctcactcatgagcagattgctccagccatcatgccgttcaaagtgcaggacctttggaacaggcagctttccttccagccatagcatcatgtccttttcccgttccacatcataggtggtccctttataccggctgtccgtcatttttaaatataggttttcattttctcccaccagcttatataccttagcaggagacattccttccgtatcttttacgcagcggtatttttcgatcagttttttcaattccggtgatattctcattttagccatttattatttccttcctcttttctacagtatttaaagataccccaagaagctaattataacaagacgaactccaattcactgttccttgcattctaaaaccttaaataccagaaaacagctttttcaaagttgttttcaaagttggcgtataacatagtatcgacggagccgattttgaaaccgcggtgatcacaggcagcaacgctctgtcatcgttacaatcaacatgctaccctccgcgagatcatccgtgtttcaaacccggcagcttagttgccgttcttccgaatagcatcggtaacatgagcaaagtctgccgccttacaacggctctcccgctgacgccgtcccggactgatgggctgcctgtatcgagtggtgattttgtgccgagctgccggtcggggagctgttggctggctggtggcaggatatattgtggtgtaaacaaattgacgcttagacaacttaataacacattgcggacgtttttaatgtactgaattaacgccgaatta

SEQ ID NO: 16 - DNA, 9041 bp, Artificial Sequence
  pMTX0270p
gctttgggcggatccggacaatcagtaaattgaacggagaatattattcataaaaatacgatagtaacgggtgatatattcattagaatgaaccgaaaccggcggtaaggatctgagctacacatgctcaggttttttacaacgtgcacaacagaattgaaagcaaatatcatgcgatcataggcgtctcgcatatctcattaaagcagggcatgccggtcgagtcaaatctcggtgacgggcaggaccggacggggcggtaccggcaggctgaagtccagctgccagaaacccacgtcatgccagttcccgtgcttgaagccggccgcccgcagcatgccgcggggggcatatccgagcgcctcgtgcatgcgcacgctcgggtcgttgggcagcccgatgacagcgaccacgctcttgaagccctgtgcctccagggacttcagcaggtgggtgtagagcgtggagcccagtcccgtccgctggtggcggggggagacgtacacggtcgactcggccgtccagtcgtaggcgttgcgtgccttccaggggcccgcgtaggcgatgccggcgacctcgccgtccacctcggcgacgagccagggatagcgctcccgcagacggacgaggtcgtccgtccactcctgcggttcctgcggctcggtacggaagttgaccgtgcttgtctcgatgtagtggttgacgatggtgcagaccgccggcatgtccgcctcggtggcacggcggatgtcggccgggcgtcgttctgggctcatggtagactcgacggatccacgtgtggaagatatgaatttttttgagaaactagataagattaatgaatatcggtgttttggttttttcttgtggccgtctttgtttatattgagatttttcaaatcagtgcgcaagacgtgacgtaagtatccgagtcagtttttatttttctactaatttggtcgaatctagattcgacggtatcgataagctcgcggatccctgaaagcgacgttggatgttaacatctacaaattgccttttcttatcgaccatgtacgtaagcgcttacgtttttggtggacccttgaggaaactggtagctgttgtgggcctgtggtctcaagatggatcattaatttccaccttcacctacgatggggggcatcgcaccggtgagtaatattgtacggctaagagcgaatttggcctgtaggatccctgaaagcgacgttggatgttaacatctacaaattgccttttcttatcgaccatgtacgtaagcgcttacgtttttggtggacccttgaggaaactggtagctgttgtgggcctgtggtctcaagatggatcattaatttccaccttcacctacgatggggggcatcgcaccggtgagtaatattgtacggctaagagcgaatttggcctgtaggatccctgaaagcgacgttggatgttaacatctacaaattgccttttcttatcgaccatgtacgtaagcgcttacgtttttggtggacccttgaggaaactggtagctgttgtgggcctgtggtctcaagatggatcattaatttccaccttcacctacgatggggggcatcgcaccggtgagtaatattgtacggctaagagcgaatttggcctgtaggatccgcgagctggtcaatcccattgcttttgaagcagctcaacattgatctctttctcgatcgagggagatttttcaaatcagtgcgcaagacgtgacgtaagtatccgagtcagtttttatttttctactaatttggtcgtttatttcggcgtgtaggacatggcaaccgggcctgaatttcgcgggtattctgtttctattccaactttttcttgatccgcagccattaacgacttttgaatagatacgctgacacgccaagcctcgctagtcaaaagtgtaccaaacaacgctttacagcaagaacggaatgcgcgtgacgctcgcggtgacgccatttcgccttttcagaaatggataaatagccttgcttcctattatatcttcccaaattaccaatacattacactagcatctgaatttcataaccaatctcgatacaccaaatcgaagatctcccgggttgctcttccatggcaatgattaattaacgaagagcaagagctcgaatttccccgatcgttcaaacatttggcaataaagtttcttaagattgaatcctgttgccggtcttgcgatgattatcatataatttctgttgaattacgttaagcatgtaataattaacatgtaatgcatgacgttatttatgagatgggtttttatgattagagtcccgcaattatacatttaatacgcgatagaaaacaaaatatagcgcgcaaactaggataaattatcgcgcgcggtgtcatctatgttactagatcgggaattggcatgcaagcttggcactggccgtcgttttacaacgtcgtgactgggaaaaccctggcgttacccaacttaatcgccttgcagcacatccccctttcgccagctggcgtaatagcgaagaggcccgcaccgatcgcccttcccaacagttgcgcagcctgaatggcgaatgctagagcagcttgagcttggatcagattgtcgtttcccgccttcagtttaaactatcagtgtttgacaggatatattggcgggtaaacctaagagaaaagagcgtttattagaataatcggatatttaaaagggcgtgaaaaggtttatccgttcgtccatttgtatgtgcatgccaaccacagggttcccctcgggatcaaagtactttgatccaacccctccgctgctatagtgcagtcggcttctgacgttcagtgcagccgtcttctgaaaacgacatgtcgcacaagtcctaagttacgcgacaggctgccgccctgcccttttcctggcgttttcttgtcgcgtgttttagtcgcataaagtagaatacttgcgactagaaccggagacattacgccatgaacaagagcgccgccgctggcctgctgggctatgcccgcgtcagcaccgacgaccaggacttgaccaaccaacgggccgaactgcacgcggccggctgcaccaagctgttttccgagaagatcaccggcaccaggcgcgaccgcccggagctggccaggatgcttgaccacctacgccctggcgacgttgtgacagtgaccaggctagaccgcctggcccgcagcacccgcgacctactggacattgccgagcgcatccaggaggccggcgcgggcctgcgtagcctggcagagccgtgggccgacaccaccacgccggccggccgcatggtgttgaccgtgttcgccggcattgccgagttcgagcgttccctaatcatcgaccgcacccggagcgggcgcgaggccgccaaggcccgaggcgtgaagtttggcccccgccctaccctcaccccggcacagatcgcgcacgcccgcgagctgatcgaccaggaaggccgcaccgtgaaagaggcggctgcactgcttggcgtgcatcgctcgaccctgtaccgcgcacttgagcgcagcgaggaagtgacgcccaccgaggccaggcggcgcggtgccttccgtgaggacgcattgaccgaggccgacgccctggcggccgccgagaatgaacgccaagaggaacaagcatgaaaccgcaccaggacggccaggacgaaccgtttttcattaccgaagagatcgaggcggagatgatcgcggccgggtacgtgttcgagccgcccgcgcacgtctcaaccgtgcggctgcatgaaatcctggccggtttgtctgatgccaagctggcggcctggccggccagcttggccgctgaagaaaccgagcgccgccgtctaaaaaggtgatgtgtatttgagtaaaacagcttgcgtcatgcggtcgctgcgtatatgatgcgatgagtaaataaacaaatacgcaaggggaacgcatgaaggttatcgctgtacttaaccagaaaggcgggtcaggcaagacgaccatcgcaacccatctagcccgcgccctgcaactcgccggggccgatgttctgttagtcgattccgatccccagggcagtgcccgcgattgggcggccgtgcgggaagatcaaccgctaaccgttgtcggcatcgaccgcccgacgattgaccgcgacgtgaaggccatcggccggcgcgacttcgtagtgatcgacggagcgccccaggcggcggacttggctgtgtccgcgatcaaggcagccgacttcgtgctgattccggtgcagccaagcccttacgacatatgggccaccgccgacctggtggagctggttaagcagcgcattgaggtcacggatggaaggctacaagcggcctttgtcgtgtcgcgggcgatcaaaggcacgcgcatcggcggtgaggttgccgaggcgctggccgggtacgagctgcccattcttgagtcccgtatcacgcagcgcgtgagctacccaggcactgccgccgccggcacaaccgttcttgaatcagaacccgagggcgacgctgcccgcgaggtccaggcgctggccgctgaaattaaatcaaaactcatttgagttaatgaggtaaagagaaaatgagcaaaagcacaaacacgctaagtgccggccgtccgagcgcacgcagcagcaaggctgcaacgttggccagcctggcagacacgccagccatgaagcgggtcaactttcagttgccggcggaggatcacaccaagctgaagatgtacgcggtacgccaaggcaagaccattaccgagctgctatctgaatacatcgcgcagctaccagagtaaatgagcaaatgaataaatgagtagatgaattttagcggctaaaggaggcggcatggaaaatcaagaacaaccaggcaccgacgccgtggaatgccccatgtgtggaggaacgggcggttggccaggcgtaagcggctgggttgcctgccggccctgcaatggcactggaacccccaagcccgaggaatcggcgtgagcggtcgcaaaccatccggcccggtacaaatcggcgcggcgctgggtgatgacctggtggagaagttgaaggccgcgcaggccgcccagcggcaacgcatcgaggcagaagcacgccccggtgaatcgtggcaagcggccgctgatcgaatccgcaaagaatcccggcaaccgccggcagccggtgcgccgtcgattaggaagccgcccaagggcgacgagcaaccagattttttcgttccgatgctctatgacgtgggcacccgcgatagtcgcagcatcatggacgtggccgttttccgtctgtcgaagcgtgaccgacgagctggcgaggtgatccgctacgagcttccagacgggcacgtagaggtttccgcagggccggccggcatggccagtgtgtgggattacgacctggtactgatggcggtttcccatctaaccgaatccatgaaccgataccgggaagggaagggagacaagcccggccgcgtgttccgtccacacgttgcggacgtactcaagttctgccggcgagccgatggcggaaagcagaaagacgacctggtagaaacctgcattcggttaaacaccacgcacgttgccatgcagcgtacgaagaaggccaagaacggccgcctggtgacggtatccgagggtgaagccttgattagccgctacaagatcgtaaagagcgaaaccgggcggccggagtacatcgagatcgagctagctgattggatgtaccgcgagatcacagaaggcaagaacccggacgtgctgacggttcaccccgattactttttgatcgatcccggcatcggccgttttctctaccgcctggcacgccgcgccgcaggcaaggcagaagccagatggttgttcaagacgatctacgaacgcagtggcagcgccggagagttcaagaagttctgtttcaccgtgcgcaagctgatcgggtcaaatgacctgccggagtacgatttgaaggaggaggcggggcaggctggcccgatcctagtcatgcgctaccgcaacctgatcgagggcgaagcatccgccggttcctaatgtacggagcagatgctagggcaaattgccctagcaggggaaaaaggtcgaaaaggtctctttcctgtggatagcacgtacattgggaacccaaagccgtacattgggaaccggaacccgtacattgggaacccaaagccgtacattgggaaccggtcacacatgtaagtgactgatataaaagagaaaaaaggcgatttttccgcctaaaactctttaaaacttattaaaactcttaaaacccgcctggcctgtgcataactgtctggccagcgcacagccgaagagctgcaaaaagcgcctacccttcggtcgctgcgctccctacgccccgccgcttcgcgtcggcctatcgcggccgctggccgctcaaaaatggctggcctacggccaggcaatctaccagggcgcggacaagccgcgccgtcgccactcgaccgccggcgcccacatcaaggcaccctgcctcgcgcgtttcggtgatgacggtgaaaacctctgacacatgcagctcccggagacggtcacagcttgtctgtaagcggatgccgggagcagacaagcccgtcagggcgcgtcagcgggtgttggcgggtgtcggggcgcagccatgacccagtcacgtagcgatagcggagtgtatactggcttaactatgcggcatcagagcagattgtactgagagtgcaccatatgcggtgtgaaataccgcacagatgcgtaaggagaaaataccgcatcaggcgctcttccgcttcctcgctcactgactcgctgcgctcggtcgttcggctgcggcgagcggtatcagctcactcaaaggcggtaatacggttatccacagaatcaggggataacgcaggaaagaacatgtgagcaaaaggccagcaaaaggccaggaaccgtaaaaaggccgcgttgctggcgtttttccataggctccgcccccctgacgagcatcacaaaaatcgacgctcaagtcagaggtggcgaaacccgacaggactataaagataccaggcgtttccccctggaagctccctcgtgcgctctcctgttccgaccctgccgcttaccggatacctgtccgcctttctcccttcgggaagcgtggcgctttctcatagctcacgctgtaggtatctcagttcggtgtaggtcgttcgctccaagctgggctgtgtgcacgaaccccccgttcagcccgaccgctgcgccttatccggtaactatcgtcttgagtccaacccggtaagacacgacttatcgccactggcagcagccactggtaacaggattagcagagcgaggtatgtaggcggtgctacagagttcttgaagtggtggcctaactacggctacactagaaggacagtatttggtatctgcgctctgctgaagccagttaccttcggaaaaagagttggtagctcttgatccggcaaacaaaccaccgctggtagcggtggtttttttgtttgcaagcagcagattacgcgcagaaaaaaaggatctcaagaagatcctttgatcttttctacggggtctgacgctcagtggaacgaaaactcacgttaagggattttggtcatgcattctaggtactaaaacaattcatccagtaaaatataatattttattttctcccaatcaggcttgatccccagtaagtcaaaaaatagctcgacatactgttcttccccgatatcctccctgatcgaccggacgcagaaggcaatgtcataccacttgtccgccctgccgcttctcccaagatcaataaagccacttactttgccatctttcacaaagatgttgctgtctcccaggtcgccgtgggaaaagacaagttcctcttcgggcttttccgtctttaaaaaatcatacagctcgcgcggatctttaaatggagtgtcttcttcccagttttcgcaatccacatcggccagatcgttattcagtaagtaatccaattcggctaagcggctgtctaagctattcgtatagggacaatccgatatgtcgatggagtgaaagagcctgatgcactccgcatacagctcgataatcttttcagggctttgttcatcttcatactcttccgagcaaaggacgccatcggcctcactcatgagcagattgctccagccatcatgccgttcaaagtgcaggacctttggaacaggcagctttccttccagccatagcatcatgtccttttcccgttccacatcataggtggtccctttataccggctgtccgtcatttttaaatataggttttcattttctcccaccagcttatataccttagcaggagacattccttccgtatcttttacgcagcggtatttttcgatcagttttttcaattccggtgatattctcattttagccatttattatttccttcctcttttctacagtatttaaagataccccaagaagctaattataacaagacgaactccaattcactgttccttgcattctaaaaccttaaataccagaaaacagctttttcaaagttgttttcaaagttggcgtataacatagtatcgacggagccgattttgaaaccgcggtgatcacaggcagcaacgctctgtcatcgttacaatcaacatgctaccctccgcgagatcatccgtgtttcaaacccggcagcttagttgccgttcttccgaatagcatcggtaacatgagcaaagtctgccgccttacaacggctctcccgctgacgccgtcccggactgatgggctgcctgtatcgagtggtgattttgtgccgagctgccggtcggggagctgttggctggctggtggcaggatatattgtggtgtaaacaaattgacgcttagacaacttaataacacattgcggacgtttttaatgtactgaattaacgccgaattaa

SEQ ID NO: 17 - protein, 62 aa, Acetabularia mediterranea
MASIMMNKSVVLSKECAKPLATPKVTLNKRGFATTIATKNREMMVWQPFNNKMFETFSFLPP

SEQ ID NO: 18 - protein, 90 aa, Arabidopsis thaliana
MAASLQSTATFLQSAKIATAPSRGSSHLRSTQAVGKSFGLETSSARLTCSFQSDFKDFTGKCSDAVKIAGFALATSALVVSGASAEGAPK

SEQ ID NO: 19 - protein, 96 aa, Arabidopsis thaliana
MAQVSRICNGVQNPSLICNLSKSSQRKSPLSVSLKTQQHPRAYPISSSWGLKKSGMTLIGSELRPLKVMSSVSTAEKASEIVLQPIREISGLIKLP

SEQ ID NO: 20 - protein, 100 aa, Arabidopsis thaliana
MAAATTTTTTSSSISFSTKPSPSSSKSPLPISRFSLPFSLNPNKSSSSSRRRGIKSSSPSSISAVLNTTTNVTTTPSPTKPTKPETFISRFAPDQPRKGA

SEQ ID NO: 21 - protein, 46 aa, Arabidopsis thaliana
MITSSLTCSLQALKLSSPFAHGSTPLSSLSKPNSFPNHRMPALVPV

SEQ ID NO: 22 - protein, 93 aa, Arabidopsis thaliana
MASLLGTSSSAIWASPSLSSPSSKPSSSPICFRPGKLFGSKLNAGIQIRPKKNRSRYHVSVMNVATEINSTEQVVGKFDSKKSARPVYPFAAI

SEQ ID NO: 23 - protein, 52 aa, Arabidopsis thaliana
MASTALSSAIVGTSFIRRSPAPISLRSLPSANTQSLFGLKSGTARGGRVVAM

SEQ ID NO: 24 - protein, 39 aa, Arabidopsis thaliana
MAASTMALSSPAFAGKAVNLSPAASEVLGSGRVTNRKTV

SEQ ID NO: 25 - protein, 92 aa, Arabidopsis thaliana
MAAITSATVTIPSFTGLKLAVSSKPKTLSTISRSSSATRAPPKLALKSSLKDFGVIAVATAASIVLAGNAMAMEVLLGSDDGSLAFVPSEFT

SEQ ID NO: 26 - protein, 85 aa, Arabidopsis thaliana
MAAAVSTVGAINRAPLSLNGSGSGAVSAPASTFLGKKVVTVSRFAQSNKKSNGSFKVLAVKEDKQTDGDRWRGLAYDTSDDQIDI

SEQ ID NO: 27 - protein, 54 aa, Arabidopsis thaliana
MKSSMLSSTAWTSPAQATMVAPFTGLKSSASFPVTRKANNDITSITSNGGRVSC

SEQ ID NO: 28 - protein, 91 aa, Arabidopsis thaliana
MAASGTSATFRASVSSAPSSSSQLTHLKSPFKAVKYTPLPSSRSKSSSFSVSCTIAKDPPVLMAAGSDPALWQRPDSFGRFGKFGGKYVPE

SEQ ID NO: 29 - protein, 80 aa, Brassica campestris
MSTTFCSSVCMQATSLAATTRISFQKPALVSTTNLSFNLRRSIPTRFSISCAAKPETVEKVSKIVKKQLSLKDDQKVVAE

SEQ ID NO: 30 - protein, 51 aa, Brassica napus
MATTFSASVSMQATSLATTTRISFQKPVLVSNHGRTNLSFNLSRTRLSISC

SEQ ID NO: 31 - protein, 44 aa, Chlamydomonas reinhardtii
MQALSSRVNIAAKPQRAQRLVVRAEEVKAAPKKEVGPKRGSLVK

SEQ ID NO: 32 - protein, 51 aa, Cucurbita moschata
MAELIQDKESAQSAATAAAASSGYERRNEPAHSRKFLEVRSEEELLSCIKK

SEQ ID NO: 33 - protein, 62 aa, Spinacea oleracea
MSTINGCLTSISPSRTQLKNTSTLRPTFIANSRVNPSSSVPPSLIRNQPVFAAPAPIITPTL

SEQ ID NO: 34 - protein, 75 aa, Spinacea oleracea
MTTAVTAAVSFPSTKTTSLSARCSSVISPDKISYKKVPLYYRNVSATGKMGPIRAQIASDVEAPPPAPAKVEKMS

SEQ ID NO: 35 - protein, 55 aa, Spinacea oleracea
MTTAVTAAVSFPSTKTTSLSARSSSVISPDKISYKKVPLYYRNVSATGKMGPIRA

SEQ ID NO: 36 - DNA, 419 bp, Spinacia oleracea
  5'UTR (1)..(168)
  CDS (166)..(273)
  CDS (351)..(419)
gcataaacttatcttcatagttgccactccaatttgctccttgaatctcctccacccaatacataatccactcctccatcacccacttcactactaaatcaaacttaactctgtttttctctctcctcctttcatttcttattcttccaatcatcgtactccgccatgaccaccgctgtcaccgccgctgtttctttcccctctaccaaaaccacctctctctccgcccgaagctcctccgtcatttcccctgacaaaatcagctacaaaaaggtgattcccaatttcactgtgttttttattaataatttgttattttgatgatgagatgattaatttgggtgctgcaggttcctttgtactacaggaatgtatctgcaactgggaaaatgggacccatcagggcccagatcgcctct

SEQ ID NO: 37 - protein, 59 aa, Spinacia oleracea
MTTAVTAAVSFPSTKTTSLSARSSSVISPDKISYKKVPLYYRNVSATGKMGPIRAQIAS

SEQ ID NO: 38 - DNA, 8588 bp, Artificial Sequence
  VC-MME0289-1qcz
gctttgggcggatcctctagaggacaatcagtaaattgaacggagaatattattcataaaaatacgatagtaacgggtgatatattcattagaatgaaccgaaaccggcggtaaggatctgagctacacatgctcaggttttttacaacgtgcacaacagaattgaaagcaaatatcatgcgatcataggcgtctcgcatatctcattaaagcagggcatgccggtcgagtcaaatctcggtgacgggcaggaccggacggggcggtaccggcaggctgaagtccagctgccagaaacccacgtcatgccagttcccgtgcttgaagccggccgcccgcagcatgccgcggggggcatatccgagcgcctcgtgcatgcgcacgctcgggtcgttgggcagcccgatgacagcgaccacgctcttgaagccctgtgcctccagggacttcagcaggtgggtgtagagcgtggagcccagtcccgtccgctggtggcggggggagacgtacacggtcgactcggccgtccagtcgtaggcgttgcgtgccttccaggggcccgcgtaggcgatgccggcgacctcgccgtccacctcggcgacgagccagggatagcgctcccgcagacggacgaggtcgtccgtccactcctgcggttcctgcggctcggtacggaagttgaccgtgcttgtctcgatgtagtggttgacgatggtgcagaccgccggcatgtccgcctcggtggcacggcggatgtcggccgggcgtcgttctgggctcatggtagactcgacggatccacgtgtggaagatatgaatttttttgagaaactagataagattaatgaatatcggtgttttggttttttcttgtggccgtctttgtttatattgagatttttcaaatcagtgcgcaagacgtgacgtaagtatccgagtcagtttttatttttctactaatttggtcgaatctagactgcagcaaatttacacattgccactaaacgtctaaacccttgtaatttgtttttgttttactatgtgtgttatgtatttgatttgcgataaatttttatatttggtactaaatttataacaccttttatgctaacgtttgccaacacttagcaatttgcaagttgattaattgattctaaattatttttgtcttctaaatacatatactaatcaactggaaatgtaaatatttgctaatatttctactataggagaattaaagtgagtgaatatggtaccacaaggtttggagatttaattgttgcaatgctgcatggatggcatatacaccaaacattcaataattcttgaggataataatggtaccacacaagatttgaggtgcatgaacgtcacgtggacaaaaggtttagtaatttttcaagacaacaatgttaccacacacaagttttgaggtgcatgcatggatgccctgtggaaagtttaaaaatattttggaaatgatttgcatggaagccatgtgtaaaaccatgacatccacttggaggatgcaataatgaagaaaactacaaatttacatgcaactagttatgcatgtagtctatataatgaggattttgcaatactttcattcatacacactcactaagttttacacgattataatttcttcatagccacccgggttgctcttccatggcaatgattaattaacgaagagcaagagctcgaatttccccgatcgttcaaacatttggcaataaagtttcttaagattgaatcctgttgccggtcttgcgatgattatcatataatttctgttgaattacgttaagcatgtaataattaacatgtaatgcatgacgttatttatgagatgggtttttatgattagagtcccgcaattatacatttaatacgcgatagaaaacaaaatatagcgcgcaaactaggataaattatcgcgcgcggtgtcatctatgttactagatcgggaattggcatgcaagcttggcactggccgtcgttttacaacgtcgtgactgggaaaaccctggcgttacccaacttaatcgccttgcagcacatccccctttcgccagctggcgtaatagcgaagaggcccgcaccgatcgcccttcccaacagttgcgcagcctgaatggcgaatgctagagcagcttgagcttggatcagattgtcgtttcccgccttcagtttaaactatcagtgtttgacaggatatattggcgggtaaacctaagagaaaagagcgtttattagaataatcggatatttaaaagggcgtgaaaaggtttatccgttcgtccatttgtatgtgcatgccaaccacagggttcccctcgggatcaaagtactttgatccaacccctccgctgctatagtgcagtcggcttctgacgttcagtgcagccgtcttctgaaaacgacatgtcgcacaagtcctaagttacgcgacaggctgccgccctgcccttttcctggcgttttcttgtcgcgtgttttagtcgcataaagtagaatacttgcgactagaaccggagacattacgccatgaacaagagcgccgccgctggcctgctgggctatgcccgcgtcagcaccgacgaccaggacttgaccaaccaacgggccgaactgcacgcggccggctgcaccaagctgttttccgagaagatcaccggcaccaggcgcgaccgcccggagctggccaggatgcttgaccacctacgccctggcgacgttgtgacagtgaccaggctagaccgcctggcccgcagcacccgcgacctactggacattgccgagcgcatccaggaggccggcgcgggcctgcgtagcctggcagagccgtgggccgacaccaccacgccggccggccgcatggtgttgaccgtgttcgccggcattgccgagttcgagcgttccctaatcatcgaccgcacccggagcgggcgcgaggccgccaaggcccgaggcgtgaagtttggcccccgccctaccctcaccccggcacagatcgcgcacgcccgcgagctgatcgaccaggaaggccgcaccgtgaaagaggcggctgcactgcttggcgtgcatcgctcgaccctgtaccgcgcacttgagcgcagcgaggaagtgacgcccaccgaggccaggcggcgcggtgccttccgtgaggacgcattgaccgaggccgacgccctggcggccgccgagaatgaacgccaagaggaacaagcatgaaaccgcaccaggacggccaggacgaaccgtttttcattaccgaagagatcgaggcggagatgatcgcggccgggtacgtgttcgagccgcccgcgcacgtctcaaccgtgcggctgcatgaaatcctggccggtttgtctgatgccaagctggcggcctggccggccagcttggccgctgaagaaaccgagcgccgccgtctaaaaaggtgatgtgtatttgagtaaaacagcttgcgtcatgcggtcgctgcgtatatgatgcgatgagtaaataaacaaatacgcaaggggaacgcatgaaggttatcgctgtacttaaccagaaaggcgggtcaggcaagacgaccatcgcaacccatctagcccgcgccctgcaactcgccggggccgatgttctgttagtcgattccgatccccagggcagtgcccgcgattgggcggccgtgcgggaagatcaaccgctaaccgttgtcggcatcgaccgcccgacgattgaccgcgacgtgaaggccatcggccggcgcgacttcgtagtgatcgacggagcgccccaggcggcggacttggctgtgtccgcgatcaaggcagccgacttcgtgctgattccggtgcagccaagcccttacgacatatgggccaccgccgacctggtggagctggttaagcagcgcattgaggtcacggatggaaggctacaagcggcctttgtcgtgtcgcgggcgatcaaaggcacgcgcatcggcggtgaggttgccgaggcgctggccgggtacgagctgcccattcttgagtcccgtatcacgcagcgcgtgagctacccaggcactgccgccgccggcacaaccgttcttgaatcagaacccgagggcgacgctgcccgcgaggtccaggcgctggccgctgaaattaaatcaaaactcatttgagttaatgaggtaaagagaaaatgagcaaaagcacaaacacgctaagtgccggccgtccgagcgcacgcagcagcaaggctgcaacgttggccagcctggcagacacgccagccatgaagcgggtcaactttcagttgccggcggaggatcacaccaagctgaagatgtacgcggtacgccaaggcaagaccattaccgagctgctatctgaatacatcgcgcagctaccagagtaaatgagcaaatgaataaatgagtagatgaattttagcggctaaaggaggcggcatggaaaatcaagaacaaccaggcaccgacgccgtggaatgccccatgtgtggaggaacgggcggttggccaggcgtaagcggctgggttgcctgccggccctgcaatggcactggaacccccaagcccgaggaatcggcgtgagcggtcgcaaaccatccggcccggtacaaatcggcgcggcgctgggtgatgacctggtggagaagttgaaggccgcgcaggccgcccagcggcaacgcatcgaggcagaagcacgccccggtgaatcgtggcaagcggccgctgatcgaatccgcaaagaatcccggcaaccgccggcagccggtgcgccgtcgattaggaagccgcccaagggcgacgagcaaccagattttttcgttccgatgctctatgacgtgggcacccgcgatagtcgcagcatcatggacgtggccgttttccgtctgtcgaagcgtgaccgacgagctggcgaggtgatccgctacgagcttccagacgggcacgtagaggtttccgcagggccggccggcatggccagtgtgtgggattacgacctggtactgatggcggtttcccatctaaccgaatccatgaaccgataccgggaagggaagggagacaagcccggccgcgtgttccgtccacacgttgcggacgtactcaagttctgccggcgagccgatggcggaaagcagaaagacgacctggtagaaacctgcattcggttaaacaccacgcacgttgccatgcagcgtacgaagaaggccaagaacggccgcctggtgacggtatccgagggtgaagccttgattagccgctacaagatcgtaaagagcgaaaccgggcggccggagtacatcgagatcgagctagctgattggatgtaccgcgagatcacagaaggcaagaacccggacgtgctgacggttcaccccgattactttttgatcgatcccggcatcggccgttttctctaccgcctggcacgccgcgccgcaggcaaggcagaagccagatggttgttcaagacgatctacgaacgcagtggcagcgccggagagttcaagaagttctgtttcaccgtgcgcaagctgatcgggtcaaatgacctgccggagtacgatttgaaggaggaggcggggcaggctggcccgatcctagtcatgcgctaccgcaacctgatcgagggcgaagcatccgccggttcctaatgtacggagcagatgctagggcaaattgccctagcaggggaaaaaggtcgaaaaggtctctttcctgtggatagcacgtacattgggaacccaaagccgtacattgggaaccggaacccgtacattgggaacccaaagccgtacattgggaaccggtcacacatgtaagtgactgatataaaagagaaaaaaggcgatttttccgcctaaaactctttaaaacttattaaaactcttaaaacccgcctggcctgtgcataactgtctggccagcgcacagccgaagagctgcaaaaagcgcctacccttcggtcgctgcgctccctacgccccgccgcttcgcgtcggcctatcgcggccgctggccgctcaaaaatggctggcctacggccaggcaatctaccagggcgcggacaagccgcgccgtcgccactcgaccgccggcgcccacatcaaggcaccctgcctcgcgcgtttcggtgatgacggtgaaaacctctgacacatgcagctcccggagacggtcacagcttgtctgtaagcggatgccgggagcagacaagcccgtcagggcgcgtcagcgggtgttggcgggtgtcggggcgcagccatgacccagtcacgtagcgatagcggagtgtatactggcttaactatgcggcatcagagcagattgtactgagagtgcaccatatgcggtgtgaaataccgcacagatgcgtaaggagaaaataccgcatcaggcgctcttccgcttcctcgctcactgactcgctgcgctcggtcgttcggctgcggcgagcggtatcagctcactcaaaggcggtaatacggttatccacagaatcaggggataacgcaggaaagaacatgtgagcaaaaggccagcaaaaggccaggaaccgtaaaaaggccgcgttgctggcgtttttccataggctccgcccccctgacgagcatcacaaaaatcgacgctcaagtcagaggtggcgaaacccgacaggactataaagataccaggcgtttccccctggaagctccctcgtgcgctctcctgttccgaccctgccgcttaccggatacctgtccgcctttctcccttcgggaagcgtggcgctttctcatagctcacgctgtaggtatctcagttcggtgtaggtcgttcgctccaagctgggctgtgtgcacgaaccccccgttcagcccgaccgctgcgccttatccggtaactatcgtcttgagtccaacccggtaagacacgacttatcgccactggcagcagccactggtaacaggattagcagagcgaggtatgtaggcggtgctacagagttcttgaagtggtggcctaactacggctacactagaaggacagtatttggtatctgcgctctgctgaagccagttaccttcggaaaaagagttggtagctcttgatccggcaaacaaaccaccgctggtagcggtggtttttttgtttgcaagcagcagattacgcgcagaaaaaaaggatctcaagaagatcctttgatcttttctacggggtctgacgctcagtggaacgaaaactcacgttaagggattttggtcatgcattctaggtactaaaacaattcatccagtaaaatataatattttattttctcccaatcaggcttgatccccagtaagtcaaaaaatagctcgacatactgttcttccccgatatcctccctgatcgaccggacgcagaaggcaatgtcataccacttgtccgccctgccgcttctcccaagatcaataaagccacttactttgccatctttcacaaagatgttgctgtctcccaggtcgccgtgggaaaagacaagttcctcttcgggcttttccgtctttaaaaaatcatacagctcgcgcggatctttaaatggagtgtcttcttcccagttttcgcaatccacatcggccagatcgttattcagtaagtaatccaattcggctaagcggctgtctaagctattcgtatagggacaatccgatatgtcgatggagtgaaagagcctgatgcactccgcatacagctcgataatcttttcagggctttgttcatcttcatactcttccgagcaaaggacgccatcggcctcactcatgagcagattgctccagccatcatgccgttcaaagtgcaggacctttggaacaggcagctttccttccagccatagcatcatgtccttttcccgttccacatcataggtggtccctttataccggctgtccgtcatttttaaatataggttttcattttctcccaccagcttatataccttagcaggagacattccttccgtatcttttacgcagcggtatttttcgatcagttttttcaattccggtgatattctcattttagccatttattatttccttcctcttttctacagtatttaaagataccccaagaagctaattataacaagacgaactccaattcactgttccttgcattctaaaaccttaaataccagaaaacagctttttcaaagttgttttcaaagttggcgtataacatagtatcgacggagccgattttgaaaccgcggtgatcacaggcagcaacgctctgtcatcgttacaatcaacatgctaccctccgcgagatcatccgtgtttcaaacccggcagcttagttgccgttcttccgaatagcatcggtaacatgagcaaagtctgccgccttacaacggctctcccgctgacgccgtcccggactgatgggctgcctgtatcgagtggtgattttgtgccgagctgccggtcggggagctgttggctggctggtggcaggatatattgtggtgtaaacaaattgacgcttagacaacttaataacacattgcggacgtttttaatgtactgaattaacgccgaattaa

SEQ ID NO: 39 - DNA, 417 bp, ARABIDOPSIS THALIANA
  CDS (1)..(417)
atggcttcgagtttcattacagtacctaaacccttcttgtccttccccatcaaaaccaatgctcctactctacctcagcagacccttctcggaattcgaagaaattcctttagaattaacgccgtttccaccaaatgggaaccggcaaaggttgtaccacaagcagacagggtccttgtccgccttgaagtgcttcctgagaaatcctcaggaggagtactgttgcctaaatcagctgtgaaattcgagaggtacctaacaggcgaggttgtctctgttgggtctgaggttggggaagtggaacctggcaagaaggttttgttctctgatatgagcgcctatgaggttgattttggaacagaagatgctaagcattgcttttgcaaagaaagcgacttgttagctatcgtccagtga

SEQ ID NO: 40 - protein, 138 aa, ARABIDOPSIS THALIANA
MASSFITVPKPFLSFPIKTNAPTLPQQTLLGIRRNSFRINAVSTKWEPAKVVPQADRVLVRLEVLPEKSSGGVLLPKSAVKFERYLTGEVVSVGSEVGEVEPGKKVLFSDMSAYEVDFGTEDAKHCFCKESDLLAIVQ

SEQ ID NO: 41 - DNA, 757 bp, Glycine max
  CDS (134)..(538)
ccacgcgtccgcgcaccttgtcttttctttggcctttagcaacactttagataaacctaagagggtttaacctcgtttccttaatccattctttgctccctcgaactgctgtttggtctcttcactcttatccatggcatcaacgtttctcaccctaccaactcccttcctacacaaaactaatgccatcactttctctgacaagagaccctcatttttgcagaggagctctctgaagatcaatgcaattaccaaaaaatgggaacccactaaggttgtacctcaggctgatagagttcttgttcgtttggaggagctatcagataaaacagttggtggagttttgctgcccaagtcagctgttaaatttgagcgatatcttgtgggagaaatcctaactgttggtgctgaggctggagaactaaaggctggaacaaaggtactattcactgacatgaatgcttatgaggtggatttggggactgatgcaaaacactgcttctgtaaagcaagtgacttattggccgtggttgagtagggtttgccactgtatgagacaaaacgggagcaatcctttttatgatatatctttgacaaatgtatttttagtagaataaaccatttttattcattggtgttaaaattttatctttctatgttacaataacttgctttccccaggtagtttctgattcaaaactctacttataaagatgcctgttgtgctctaaaaaaaaaaaaaaaaaaaaaaaaaaaa

SEQ ID NO: 42 - protein, 134 aa, Glycine max
MASTFLTLPTPFLHKTNAITFSDKRPSFLQRSSLKINAITKKWEPTKVVPQADRVLVRLEELSDKTVGGVLLPKSAVKFERYLVGEILTVGAEAGELKAGTKVLFTDMNAYEVDLGTDAKHCFCKASDLLAVVE

SEQ ID NO: 43 - DNA, 594 bp, Glycine max
  CDS (95)..(499)
caacactttaggtaaacctaagagggtttaacctcgtttccttaatccattctttgctccctcgaactgttgtttggtctcttctctcttatccatggcatcaacgtttctcaccctaccaactcccttcctacacaaaaccaatgccatcagtttctctaacaagagaccctcatttttgcagaggagctctctgaagattcatgcaattaccaaaaaatgggaacccacaaaggttgtgcctcaggctgatagagttcttattcgtttggaggagctttcagataaaacagttggtggagttttgctgcctaaatcagctgttaaatttgagcgctatcttgtgggagaaatcctaactgttggtgctgaagctggagaactaaaggctggaacaaaggtactattcactgacatgaatgcttatgaggtggatttggggactgatgcaaaacactgcttctgtaaagcaagtgacttattggccgttgtggagtaaggttttggccactggacgagacaaaacgggagccatcctttttatggtatatctttgataagtgtattttagtagaataaaccatttttttcatt

SEQ ID NO: 44 - protein, 134 aa, Glycine max
MASTFLTLPTPFLHKTNAISFSNKRPSFLQRSSLKIHAITKKWEPTKVVPQADRVLIRLEELSDKTVGGVLLPKSAVKFERYLVGEILTVGAEAGELKAGTKVLFTDMNAYEVDLGTDAKHCFCKASDLLAVVE

SEQ ID NO: 45 - DNA, 750 bp, Sorghum bicolor
  CDS (122)..(526)
gccggccgggccggggtgcaaaagcagaagcagataagggaaggcacacgacgcaactatcctcccagcccccagggaagaagcctacgtttccacgctccctccccttgtccccactccaatggcgccctccctcctcgccgccgtgtccgcctcgcccttcctcctagccggcagcggcagcagccgcaggcccctgggcgccgcccccatccgccgggccgggctgcgcgtggctgcgcttaagtacgaccctgccaaggtggcgccgcagaacgaccgggtgcttgtccgtatccagcagatccctgagaaatctgctggtggtgtattgctaccgaaatctgctgttaagtttgagagatatctgatgggcgagattctatcggtcggtgctgatgttagtgaagttgaggctgggaagaaggttctcttctcagacatcgatgcttatgaggtggaccttggtaccgatgagaagcactgcttctgccgcgagtcagatctattggctttagttgaatgaaatttcataccatgaaaattacggacttacctatgctccaactgcatggacttatgtcactcctactttgttgtatgccatttgatatttgaatgttcgtgaattcagcttagcttctagatgagtgttagtcagcattgaattttggccgccataaactggaattatgttgatgcccaaattgctcagataccgaactggaaagtaaaaaaaaaaaaaaaaaa

SEQ ID NO: 46 - protein, 134 aa, Sorghum bicolor
MAPSLLAAVSASPFLLAGSGSSRRPLGAAPIRRAGLRVAALKYDPAKVAPQNDRVLVRIQQIPEKSAGGVLLPKSAVKFERYLMGEILSVGADVSEVEAGKKVLFSDIDAYEVDLGTDEKHCFCRESDLLALVE

SEQ ID NO: 47 - DNA, 723 bp, Zea mays
  CDS (144)..(548)
ccggccgggccgggcccacccgtccggggacggcacgcgacgcaactatcctcgagagagagagagagagagaggaagcccgtcgttctggaagtttccacgctccgcgcctccgccccctggtctgagtggtctccgctccaatggcgccctcactcctcgccgccatgtccacctcgcccttcctagccagcagcggcagcagccgcaggccgctaggcgctgcccacacccgacgggctggactgcgcgtggccgcgcttaagtacgaccctgccaaggtggcgccgcagaacgaccgggttctcgtccgtcttgagcagatccctgagaaatctgctggcggtgtgttgctaccaaaatctgctgttaagtttgagagatatctgatgggtgagattctatcgatcggtgctgaagtcagtgaagttgaggctgggaagaaggttctcttctcagacatcaatgcttatgaggtggagcttggtaccgatgatgagaagcactgcttctgccgtgagtcagacttgttagctgtagttgaatgaattttaccatgaaaatttcggacttacctgggaattatcttgcccccactttggtgtatgccatttgaacgttcgtgaattcagcttctagaggctcttgctcacgttggaacacgaaactgtgaaccgaatttgaaatgcttacattgctcgtctgacgtttgtgcttctgaac

SEQ ID NO: 48 - protein, 134 aa, Zea mays
MAPSLLAAMSTSPFLASSGSSRRPLGAAHTRRAGLRVAALKYDPAKVAPQNDRVLVRLEQIPEKSAGGVLLPKSAVKFERYLMGEILSIGAEVSEVEAGKKVLFSDINAYEVELGTDDEKHCFCRESDLLAVVE

SEQ ID NO: 49 - DNA, 405 bp, Zea mays
  CDS (1)..(405)
atggcgccctcactcctcgccgccatgtccacctcgcccttcctagccagcagcggcagcagccgcaggccgctaggcgctgcccacacccgacgggctggactgcgcgtggccgcgcttaagtacgaccctgccaaggtggcgccgcagaacgaccgggttctcgtccgtcttgagcagatccctgagaaatctgctggcggtgtgttgctaccaaaatctgctgttaagtttgagagatatctgatgggtgagattctatcgatcggtgctgaagtcagtgaagttaaggctgggaagaaggtttttttctcagacatcaatgcttatgaggtggagcttggtaccgatgatgagaagcactgcttttgccgtgagtcagacttgttagctgtagttgaatga

SEQ ID NO: 50 - protein, 134 aa, Zea mays
MAPSLLAAMSTSPFLASSGSSRRPLGAAHTRRAGLRVAALKYDPAKVAPQNDRVLVRLEQIPEKSAGGVLLPKSAVKFERYLMGEILSIGAEVSEVKAGKKVFFSDINAYEVELGTDDEKHCFCRESDLLAVVE

SEQ ID NO: 51 - DNA, 690 bp, Zea mays
  CDS (98)..(493)
gccggccgggtcgggacggcacgcgacgcaactatcctaagcccgtcgttctggaagtttccacgctccgcgcctccgccccctggtctccgctccaatggcgccctcactcctcgccgccatgtccacctcgcccttcctagccagcagccgcaggccgctaggtgctgcccacacccgacgggctggactgcgcgtggccgcgcttaagtacgaccctgccaaggtgacgccgcagaacgaccgggttctcgtccgtcttgagcagatccctgagaaatctgctggcggtgtgttgctaccaaaatctgctgttaagtttgagagatatctgatgggtgagattctatcgatcggtgctgaagtcagtgaagttgaggctgggaagaaggttctcttctcagacatcaatgcttatgaggtggagcttggtaccgatgatgagaagcactgcttctgccgtgagtcagacttgttagctgtagttgaatgaattttaccatgaaaatttcggacttacctgggaatgctccaacggcatgaacttatcttgcccccactttggtgtatgccatttgaacgttcgtgaattcagcttctagaggctcttgctcacgttggaacacgaaactgtgaaccgaatttgaaatgcttacattgctcatctgaaaaaaaaaaaaaggcccccta

SEQ ID NO: 52 - protein, 131 aa, Zea mays
MAPSLLAAMSTSPFLASSRRPLGAAHTRRAGLRVAALKYDPAKVTPQNDRVLVRLEQIPEKSAGGVLLPKSAVKFERYLMGEILSIGAEVSEVEAGKKVLFSDINAYEVELGTDDEKHCFCRESDLLAVVE

SEQ ID NO: 53 - DNA, 741 bp, Triticum aestivum
  CDS (120)..(539)
tgcgaaaggaaagcagataagacgagcctcccccatctccccgctgagcgaagcaaccgagcaaaaccctcctctttccctagaaccttccgggcgcatccaccagcatccacctcccaatggccccctccctcctcgccgccgccgcctcgcccttcctcatccacggcgccaccggaagcaccagccgcaggccggtcgccgccgtcgcccccggccgccgcgccgcatcctccgtgcgcatgcgcgccgccatcaagtgcgacccttccaaggtggaaccgcagtccgaccgggtgctcgtccgtcttgagactatcccagagaaatctgctgggggagtcctgctaccgaaatctgctgttaaattcgagagatatttgatgggcgagattttatcggtcggtgttgatgttagtgaagttgaagctggaaagaaggttctcttctcggacataaacgcttatgaggtggacctgggaacagaagagaagcactgcttctgccgagagtcggatctcttggctgtcgtcgcatgagcgtactcttaaattctagtgtggtgcacacatgctccaaatgccttatctcagttgcgcaagcttttgctagcatgaactctttcttttgatgatcatgggttgagtaattgatgagttttagacacaggtgcttcttttgttgccaaaagacggggcacggtgatttaattttactcatacccacgtgcattttccctcg

SEQ ID NO: 54 - protein, 139 aa, Triticum aestivum
MAPSLLAAAASPFLIHGATGSTSRRPVAAVAPGRRAASSVRMRAAIKCDPSKVEPQSDRVLVRLETIPEKSAGGVLLPKSAVKFERYLMGEILSVGVDVSEVEAGKKVLFSDINAYEVDLGTEEKHCFCRESDLLAVVA

SEQ ID NO: 55 - DNA, 661 bp, Gossypium hirsutum
  CDS (116)..(523)
cccacgcgtccgcccactcgtccgcccacgcgtccgcccacgcgtccgcccacgcgtgtagccaaacgctcccttactttgattctatcgtcgattcaaagcagctttcttatccatggcgtctacatttttggcactacccaaaaccttcacttcaaacaagcctaccttcccttctctttcaacccacaaacttctcgggactcgaagaaattcacttagaatcaatgctgtggccactaaatgggaacccaccaaggttgttcctcaagctgacagagttcttatccgtctccaagaattacctgagaaatcagctggtggagttttgttgcccaaatcagctgtcaagtttgagaggtacctgatgggggagatagtttcggtcggtgccgaagtaggaaacgtggaaactggaaagaaggttcttttctcggatataaatgcttatgaggtggatttgggaacagatactaggcatgtgttttgtaaagagagtgacttgttagctgaagttgattgaagttttttctggtcttttgttttaagatgaagagtcaattgtatttcagaatttagcggtttttatttgcaattataatgttcttcagctgctgctacatttatgttagtaacttattggagatgatatttaattgtt

SEQ ID NO: 56 - protein, 135 aa, Gossypium hirsutum
MASTFLALPKTFTSNKPTFPSLSTHKLLGTRRNSLRINAVATKWEPTKVVPQADRVLIRLQELPEKSAGGVLLPKSAVKFERYLMGEIVSVGAEVGNVETGKKVLFSDINAYEVDLGTDTRHVFCKESDLLAEVD

SEQ ID NO: 57 - DNA, 420 bp, Viridiplantae
  CDS (1)..(420)
atggcttccactttcgtctgctctctaccaaatcctttctttgcttttccggtcaaagcaactactccttcgacggctaactatacgcttctcggaagtcgaagaggttgtcttagaatcaaagcgatttccactaaatgggaaccgacaaaggttgttcctcaggcagacagagttcttgttcgtcttgaagatcttcctattaaatcctcaggtggagtattgttgcctaaagcagctgtgaagtttgagagatacctaacaggagagattatatctgttggttctgaggttggacaacaagttggacctggaaagagggttttgttctctgatgtgagcgcttatgaggtcgatttgggaaccgatgctaggcattgcttctgtaaagagagtgacttgttggccctcgttgagtga

SEQ ID NO: 58 - protein, 139 aa, Viridiplantae
MASTFVCSLPNPFFAFPVKATTPSTANYTLLGSRRGCLRIKAISTKWEPTKVVPQADRVLVRLEDLPIKSSGGVLLPKAAVKFERYLTGEIISVGSEVGQQVGPGKRVLFSDVSAYEVDLGTDARHCFCKESDLLALVE

SEQ ID NO: 59 - DNA, 411 bp, Oryza sativa Japonica Group
  CDS (1)..(411)
atggccccctccctcctcgccgccgccgcctcgcccttcctcctccacggcgccgccgccgccagtggcagccgcaggccgctcgtcgccgccgccgccaccggccgccgcgccgcctcctccctccgcgtcgccgccctcaagtacgacccttccaaggtggcgccgcagtccgaccgggtgctcgtccgcctcgaacagattcctgagaaatctgttggaggagtcctgctgccaaaatctgctgttaagtttgagaggtatttgatgggtgagattttgtctgttggtgctgatgttaatgaagttgaagctggaaagaaggttctcttctctgacataaatgcttatgaggtggacctgggtaccgatgagaagcactgcttctgcccttggagtaaaatattttga

SEQ ID NO: 60 - protein, 136 aa, Oryza sativa Japonica Group
MAPSLLAAAASPFLLHGAAAASGSRRPLVAAAATGRRAASSLRVAALKYDPSKVAPQSDRVLVRLEQIPEKSVGGVLLPKSAVKFERYLMGEILSVGADVNEVEAGKKVLFSDINAYEVDLGTDEKHCFCPWSKIF

SEQ ID NO: 61 - DNA, 363 bp, Deinococcus radiodurans R1
  CDS (1)..(363): transl_table=11
ttgaaggcgctgggcgggaaaaagctcgccggcacgactctccgccattccatctcactcacaggaggaccccacatgctgaaacctttaggcgaccgcgttctggttgaaattatcgaagaagccgagcagaagactgccggcggcctgtacgtccccgattccgccaaggaaaagagccagcgcggcaaagtcgttgccgtcggcacgggtaagaccctggacaacggcaccaaagtcgccatggaagtcaaggaaggcgacaccgtgtacttcgccaagtacggcggcaccgaagtcagcctcgaaggcaagaactacagcctgctgagcgagcgcgacctgctcgccattgtcgagtaa

SEQ ID NO: 62 - protein, 120 aa, Deinococcus radiodurans R1
MKALGGKKLAGTTLRHSISLTGGPHMLKPLGDRVLVEIIEEAEQKTAGGLYVPDSAKEKSQRGKVVAVGTGKTLDNGTKVAMEVKEGDTVYFAKYGGTEVSLEGKNYSLLSERDLLAIVE

SEQ ID NO: 63 - DNA, 420 bp, Arabidopsis thaliana
  CDS (1)..(420)
atggcttccactttcgtctgctctctaccaaatcctttctttgcttttccggtcaaagcaactactccttcgacggctaaccatacgcttctcggaagtcgaagaggttgtcttagaatcaaagcgatttccactaaatgggaaccgacaaaggttgttcctcaggcagacagagttcttgttcgtcttgaagatcttcctattaaatcctcaggtggagtattgttgcctaaagcagctgtgaagtttgagagatacctaacaggagagattatatctgttggttctgaggttggacaacaagttggacctggaaagagggttttgttctctgatgtgagcgcttatgaggtcgatttgggaaccgatgctaggcattgcttctgtaaagagagtgacttgttggccctcgttgagtga

SEQ ID NO: 64 - protein, 139 aa, Arabidopsis thaliana
MASTFVCSLPNPFFAFPVKATTPSTANHTLLGSRRGCLRIKAISTKWEPTKVVPQADRVLVRLEDLPIKSSGGVLLPKAAVKFERYLTGEIISVGSEVGQQVGPGKRVLFSDVSAYEVDLGTDARHCFCKESDLLALVE

SEQ ID NO: 65 - DNA, 321 bp, Bradyrhizobium japonicum USDA 110
  CDS (1)..(321): transl_table=11
atgtgtatgcatttccgcccgctgcacgaccgcgtgcttgtgcgccgcattgatgccgaggaaaagaccgccggcggcatcatcattcccgacaccgcaaaggagaagccgcaggaaggcgagatcatcgccgcgggctccggtggcagaaacgagcaaggccagttgatcccgatcgatgtcaagccgggagaccgcgttttgttcggcaaatggtcgggtactgaagtgaagatcgacggccaggactacttgatcatgaaggagagcgatcttctgggcgtggtcgacaagaccggctcggtcaagaaggccgcctga

SEQ ID NO: 66 - protein, 106 aa, Bradyrhizobium japonicum USDA 110
MCMHFRPLHDRVLVRRIDAEEKTAGGIIIPDTAKEKPQEGEIIAAGSGGRNEQGQLIPIDVKPGDRVLFGKWSGTEVKIDGQDYLIMKESDLLGVVDKTGSVKKAA

SEQ ID NO: 67 - DNA, 312 bp, Gloeobacter violaceus PCC 7421
  CDS (1)..(312): transl_table=11
atggcaacgatcacgttggctacgacgacactgcgccccctgggggaccgtgtgttggtcaaggtggtagagcaagaggagcggaccgccgggggtatttttctgcccgacaccgccaaagagaagccccagaccggtgaagtggtcgccgtggggccgggccgtctcaaagacgacggcacccgggtcgacccggaggtgaaggtgggcgacaccgtgctgtacggcaaatattccggcaccgacctgaaacttggcgacgccgagtacatgctggtggccgaaaaagacattctggcaatcgtggcttaa

SEQ ID NO: 68 - protein, 103 aa, Gloeobacter violaceus PCC 7421
MATITLATTTLRPLGDRVLVKVVEQEERTAGGIFLPDTAKEKPQTGEVVAVGPGRLKDDGTRVDPEVKVGDTVLYGKYSGTDLKLGDAEYMLVAEKDILAIVA

SEQ ID NO: 69 - DNA, 501 bp, Prochlorococcus marinus str. MIT 9303
  CDS (1)..(501): transl_table=11
atgcccttacagagcggcgcaacattaccactgcatggcgagatcttctcagggttcggtgacccgcacaggtatcgactagtcggcacagcatcaacacacatagggttggcactcaatggccacgagtgctactccaggtcgttatgcggtgcttcggcgccctgttcttgctctttcaatacacccatggcagctgtttctctcagcgtctccaccgttaagcctctcggagatcgcgtttttgtgaaagtctctgaatcagaggagaaaactgcgggcggcatccttttgcctgacaccgccaaggaaaagccccaggtgggcgaggtggttcaagttggccctggaaagcgcaatgacgatggttcccgccaggctcccgaagtgggagttggagacaaggttctttacagcaagtacgcaggtacagacatcaagctcagcacagatgagtacgtgctgttgtccgagaaggacatccttgctgtcgtcaactga

SEQ ID NO: 70 - protein, 166 aa, Prochlorococcus marinus str. MIT 9303
MPLQSGATLPLHGEIFSGFGDPHRYRLVGTASTHIGLALNGHECYSRSLCGASAPCSCSFNTPMAAVSLSVSTVKPLGDRVFVKVSESEEKTAGGILLPDTAKEKPQVGEVVQVGPGKRNDDGSRQAPEVGVGDKVLYSKYAGTDIKLSTDEYVLLSEKDILAVVN

SEQ ID NO: 71 - DNA, 315 bp, Bradyrhizobium sp. ORS278
  CDS (1)..(315): transl_table=11
atgcatttccgtccattgcacgaccgcgtgctcgtgcgccgtatcgatgccgaggagaagaccaagggcggcatcatcattcccgacaccgccaaggagaagccgcaggagggcgagatcgtcgccgccggtcccggcgcgcggaatgagcagggacaactcgtgccgctcgacgtcaagcccggcgaccgcgtgctgttcggcaagtggtcggggaccgaggtgaagatcgacggcaaggatctcctgatcatgaaggagagcgacctgctcggcatcgtcgacgcccccgtcgcggcgaagaaagccgcgtga

SEQ ID NO: 72 - protein, 104 aa, Bradyrhizobium sp. ORS278
MHFRPLHDRVLVRRIDAEEKTKGGIIIPDTAKEKPQEGEIVAAGPGARNEQGQLVPLDVKPGDRVLFGKWSGTEVKIDGKDLLIMKESDLLGIVDAPVAAKKAA

SEQ ID NO: 73 - DNA, 291 bp, Colwellia psychrerythraea 34H
  CDS (1)..(291): transl_table=11
atgagcattcgtccactacatgatcgtgtaattgttaaacgtaaaaaagttgaatcaaaatcagctggcggtattgtattaacaggcagcgcagcggaaaaatcaacacgtggtgaagttattgctgtaggtaatggccgtatcttagaaaatggtgaagtacgcccattagacgtaaaagttggcgatcaagttatctttagtgaaggttacggcgttaaaactgaaaaaattgatggcgaagaagtcttaattctttcagagtcagatattttagcgatcgttgagtag

SEQ ID NO: 74 - protein, 96 aa, Colwellia psychrerythraea 34H
MSIRPLHDRVIVKRKKVESKSAGGIVLTGSAAEKSTRGEVIAVGNGRILENGEVRPLDVKVGDQVIFSEGYGVKTEKIDGEEVLILSESDILAIVE

SEQ ID NO: 75 - DNA, 288 bp, Novosphingobium aromaticivorans DSM 12444
  CDS (1)..(288): transl_table=11
atgactttccgtccgctgcacgatcgcgtgctcgtacgccgcgtcgaagccgaggaaaagaccgccggcggcatcatcatccccgacagcgccaaggaaaagcctgccgagggcatcgtcgtcgccgttggttcgggcgcccgcgccgagaacggcacgatcaccccgctcgacgtgaaggccaatgatcgcgtgctgttcggcaagtggtccggcaccgaagtcaaggtcgacggtgaagacctgctcatcatgaaggaatcggacatcctcggcgtgatcggctga

SEQ ID NO: 76 - protein, 95 aa, Novosphingobium aromaticivorans DSM 12444
MTFRPLHDRVLVRRVEAEEKTAGGIIIPDSAKEKPAEGIVVAVGSGARAENGTITPLDVKANDRVLFGKWSGTEVKVDGEDLLIMKESDILGVIG

SEQ ID NO: 77 - DNA, 315 bp, Mesorhizobium sp. BNC1
  CDS (1)..(315): transl_table=11
atgaagttccgtcctttgcatgaccgcctgcttgtccgccgcatcgaggcggaggagaaaacggcgggaggggtgatcattcccgataccgcgaaggaaaaaccgcaggaaggcgaggtgctggcagtcggccctggcgtccgcgacgagaagggtgagctcatcgccctggaagtgaaggtcggagaccgcatccttttcggaaagtggtccggcacagaaatccgccttcaaggcgaggatctgctcatcatgaaggaaagcgacgtcctcggcattctcgacaaggaagccgaggtcaagaaggctgcttga

SEQ ID NO: 78 - protein, 104 aa, Mesorhizobium sp. BNC1
MKFRPLHDRLLVRRIEAEEKTAGGVIIPDTAKEKPQEGEVLAVGPGVRDEKGELIALEVKVGDRILFGKWSGTEIRLQGEDLLIMKESDVLGILDKEAEVKKAA

SEQ ID NO: 79 - DNA, 288 bp, Magnetospirillum magnetotacticum MS-1
  CDS (1)..(288): transl_table=11
atgaagttcagaccgctccatgatcgcgtgctggtgaagcgcctcgacgcggaagagaagaccgctggcggcatcatcatccccgacaccgccaaggaaaagcccatgcagggtgaagtcgtggccgtcggctccggcacccgtggcgatgacggcaagctggtcgctctcgacgtcaaggccggtgatcgcgtgctgttcggcaagtggtccggcaccgaggtcaagatcgacggcgtcgatctgctgatcatgaaggaatccgacattctcggcattctcgcctaa

SEQ ID NO: 80 - protein, 95 aa, Magnetospirillum magnetotacticum MS-1
MKFRPLHDRVLVKRLDAEEKTAGGIIIPDTAKEKPMQGEVVAVGSGTRGDDGKLVALDVKAGDRVLFGKWSGTEVKIDGVDLLIMKESDILGILA

SEQ ID NO: 81 - DNA, 288 bp, Roseovarius nubinhibens ISM
  CDS (1)..(288): transl_table=11
atggcatttaaaccgctgcatgaccgcgtgcttgttcgccgcgttgaaagcgaagagaaaacttctggcgggctgatcatccccgacagcgccaaggaaaaacccagcgaaggcgaagttgttgcttgtggcgacggcgcccgcaaagacagcggcgagctgatcgagatggctgtgaaagccggtgatcgcgtgctgttcggcaaatggtcgggcaccgagatcacgatcgacggcgaagagctgctgatcatgaaagagagcgacattctgggcgtaatggcctga

SEQ ID NO: 82 - protein, 95 aa, Roseovarius nubinhibens ISM
MAFKPLHDRVLVRRVESEEKTSGGLIIPDSAKEKPSEGEVVACGDGARKDSGELIEMAVKAGDRVLFGKWSGTEITIDGEELLIMKESDILGVMA

SEQ ID NO: 83 - DNA, 312 bp, Oceanicola batsensis HTCC2597
  CDS (1)..(312): transl_table=11
atggcattcaaaccgcttcatgaccgggttctggtcaagcgcgtcgagagcgaagagaaaaccgcgggcgggctgatcattcccgacagcgccaaggaaaagccggcggaaggtgaagtcgtggccgtgggcgagggcgcccgcaaggacaacggcgaactgatcgagatggccgtgaaagccggcgacaaggttctgttcggcaagtggtccggcaccgaagtcacgatcgacggtcaggaactcctgatcatgaaagagagcgacatcctcgggatcatcaccgacggcgcggcggcgaaagctgcctga

SEQ ID NO: 84 - protein, 103 aa, Oceanicola batsensis HTCC2597
MAFKPLHDRVLVKRVESEEKTAGGLIIPDSAKEKPAEGEVVAVGEGARKDNGELIEMAVKAGDKVLFGKWSGTEVTIDGQELLIMKESDILGIITDGAAAKAA

SEQ ID NO: 85 - DNA, 288 bp, Erythrobacter sp. SD-21
  CDS (1)..(288): transl_table=11
atggcatttcgtccgttgcacgaccgcgttctcgtgcgccgcatcgaagcagaagaaaagaccgccggcgggatcatcattcccgacagcgccaaggaaaagccgagcgaaggcgagatcgtcgctgttggttccggttccaaggccgaggacggcacggtcaccccgctcgacgtcaaggctggcgaccgcgtgctgttcggcaagtggtcgggcactgagatcaagctcgacggcgaagacctgctgatcatgaaggaaagcgacatcatggggatcatgggctga

SEQ ID NO: 86 - protein, 95 aa, Erythrobacter sp. SD-21
MAFRPLHDRVLVRRIEAEEKTAGGIIIPDSAKEKPSEGEIVAVGSGSKAEDGTVTPLDVKAGDRVLFGKWSGTEIKLDGEDLLIMKESDIMGIMG

SEQ ID NO: 87 - DNA, 420 bp, Brassica campestris
  CDS (1)..(420)
atggctacttccactttcgtctctctaccaaaacccttctttacttgtcctgttaaaaccaacactcctgcgctagctaaccataagcttctcgggagccgaagaggttgtctcagagtcaaagctgtttccaccaaatgggaaccgacaaaggttgttcctcaagcagacagggttcttgttcgacttgaagagcttgctcagacaacctcaggtggagtgttgttacctaaagcagctgttaagtttgagaggtacctaaccggagaggttgtctctgttggttctgaggttggacaacaagttggccctggaaacaaggttctgttctctgacgtgagcgcatacgaggtcgatttggggaccggtgctaggcattgcttttgcaaagagagcgacctgttggccctcgtggagtag

SEQ ID NO: 88 - protein, 139 aa, Brassica campestris
MATSTFVSLPKPFFTCPVKTNTPALANHKLLGSRRGCLRVKAVSTKWEPTKVVPQADRVLVRLEELAQTTSGGVLLPKAAVKFERYLTGEVVSVGSEVGQQVGPGNKVLFSDVSAYEVDLGTGARHCFCKESDLLALVE

SEQ ID NO: 89 - DNA, 420 bp, Brassica campestris
  CDS (1)..(420)
atggcttcttcaactttcgtctctctgccaaaacccttctttgcttttccggttaaaaccagttcccctcccctagctaaccataagcttctcggaagtcgaagaggctgtctgagtgtcaaagcgatttccactaaatgggaaccgacaaaggttgttcctcaagcagacagggttcttgttcgtcttgaagagcttgcacagacaacctcaggtggagtgttgttgcctaaagcagctgtgaagtttgagagatacttaaccggagaggttgtctctgttggttctgaggttggacaacaagttggccctggcaagaaggttctgttctctgacgtgagcgcttatgaggttgatttggggacgggtgctaggcattgcttttgtaaagagagcgacttgttggccctcgttgagtga

SEQ ID NO: 90 - protein, 139 aa, Brassica campestris
MASSTFVSLPKPFFAFPVKTSSPPLANHKLLGSRRGCLSVKAISTKWEPTKVVPQADRVLVRLEELAQTTSGGVLLPKAAVKFERYLTGEVVSVGSEVGQQVGPGKKVLFSDVSAYEVDLGTGARHCFCKESDLLALVE

SEQ ID NO: 91 - DNA, 459 bp, Oryza sativa subsp
  CDS (1)..(459)
atggccccctccctcctcgccgccgccgcctcgcccttcctcctccacggcgccgccgccgccagtggcagccgcaggccgctcgtcgccgccgccgccaccggccgccgcgccgcctcctccctccgcgtcgccgccctcaagtacgacccttccaaggtggcgccgcagtccgaccgggtgctcgtccgcctcgaacagattcctgagcgtgaatcgaaacatctaggtttaggtggaatgctgaaatctgttggaggagtcctgctgccaaaatctgctgttaagtttgagaggtatttgatgggtgagattttgtctgttggtgctgatgttaatgaagttgaagctggaaagaaggttctcttctctgacataaatgcttatgaggtggacctgggtaccgatgagaagcactgcttctgccgtgagtctgatctgttagccgttgttgaatga

SEQ ID NO: 92 - protein, 152 aa, Oryza sativa subsp
MAPSLLAAAASPFLLHGAAAASGSRRPLVAAAATGRRAASSLRVAALKYDPSKVAPQSDRVLVRLEQIPERESKHLGLGGMLKSVGGVLLPKSAVKFERYLMGEILSVGADVNEVEAGKKVLFSDINAYEVDLGTDEKHCFCRESDLLAVVE

SEQ ID NO: 93 - DNA, 444 bp, Oryza sativa subsp
  CDS (1)..(444)
atggccccctccctccttggccgccgccgcctcgcccttcctcctccacggcgccgccgccgccagtggcagccgcaggccgctcgtcgccgccgccgccaccggccgccgcgccgcctcctccctccgcgtcgccgccctcaagtggcgccgcagtccgaccgggtgctcgtccgcctcgaacagattcctgagcgtgaatcgaaacatctaggtttaggtggaatgctgaaatctgttggaggagtcctgctgccaaaatctgctgttaagtttgagaggtatttgatgggtgagattttgtctgttggtgctgatgttaatgaagttgaagctggaaagaaggttctcttctctgacataaatgcttatgaggtggacctgggtaccgatgagaagcactgcttctgccgtgagtctgatctgttagccgttgttgaatga

SEQ ID NO: 94 - protein, 147 aa, Oryza sativa subsp
MAPSLLGRRRLALPPPRRRRRQWQPQAARRRRRHRPPRRLLPPRRRPQVAPQSDRVLVRLEQIPERESKHLGLGGMLKSVGGVLLPKSAVKFERYLMGEILSVGADVNEVEAGKKVLFSDINAYEVDLGTDEKHCFCRESDLLAVVE

SEQ ID NO: 95 - DNA, 288 bp, Magnetospirillum gryphiswaldense
  CDS (1)..(288): transl_table=11
atgaagttccgcccgctccatgatcgtgtgctggtgaagcgccttgacgcggaagaaaagaccgctggtggcatcatcatccccgataccgccaaggaaaagcccatgcagggcgaagtgatcgccgttggctccggcgttcgcggcgaagacggcaagatcgtcgctctcgacgtcaaggccggtgaccgcatcctgttcggcaagtggtccggcaccgaagtcaagatcgacggcgaagacctgttgatcatgaaggaatccgacattctgggcattctggcctga

SEQ ID NO: 96 - protein, 95 aa, Magnetospirillum gryphiswaldense
MKFRPLHDRVLVKRLDAEEKTAGGIIIPDTAKEKPMQGEVIAVGSGVRGEDGKIVALDVKAGDRILFGKWSGTEVKIDGEDLLIMKESDILGILA

SEQ ID NO: 97 - DNA, 405 bp, Vitis vinifera
  CDS (1)..(405)
atggcatccactttcatcacactcgctagacccttctcgtctcacaagccccacactccttcccccagcaagagattactaggacttcgcagtagtgcactgaaaatcaacgcaatcgccaagaagtgggaacccacaaaggttgttccacaagctgatagagtcctgattcgtttgcaggacctacctgagaaatcatctggtggagttttgctgcccaaatctgctgttaaatttgagcgataccttatgggggagattctctctattggtgctgatgttggggaagttgaggctgggaagaaggttcttttctcagacataaatgcttatgaggtggatttgggaacagatggtagacactgcttttgcaaagaaagtgacctgttggctgtggttgagtag

SEQ ID NO: 98 - protein, 134 aa, Vitis vinifera
MASTFITLARPFSSHKPHTPSPSKRLLGLRSSALKINAIAKKWEPTKVVPQADRVLIRLQDLPEKSSGGVLLPKSAVKFERYLMGEILSIGADVGEVEAGKKVLFSDINAYEVDLGTDGRHCFCKESDLLAVVE

SEQ ID NO: 99 - DNA, 291 bp, Gluconobacter oxydans
  CDS (1)..(291): transl_table=11
atgacgaagtttcgtccccttcatgaccgcgtggtggtccgtcgcctgacgggcgaggagaagaccgccggcggcatcatcattcctgacaccgccaaggacaagccgaccgaaggcgaagtcgtttctgtcggcccgggtgcccgcaacgagcagggccaggttgtggctctggacgtcaaggctggtgacaaggtgctgttcggcaagtggtccggcaccgaggtcaagatcgacggcgaagagctgctgatcatgaaagagagcgacatcatgggtgtgatcggctga

SEQ ID NO: 100 - protein, 96 aa, Gluconobacter oxydans
MTKFRPLHDRVVVRRLTGEEKTAGGIIIPDTAKDKPTEGEVVSVGPGARNEQGQVVALDVKAGDKVLFGKWSGTEVKIDGEELLIMKESDIMGVIG

SEQ ID NO: 101 - DNA, 420 bp, Arabidopsis thaliana
  CDS (1)..(420)
atggcttccactttcgtctgctctctaccagatcctttctttgcttttccggtcaaagcaactactccttcgacggctaaccatacgcttctcggaagtcgaagaggttgtcttagaatcaaagcgatttccactaaatgggaaccgacaaaggttgttcctcaggcagacagagttcttgttcgtcttgaagatcttcctattaaatcctcaggtggagtattgttgcctaaagcagctgtgaagtttgagagatacctaacaggagagattatatctgttggttctgaggttggacaacaagttggacctggaaagagggttttgttctctgatgtgagcgcttatgaggtcgatttgggaaccgatgctaggcattgcttctgtaaagagagtgacttgttggccctcgttgagtga

SEQ ID NO: 102 - protein, 139 aa, Arabidopsis thaliana
MASTFVCSLPDPFFAFPVKATTPSTANHTLLGSRRGCLRIKAISTKWEPTKVVPQADRVLVRLEDLPIKSSGGVLLPKAAVKFERYLTGEIISVGSEVGQQVGPGKRVLFSDVSAYEVDLGTDARHCFCKESDLLALVE

SEQ ID NO: 103 - DNA, 315 bp, Bradyrhizobium japonicum
  CDS (1)..(315): transl_table=11
atgcatttccgcccgctgcacgaccgcgtgcttgtgcgccgcattgatgccgaggaaaagaccgccggcggcatcatcattcccgacaccgcaaaggagaagccgcaggaaggcgagatcatcgccgcgggctccggtggcagaaacgagcaaggccagttgatcccgatcgatgtcaagccgggagaccgcgttttgttcggcaaatggtcgggtactgaagtgaagatcgacggccaggactacttgatcatgaaggagagcgatcttctgggcgtggtcgacaagaccggctcggtcaagaaggccgcctga

SEQ ID NO: 104 - protein, 104 aa, Bradyrhizobium japonicum
MHFRPLHDRVLVRRIDAEEKTAGGIIIPDTAKEKPQEGEIIAAGSGGRNEQGQLIPIDVKPGDRVLFGKWSGTEVKIDGQDYLIMKESDLLGVVDKTGSVKKAA

SEQ ID NO: 105 - DNA, 297 bp, Rhizobium meliloti
  CDS (1)..(297): transl_table=11
atggcaagcaccaatttccgtccgctgcacgaccgcgttgtcgtccgccgcgtcgagtctgaagaaaagaccaagggcggcatcatcattccggacaccgctaaggaaaagccgcaggaaggcgaaatcgtggctgtcggttcgggtgcccgtgacgaaagcggcaaggttgttccgctcgacgtgaaggctggcgaccgcatcctgttcggcaagtggtccggcaccgaagtcaagatcaacggcgaagaccttctgatcatgaaggaagccgacatcatgggtgtcatcggctga

SEQ ID NO: 106 - protein, 98 aa, Rhizobium meliloti
MASTNFRPLHDRVVVRRVESEEKTKGGIIIPDTAKEKPQEGEIVAVGSGARDESGKVVPLDVKAGDRILFGKWSGTEVKINGEDLLIMKEADIMGVIG

SEQ ID NO: 107 - DNA, 288 bp, Rhodobacter sphaeroides
  CDS (1)..(288): transl_table=11
atggctttcaaaccgctgcatgaccgtgtgctggtccgccgcgtccagagcgacgaaaagaccaagggcggtctgatcatccccgataccgccaaggaaaaaccggctgaaggcgaagtcgtgtcctgcggcgaaggcgcccgcaaggattcgggcgagctcatcgccatgtcggtgaaggcgggcgaccgcgtgctgttcggcaaatggtcgggcaccgaagtcaccatcgacggtgccgagctgctcatcatgaaggaaagcgacatcctggggatcctcagctga

SEQ ID NO: 108 - protein, 95 aa, Rhodobacter sphaeroides
MAFKPLHDRVLVRRVQSDEKTKGGLIIPDTAKEKPAEGEVVSCGEGARKDSGELIAMSVKAGDRVLFGKWSGTEVTIDGAELLIMKESDILGILS

SEQ ID NO: 109 - DNA, 297 bp, Rhizobium meliloti
  CDS (1)..(297): transl_table=11
atggcaagcaccgatttccgtccgctgcacgaccgcgttgtcgtccgccgcgtcgagtctgaagaaaagaccaagggcggcgtcatcattccggacaccgctaaggaaaagccgcaggaaggcgaaatcgtggctgtcggttcgggtgcccgtgacgaaagcggcaaggttgttccgctcgacgtgaaggctggcgaccgcatcctgttcggcaagtggtccggcaccgaagtcaagatcaacggcgaagaccttctgatcatgaaggaagccgacatcatgggtgtcatcggctga

SEQ ID NO: 110 - protein, 98 aa, Rhizobium meliloti
MASTDFRPLHDRVVVRRVESEEKTKGGVIIPDTAKEKPQEGEIVAVGSGARDESGKVVPLDVKAGDRILFGKWSGTEVKINGEDLLIMKEADIMGVIG

SEQ ID NO: 111 - DNA, 297 bp, Agrobacterium tumefaciens
  CDS (1)..(297): transl_table=11
atgacaagcaccaatttccgtccgcttcatgatcgcgtcgtcgttcgtcgcgttgagtccgaagcaaagaccaagggcggcatcatcattcccgataccgccaaggaaaagccgcaggaaggcgaaatcgtcgccgtcggttccggcgcgcgcgatgaggccggcaaggtcgtcgctctcgacgtcaaggttggcgatcgcgttctgttcggcaagtggtcgggcactgaagtcaagctcgacggcgaagaccttctgatcatgaaggaagccgacatcatgggtatcatcggctga

SEQ ID NO: 112 - protein, 98 aa, Agrobacterium tumefaciens
MTSTNFRPLHDRVVVRRVESEAKTKGGIIIPDTAKEKPQEGEIVAVGSGARDEAGKVVALDVKVGDRVLFGKWSGTEVKLDGEDLLIMKEADIMGIIG

SEQ ID NO: 113 - DNA, 297 bp, Brucella abortus
  CDS (1)..(297): transl_table=11
atggctgatatcaagttccgcccgcttcatgaccgcgtcgtcgttcgccgcgtcgaatcggaagccaagactgccggcggcatcatcatccctgacactgccaaggaaaagccgcaggaaggcgaagtcgttgcagccggtgctggcgctcgtgacgaagctggcaagctggttccgctggatgtcaaggctggcgaccgcgttctgttcggcaagtggtcgggcaccgaagtcaagatcggcggcgaagacctgctgatcatgaaggaatccgacattctgggtattgtcggctaa

SEQ ID NO: 114 - protein, 98 aa, Brucella abortus
MADIKFRPLHDRVVVRRVESEAKTAGGIIIPDTAKEKPQEGEVVAAGAGARDEAGKLVPLDVKAGDRVLFGKWSGTEVKIGGEDLLIMKESDILGIVG

SEQ ID NO: 115 - DNA, 288 bp, Paracoccus denitrificans
  CDS (1)..(288): transl_table=11
atggctttcaaaccgctgcatgaccgtgttctggtccgtcgcgtccagtcggacgaaaagaccaagggcgggctgatcatccccgacagcgccaaggagaaaccggccgagggcgaaatcacgtccgttggcgaaggcgcgcgcaaggattctggcgaactgatcgcgcccgcggtcaaggccggcgaccgggtgctcttcggcaaatggtcgggcaccgaggtcacggtcgacggcgaagagctgctgatcatgaaggaaagcgacatcctgggcatcatcgcctga

SEQ ID NO: 116 - protein, 95 aa, Paracoccus denitrificans
MAFKPLHDRVLVRRVQSDEKTKGGLIIPDSAKEKPAEGEITSVGEGARKDSGELIAPAVKAGDRVLFGKWSGTEVTVDGEELLIMKESDILGIIA

SEQ ID NO: 117 - DNA, 288 bp, Rhodopseudomonas palustris
  CDS (1)..(288): transl_table=11
atggctttcaaaccgctgcatgaccgtgtgctggtccgccgcgtccagagcgacgaaaagaccaagggcggtctgatcatccccgacaccgccaaggaaaagccggcggaaggcgaagtcgtggcctgcggcgaaggcgcccgcaaggactcgggcgagctgatcgccatgtcggtgaaggcgggcgaccgcgtgctgttcggcaaatggtcgggcaccgaggtcaccatcgacggtgcggaactgctcatcatgaaggaaagcgacatcctcggcatcctcagctga

SEQ ID NO: 118 - protein, 95 aa, Rhodopseudomonas palustris
MAFKPLHDRVLVRRVQSDEKTKGGLIIPDTAKEKPAEGEVVACGEGARKDSGELIAMSVKAGDRVLFGKWSGTEVTIDGAELLIMKESDILGILS

SEQ ID NO: 119 - DNA, 288 bp, Zymomonas mobilis
  CDS (1)..(288): transl_table=11
atgaattttcgtccgctacatgatcgagttttagtccgtcgcgttgctgctgaagaaaagacagctggcggtatcattatccctgatacagccaaagaaaagccgcaggaaggtgaagttatcgcagctggtaacggaacccatagcgaagacggtaaagtcgttcctttggacgtcaaagctggtgatcgggttctgtttggcaaatggtcaggcaccgaagttcgcgttgatggtgaagacctcctcatcatgaaggaaagcgatattcttggcattatcagctaa

SEQ ID NO: 120 - protein, 95 aa, Zymomonas mobilis
MNFRPLHDRVLVRRVAAEEKTAGGIIIPDTAKEKPQEGEVIAAGNGTHSEDGKVVPLDVKAGDRVLFGKWSGTEVRVDGEDLLIMKESDILGIIS

SEQ ID NO: 121 - DNA, 423 bp, Oryza sativa
  CDS (1)..(423)
atggccccctccctcctcgccgccgccgcctcgcccttcctcctccacggcgccgccgccgccagtggcagccgcaggccgctcgtcgccgccgccgccaccggccgccgcgccgcctcctccctccgcgtcgccgccctcaagtacgacccttccaaggtggcgccgcagtccgaccgggtgctcgtccgcctcgaacagattcctgagaaatctgttggaggagtcctgctgccaaaatctgctgttaagtttgagaggtatttgatgggtgagattttgtctgttggtgctgatgttaatgaagttgaagctggaaagaaggttctcttctctgacataaatgcttatgaggtggacctgggtaccgatgagaagcactgcttctgccgtgagtctgatctgttagccgttgttgaatga

SEQ ID NO: 122 - protein, 140 aa, Oryza sativa
MAPSLLAAAASPFLLHGAAAASGSRRPLVAAAATGRRAASSLRVAALKYDPSKVAPQSDRVLVRLEQIPEKSVGGVLLPKSAVKFERYLMGEILSVGADVNEVEAGKKVLFSDINAYEVDLGTDEKHCFCRESDLLAVVE

SEQ ID NO: 123 - DNA, 420 bp, Brassica napus
  CDS (1)..(420)
atggctacttccactttcgtctctctaccaaaacccttcttcgcttttccggttaaaaccaacactcctcccctagctaaccataagcttctcggaagccgaagaggttgtctgagagtcaaagcgatttccactaaatgggaaccgacaaaggttgttcctcaagcagacagggttcttgttcgccttgaagagcttgctcagacaacctcaggtggagtgttgttgcctaaagcagctgttaagtttgagagatacttaaccggagaggttgtctctgttggttctgaggttggacaacaagttggccctggaaagaaggttctgttctctgacgtgagcgcttatgaggtcgatttggggacgggtgctaggcattgcttttgtaaagagagcgacttgttggccctcgtggagtaa

SEQ ID NO: 124 - protein, 139 aa, Brassica napus
MATSTFVSLPKPFFAFPVKTNTPPLANHKLLGSRRGCLRVKAISTKWEPTKVVPQADRVLVRLEELAQTTSGGVLLPKAAVKFERYLTGEVVSVGSEVGQQVGPGKKVLFSDVSAYEVDLGTGARHCFCKESDLLALVE

SEQ ID NO: 125 - DNA, 420 bp, Brassica napus
  CDS (1)..(420)
atggctacttccactttcgtctctctaccaaaacccttcttcgcttttccggtgaaaaccaacactcctgctctggctaaccacaagcttctcggaagccgaagaggttgtctcagagtcaaagcgatttcaactaaatgggaaccgacaaaggttgttcctcaagcagacagggttcttgttcgccttgaagaggttgctcagacaacctcaggtggagtgttgttgcctaaagcagctgttaagtttgagagatacttaaccggagaggttgtctctgttggttctgaggttggacaacaagttggccctggaaagaaggttctgttctctgacgtgagcgcttatgaggtcgatttggggacgggtgctaggcattgcttttgtaaagagagcgacttgttggccctcgtggagtga

SEQ ID NO: 126 - protein, 139 aa, Brassica napus
MATSTFVSLPKPFFAFPVKTNTPALANHKLLGSRRGCLRVKAISTKWEPTKVVPQADRVLVRLEEVAQTTSGGVLLPKAAVKFERYLTGEVVSVGSEVGQQVGPGKKVLFSDVSAYEVDLGTGARHCFCKESDLLALVE

SEQ ID NO: 127 - DNA, 408 bp, Zea mays
  CDS (1)..(408)
atggcgccctccctcctggccgccgtctccgcctcgcccttcctcctacccggcagcagcggcatcagccgcaggccactgggcgctgccccaacccgccgggccggactgcgcgtggccgcgcttaagtacgaccctgctaaggtggcaccgcagaacgaccgggtgctcgtccgtcttcagcagatccctgagaaatctgctggtggtgtattgctaccgaaatctgctgttaagtttgagaggtatctgatgggtgagattctatcggttggtgctgatgttagtgaagttgaggctgggaagaaggttctcttctcagacatcaatgcttacgaggtggaccttgatacggatgagaagcactgcttctgccgggagtcagatttgttagctgtagttgaatga

SEQ ID NO: 128 - protein, 135 aa, Zea mays
MAPSLLAAVSASPFLLPGSSGISRRPLGAAPTRRAGLRVAALKYDPAKVAPQNDRVLVRLQQIPEKSAGGVLLPKSAVKFERYLMGEILSVGADVSEVEAGKKVLFSDINAYEVDLDTDEKHCFCRESDLLAVVE

SEQ ID NO: 129 - DNA, 408 bp, Zea mays
  CDS (1)..(408)
atggcgccctccctcctggccgccgtctccgcctcgcccttcctcctacccggcagcaacggcatcagccgcaggccactgggcgctgccccaacccgccgggccggactgcgcgtggccgcgcttaagtacgaccctgctaaggtggcaccgcagaacgaccgggtgctcgtccgtcttcagcagatccctgagaaatctgctggtggtgtattgctaccgaaatctgctgttaagtttgagaggtatctgatgggtgagattctatcggttggtgctgatgttagtgaagttgaggctgggaagaaggttctcttctcagacatcaatgcttacgaggtggaccttgatacggatgagaagcactgcttctgccgggagtcagatttgttagctgtagttgaatga

SEQ ID NO: 130 - protein, 135 aa, Zea mays
MAPSLLAAVSASPFLLPGSNGISRRPLGAAPTRRAGLRVAALKYDPAKVAPQNDRVLVRLQQIPEKSAGGVLLPKSAVKFERYLMGEILSVGADVSEVEAGKKVLFSDINAYEVDLDTDEKHCFCRESDLLAVVE

SEQ ID NO: 131 - DNA, 20 bp, Artificial sequence
  primer
atggcttcgagtttcattac

SEQ ID NO: 132 - DNA, 22 bp, Artificial sequence
  primer
tcactggacgatagctaacaag

SEQ ID NO: 133 - protein, 103 aa, Artificial sequence
  consensus sequence
  Variant (2)..(3): Xaa in position 2 to 3 is any amino acid
  Variant (10)..(15): Xaa in position 10 to 15 is any amino acid
  Variant (16)..(27): Xaa in position 16 to 27 is any or no amino acid
  Variant (29)..(30): Xaa in position 29 to 30 is any amino acid
  Variant (33)..(35): Xaa in position 33 to 35 is any amino acid
  Variant (37)..(38): Xaa in position 37 to 38 is any amino acid
  Variant (40)..(40): Xaa in position 40 is any amino acid
  Variant (41)..(42): Xaa in position 41 to 42 is any or no amino acid
  Variant (44)..(47): Xaa in position 44 to 47 is any amino acid
  Variant (50)..(53): Xaa in position 50 to 53 is any amino acid
  Variant (55)..(59): Xaa in position 55 to 59 is any amino acid
  Variant (60)..(68): Xaa in position 60 to 68 is any or no amino acid
  Variant (70)..(71): Xaa in position 70 to 71 is any amino acid
  Variant (73)..(74): Xaa in position 73 to 74 is any amino acid
  Variant (78)..(83): Xaa in position 78 to 83 is any amino acid
  Variant (86)..(96): Xaa in position 86 to 96 is any amino acid
  Variant (97)..(98): Xaa in position 97 to 98 is any or no amino acid
  Variant (102)..(102): Xaa in position 102 is any amino acid
PXXDRVLVRXXXXXXXXXXXXXXXXXXKXXGGXXXPXXAXXXEXXXXGEXXXXGXXXXXXXXXXXXXXVXXGXXVLFXXXXXXEVXXXXXXXXXXXXXESDXL

SEQ ID NO: 134 - protein, 20 aa, Artificial sequence
  protein pattern
  Variant (2)..(5): Xaa in position 2 to 5 is any or no amino acid
  Variant (9)..(9): Xaa in position 9 is Gly, Ser or Thr
  Variant (10)..(10): Xaa in position 10 is Asp or Lys
  Variant (11)..(11): Xaa in position 11 is any amino acid
  Variant (12)..(12): Xaa in position 12 is Asp, Asn or Ser
  Variant (13)..(13): Xaa in position 13 is Ala or Gly
  Variant (14)..(14): Xaa in position 14 is any amino acid
  Variant (16)..(16): Xaa in position 16 is Ile or Val
  Variant (17)..(17): Xaa in position 17 is any amino acid
  Variant (18)..(18): Xaa in position 18 is Phe, Ile, Leu or Val
  Variant (19)..(19): Xaa in position 19 is Asp or Gly
  Variant (20)..(20): Xaa in position 20 is Gly or Thr
KXXXXVLFXXXXXXEXXXXX

SEQ ID NO: 135 - protein, 9 aa, Artificial sequence
  protein pattern
  Variant (2)..(3): Xaa in position 2 to 3 is any amino acid
  Variant (8)..(8): Xaa in position 8 is Ile or Val
  Variant (9)..(9): Xaa in position 9 is Lys or Arg
PXXDRVLXX

SEQ ID NO: 136 - protein, 12 aa, Artificial sequence
  protein pattern
  Variant (2)..(2): Xaa in position 2 is Ser or Thr
  Variant (3)..(3): Xaa in position 3 is any amino acid
  Variant (6)..(6): Xaa in position 6 is Ile, Leu or Val
  Variant (7)..(8): Xaa in position 7 to 8 is Ile or Leu
  Variant (10)..(10): Xaa in position 10 is Asp or Lys
  Variant (11)..(11): Xaa in position 11 is Ala, Ser or Thr
KXXGGXXXPXXA

SEQ ID NO: 137 - DNA, 390 bp, Azotobacter vinelandii
  CDS (1)..(390): transl_table=11
atggcaaaacctgctgctcgtcctcgtaagaaagtcaagaagaccgtggtggatggcatcgcccatatccatgcgtccttcaacaacaccatcgtgaccatcaccgaccgccagggtaatgccctttcctgggccacctccggtggctccggcttccgtggctcgcgcaagagtactccgttcgccgcccaggtggctgccgagcgtgccggtcaagccgctttggaatatggactgaagaacctcgacgtgaacgtcaagggacctggcccgggtcgcgagtccgctgtccgtgccctcaatgcctgcggttacaagattgccagcatcaccgatgtgaccccgatcccgcacaatggctgccgtccgccgaagaagcgtcgcgtgtaa

SEQ ID NO: 138 - protein, 129 aa, Azotobacter vinelandii
MAKPAARPRKKVKKTVVDGIAHIHASFNNTIVTITDRQGNALSWATSGGSGFRGSRKSTPFAAQVAAERAGQAALEYGLKNLDVNVKGPGPGRESAVRALNACGYKIASITDVTPIPHNGCRPPKKRRV

SEQ ID NO: 139 - DNA, 390 bp, Yersinia pestis
  CDS (1)..(390): transl_table=11
atggcaaaggcacctattcgtgcacgtaagcgtgtaagaaagacagtctctgacggtgtggctcatatccatgcttctttcaacaacaccatcgttaccattactgatcgtcagggtaacgcattgggttgggcaacagcaggtggttccggtttccgtggttctcgtaagtctactccgtttgcagcgcaagttgcagcagagcgctgcgctgaagcagtgaaagaatacggtatcaagaatctggaagttatggttaaaggacctggtccgggccgtgagtctactatccgtgcgttaaacgcggctggttttcgcatcactaatattactgatgtgactccgatccctcataacggttgtcgtccgccgaaaaagcgccgcgtataa

SEQ ID NO: 140 - protein, 129 aa, Yersinia pestis
MAKAPIRARKRVRKTVSDGVAHIHASFNNTIVTITDRQGNALGWATAGGSGFRGSRKSTPFAAQVAAERCAEAVKEYGIKNLEVMVKGPGPGRESTIRALNAAGFRITNITDVTPIPHNGCRPPKKRRV

SEQ ID NO: 141 - DNA, 456 bp, Aedes aegypti
  CDS (1)..(456)
atggctccccgtaagaacaaaaccgtaaaggaagaggtgcaggtctcgctcggtccccaggtccgcgagggtgagatcgtcttcggagtggctcacatctacgccagcttcaacgacaccttcgtccatgtcacggatctgtccggcaaggaaaccatctcccgcgtcaccggaggaatgaaggtcaaggccgatcgtgacgaggcttcgccctacgccgctatgttggccgctcaggacgtcgccgagaagtgcaagtccctgggaatcaccgccctgcacatcaagctgcgcgccaccggtggtaaccgcaccaagaccccgggacccggtgcccagtccgccctgcgcgctctggcccgttcgtcgatgaagattggccgcatcgaggacgtgaccccaatcccatcggattccacccgccggaagggaggtcgccgcggtcgtcgtctgtaa

SEQ ID NO: 142 - protein, 151 aa, Aedes aegypti
MAPRKNKTVKEEVQVSLGPQVREGEIVFGVAHIYASFNDTFVHVTDLSGKETISRVTGGMKVKADRDEASPYAAMLAAQDVAEKCKSLGITALHIKLRATGGNRTKTPGPGAQSALRALARSSMKIGRIEDVTPIPSDSTRRKGGRRGRRL

SEQ ID NO: 143 - DNA, 588 bp, Aedes aegypti
  CDS (1)..(588)
atgttcctgagacctctggagatgctgtccaacgtgctgcgggtggcttccaagcgaaccatccatcagagcgcggctttgctcaaggtggaagaccgcaaggccatgctcgcttcgcttcccggcaaggacgaaggaacgattggcgaacgcgctgtggacatcgattccctgattaccaaaaaagagcgtatctttcccgatgccaacacgccgaccaccctatttaacgggatacccttcaacgagattccgatctgtaacattagggtgtcgccaaataacaccatcatcacgatatgcgacgccaaggggacgccccagttcatccgctcttgcggcatcgaagggttcaagaatacccgcaaaggaacgaacattgccgctcaagccactgccatcagtatctgctcgaaagcgatcgaacgtgggtacaagcaagtacgggttacggtacgggggttgggtccgggacgaatgtctgctatcaaaggtttagaaatggccggtatgaatatcgtttcaattacagatacgactcctgtgtcgtggaacccaccgcggccccggaagcaacgcaagctgtag

SEQ ID NO: 144 - protein, 195 aa, Aedes aegypti
MFLRPLEMLSNVLRVASKRTIHQSAALLKVEDRKAMLASLPGKDEGTIGERAVDIDSLITKKERIFPDANTPTTLFNGIPFNEIPICNIRVSPNNTIITICDAKGTPQFIRSCGIEGFKNTRKGTNIAAQATAISICSKAIERGYKQVRVTVRGLGPGRMSAIKGLEMAGMNIVSITDTTPVSWNPPRPRKQRKL

SEQ ID NO: 145 - DNA, 417 bp, Ipomoea purpurea
  CDS (1)..(417)
atggcaaaagctataccgagaagaagttcgcgtaggaatggacgtattggttcacgtaagagtgcacgtagaataccaaagggagttattcatgttcaagctagtttcaataataccattgtcactgttacagatgtacggggtcgggtagtttcttggtcctccgccggtacttctggattcaagggaacgagaagagggacaccttttgctgctgaaaccgcggcatcaaatgctatccgtacagtagttgatcggggtatgctacgagcagaagtcatgataaagggtcccggtctcggaagagacgcagcattacgcgctattcttcaaagtggtatactattaactttcgtacgggatgtaacccctatgccacacaatggctgtagacctccgaaaaaaagacgtgtgtag

SEQ ID NO: 146 - protein, 138 aa, Ipomoea purpurea
MAKAIPRRSSRRNGRIGSRKSARRIPKGVIHVQASFNNTIVTVTDVRGRVVSWSSAGTSGFKGTRRGTPFAAETAASNAIRTVVDRGMLRAEVMIKGPGLGRDAALRAILQSGILLTFVRDVTPMPHNGCRPPKKRRV

SEQ ID NO: 147 - DNA, 393 bp, Prochlorococcus marinus str. MIT 9215
  CDS (1)..(393): transl_table=11
atggcagctacagtaaaaaaaacaggttcaaagaaatctaaacgtaatgtacctaatggtgtggtacacattcaaagcacatttaataatactatcgtctcaatatctgacacatctggtcatgtaatttcttggtcttctgcaggtgcaagtggatttaaaggcgctcgtaaaggtacgccatttgccgctcaaactgctgctgaagccgcagcaagaagagcacttgatcaaggtatgagacaaatagaagtactagtgagagggccaggcgcaggtagggaaacggccataagagctttacaagtggccggattagaaataactctaataagagatgtaactccattacctcataatggatgtagaagacctaaacggagacgcgtctag

SEQ ID NO: 148 - protein, 130 aa, Prochlorococcus marinus str. MIT 9215
MAATVKKTGSKKSKRNVPNGVVHIQSTFNNTIVSISDTSGHVISWSSAGASGFKGARKGTPFAAQTAAEAAARRALDQGMRQIEVLVRGPGAGRETAIRALQVAGLEITLIRDVTPLPHNGCRRPKRRRV

SEQ ID NO: 149 - DNA, 384 bp, Rickettsia akari str. Hartford
  CDS (1)..(384): transl_table=11
atgaatcagacggttaaagttaagaaaaagaaaaaaactatcactcttggtgttgtgcatatccgagcatcgtttaataatactatagtaacatttactgatatccaaggtaatactatttcttctgcatcggcaggaggtaatgggtttaaaggggcaagaaaagcaacaccttacgcagctcaagtgacaattgatagagcatcggcaaaggcaaaagaacatgggctcaaaactatttctattaggattggaggaccgggagctcagcgtgaatcagcaatgagagctttgttcgggcaaaattttgttgttacgtcaattttagatgtatcgtcaattgctcataatggagtaagaccgccgaaaagaagaagagtataa

SEQ ID NO: 150 - protein, 127 aa, Rickettsia akari str. Hartford
MNQTVKVKKKKKTITLGVVHIRASFNNTIVTFTDIQGNTISSASAGGNGFKGARKATPYAAQVTIDRASAKAKEHGLKTISIRIGGPGAQRESAMRALFGQNFVVTSILDVSSIAHNGVRPPKRRRV

SEQ ID NO: 151 - DNA, 456 bp, Bombyx mori
  CDS (1)..(456)
atggccccgagaaaaaacaaagttgctaaggaggaggtccaggtgaccctcgggccccagcatttagtgggcgaaacagtgtttggtgtagcacacattttcgcttcattcaatgacacattcgttcatgttactgatttatccggccgggaaactatcgcccgtgtcactggtggcatgaaggtgaaggctggccgtgatgaagcgtcaccctacgctgctatgttggcggcacaggatgtagcagagaaatgcaaaactcttggcataacggccttgcacataaagctccgtgctactggtggaaacaaaacaaagacccctggtcctggtgctcagtctgcacttcgggctcttgctcgttcaagtatgaagattggccgcattgaagatgtcacccccgtaccatcagactcgacccgtaggaagggtggccgaagaggacgcaggctgtaa

SEQ ID NO: 152 - protein, 151 aa, Bombyx mori
MAPRKNKVAKEEVQVTLGPQHLVGETVFGVAHIFASFNDTFVHVTDLSGRETIARVTGGMKVKAGRDEASPYAAMLAAQDVAEKCKTLGITALHIKLRATGGNKTKTPGPGAQSALRALARSSMKIGRIEDVTPVPSDSTRRKGGRRGRRL

SEQ ID NO: 153 - DNA, 453 bp, Oryza sativa (japonica cultivar-group)
  CDS (1)..(453)
atgtcgaagaggaagaccagggagcccaaggaggagaacgtcactcttggacccactgtccgtgaaggagagtatgtgttcggagttgcccacatcttcgcatccttcaatgacactttcattcatgtcactgacttgtctggaagggaaactcttgttcgcattactggtggcatgaaggtcaaagctgaccgtgatgagtcatcaccatatgcagctatgcttgcttctcaagatgttgcacagcgttgcaaggagcttggtattactgctctgcacatcaagcttcgtgccactggaggcaacaagacaaagacacctggtcctggtgctcaatctgctcttagggctcttgctcgctctggcatgaagattggtcgcattgaggatgtgaccccggttcccacggacagcacccgcagaaagggaggtaggagaggaaggaggctgtag

SEQ ID NO: 154 - protein, 150 aa, Oryza sativa (japonica cultivar-group)
MSKRKTREPKEENVTLGPTVREGEYVFGVAHIFASFNDTFIHVTDLSGRETLVRITGGMKVKADRDESSPYAAMLASQDVAQRCKELGITALHIKLRATGGNKTKTPGPGAQSALRALARSGMKIGRIEDVTPVPTDSTRRKGGRRGRRL

SEQ ID NO: 155 - DNA, 456 bp, Oryza sativa (japonica cultivar-group)
  CDS (1)..(456)
atgtccgggaggaagaagacacgggagcccaaggaggagaacgtcaccctcggcccgaccgtgcgcgagggcgagtacgtcttcggcgtcgcccacatcttcgcctccttcaacgacaccttcatccatgtcaccgatctgtccgggagggagacgctcgtccgcatcactggtggcatgaaggttaaagctgatcgcgacgaatcttccccttatgctgctatgcttgcttcacaggatgttgctcaaagatgcaaggagcttggaataactgctttgcatatcaagctccgtgctactggtggtaacaagacaaaaacccctggtcctggtgctcagtccgcacttagagcacttgctcgatctggcatgaagattggtcgtattgaggatgttactccagtgccgactgatagcacacgcagaaagggtggtagaaggggtaggaggctgtaa

SEQ ID NO: 156 - protein, 151 aa, Oryza sativa (japonica cultivar-group)
MSGRKKTREPKEENVTLGPTVREGEYVFGVAHIFASFNDTFIHVTDLSGRETLVRITGGMKVKADRDESSPYAAMLASQDVAQRCKELGITALHIKLRATGGNKTKTPGPGAQSALRALARSGMKIGRIEDVTPVPTDSTRRKGGRRGRRL

SEQ ID NO: 157 - DNA, 366 bp, Mycoplasma genitalium G37
  CDS (1)..(366): transl_table=4
atggctaagaaaaaaaagattaatgttcccagtggtttgatccatgtctcctgttcacctaacaataccatagtatcagccactgatcccagtggtaatgtcttgtgctgagcgagcagtggtacagtaggattcaaaggttttagaaagaaaaccccttactcagcaggggtagcagctgataaggtggctaaaactgtgaaagagatgggaatggggagtgttaagatgtatctgaagggaacaggtagaggaaaagacaccacgattagaagctttgctaatgctgggattacgatcacagaaatcaatgaaaaaacccctattccccacaatggctgcaagcctcctaagcgtccgcgctaa

SEQ ID NO: 158 - protein, 121 aa, Mycoplasma genitalium G37
MAKKKKINVPSGLIHVSCSPNNTIVSATDPSGNVLCWASSGTVGFKGFRKKTPYSAGVAADKVAKTVKEMGMGSVKMYLKGTGRGKDTTIRSFANAGITITEINEKTPIPHNGCKPPKRPR

SEQ ID NO: 159 - DNA, 408 bp, Sulfolobus tokodaii str. 7
  CDS (1)..(408): transl_table=11
gtgaagaaaatgtccagcaggcgtgaaattaggtggggtatagctagagtttatgcatctcagaacaatacattaataactataacagatattactggtgctgagataatctctagagcttctggtggtatggtagttaaagcggacagagaaaaaccatcgccttacgctgctatgttagctgcaaataaagccgctacggaagcatttgataagggaatatctgcaatacatataaaagttagagcacaaggcggttacggttctaaaacacctggtcctggtgcgcaaccagctataagagctttagcaagagctggttttattattggtaggattgaagatgttacaccaatacctcatgacagtattaggaggccaggaggcagaagaggaagaagagtctga

SEQ ID NO: 160 - protein, 135 aa, Sulfolobus tokodaii str. 7
MKKMSSRREIRWGIARVYASQNNTLITITDITGAEIISRASGGMVVKADREKPSPYAAMLAANKAATEAFDKGISAIHIKVRAQGGYGSKTPGPGAQPAIRALARAGFIIGRIEDVTPIPHDSIRRPGGRRGRRV

SEQ ID NO: 161 - DNA, 603 bp, Drosophila melanogaster
  CDS (1)..(603)
atgtcactgaaaagtgtatttctaagtgctcttcggagtattactatgcccgctgtgccgctccagacttctaggatacacacgagcgcttgctggcggaaggcggaggaccgcaaggaaatgctggcatctttaccggccaaagacgaaggaaccgtgggcgaaaagaccgtggacatcgacacacttatcaaccgcaaggctaagtttttcccggatgccagcaccgccaacacgttattcaatggaatacccttcaacgagctgcccatctgcaacattcgcgtttcacccaacaacacaattatttccgtcacggatcacaaaggagtcctccggctgatacgatcctgtggaattgagggattcaaaaacactcgcaagggaaccaacatagcagctcaagctacagcggttaccattagtggaaaagccattgaattgggctggaagacagtgcgagtaaaggttcgtggtcttggccctggaagaatgtcggccatcaaaggactgcaaatgggtgggctgaacatcgtttccattaccgacaacacacatgtttccttcaatcctccaagaccccgaaagcagagaagtctttaa

SEQ ID NO: 162 - protein, 200 aa, Drosophila melanogaster
MSLKSVFLSALRSITMPAVPLQTSRIHTSACWRKAEDRKEMLASLPAKDEGTVGEKTVDIDTLINRKAKFFPDASTANTLFNGIPFNELPICNIRVSPNNTIISVTDHKGVLRLIRSCGIEGFKNTRKGTNIAAQATAVTISGKAIELGWKTVRVKVRGLGPGRMSAIKGLQMGGLNIVSITDNTHVSFNPPRPRKQRSL

SEQ ID NO: 163 - DNA, 351 bp, Chaetosphaeridium globosum
  CDS (1)..(351)
atggcaacacaaaacggcatcgcctatattcaatccactttaaataatacaatcattacaataacagatagcaaaggacatataaaagtatggtgttcctctggctgtgttggcttcaaaggaagcaaacgtagcacaaattatgcggctcaagccacagccgaaaaagctgcagctagtgcaaaaaaacatggtatcaaatttgttaaagttcgaatcaaaggactagggtatggtaaagattcatcccttcgtggtttacaaatagcaggtcttaaaattactcatctttgggatgttacaccaataccacacaatggttgtcgtcctcctaaaaaacgtcgcgtttaa

SEQ ID NO: 164 - protein, 116 aa, Chaetosphaeridium globosum
MATQNGIAYIQSTLNNTIITITDSKGHIKVWCSSGCVGFKGSKRSTNYAAQATAEKAAASAKKHGIKFVKVRIKGLGYGKDSSLRGLQIAGLKITHLWDVTPIPHNGCRPPKKRRV

SEQ ID NO: 165 - DNA, 396 bp, Chara vulgaris
  CDS (1)..(396)
atgcatcttatcatacttgcaaagtcaaataacatcaaaaacgccatgcaaacaaaacacggtattgcttatattcaatcaactttaagtaacactataattaccataacagattcttttggagataccaaatcttggtcctcttctggttcagtgggatttaaaggatctcgtcgttcaaccaattatgctgctcaagctactgctgagaatgtagcgcgtgctgctattccattaggaattaagtcagttgaagtgagaatcaaaggtttaggttatggaaagccttcggccttacgtggtttacaattaggaggtcttattataaccaagattagcgatgtaactccaacgccacataacggatgtcgtcctcctaagaaacgccgcgtataa

SEQ ID NO: 166 - protein, 131 aa, Chara vulgaris
MHLIILAKSNNIKNAMQTKHGIAYIQSTLSNTIITITDSFGDTKSWSSSGSVGFKGSRRSTNYAAQATAENVARAAIPLGIKSVEVRIKGLGYGKPSALRGLQLGGLIITKISDVTPTPHNGCRPPKKRRV

SEQ ID NO: 167 - DNA, 456 bp, Strongylocentrotus purpuratus
  CDS (1)..(456)
atggcgccacgtaaagggaaggtgcaaaagccagaagtgcaggtcaaccttggcccccaggttccagaaggagaaaatgtctttggtgttgcccacatcttcgcttcattcaacgacacctttgtccatgtgactgatctgtctggcagggaaaccatcgccagggtgaccggtggtatgaaggtgaaggctgaccgtgacgaggcctccccgtacgccgccatgttggctgcccaggacgttgccatcaagtgcaaggatctcggcatcacagctcttcacatcaagctcagggccaccggaggaaacaagaccaagacccctggacctggtgctcagtctgccctacgtgccctggctcgctctggcatgaagattggacgtattgaggatgtaacgccaatcccatcagacagtactcgcaggaagggaggtcgccgaggtcgccgtctctag

SEQ ID NO: 168 - protein, 151 aa, Strongylocentrotus purpuratus
MAPRKGKVQKPEVQVNLGPQVPEGENVFGVAHIFASFNDTFVHVTDLSGRETIARVTGGMKVKADRDEASPYAAMLAAQDVAIKCKDLGITALHIKLRATGGNKTKTPGPGAQSALRALARSGMKIGRIEDVTPIPSDSTRRKGGRRGRRL

SEQ ID NO: 169 - DNA, 456 bp, Nasonia vitripennis
  CDS (1)..(456)
atggcaccgaagaggggtaaggttcaaaaagaggaggtgcaggtttccctcggacctcaggtccgtgaaggagaaaatgttttcggagtcgctcacattttcgccagcttcaacgacacattcgtccacgttaccgatctttcgggcagagaaactatcgcccgtgtcactggaggaatgaaagtcaaggctgatcgtgatgaagcttccccgtatgccgctatgttggctgcccaggatgtcgctgaaaaatgcaaatcccttggaatcacagctctccacatcaagcttagggctactggtggaaacaagacaaagacgccaggacctggtgcacagtcggcactccgtgctcttgcccgttcaaacatgaagattggacgtattgaggacgttacgccgattccctctgactcgacgcgcaggaagggaggtcgtcgtggtcgcaggctttaa

SEQ ID NO: 170 - protein, 151 aa, Nasonia vitripennis
MAPKRGKVQKEEVQVSLGPQVREGENVFGVAHIFASFNDTFVHVTDLSGRETIARVTGGMKVKADRDEASPYAAMLAAQDVAEKCKSLGITALHIKLRATGGNKTKTPGPGAQSALRALARSNMKIGRIEDVTPIPSDSTRRKGGRRGRRL

SEQ ID NO: 171 - DNA, 639 bp, Nasonia vitripennis
  CDS (1)..(639)
atgtttagaccggctttgaacttgctgaggttgatgccagggtcgactgcgactctagtgaaaacgacgcagatcaacgaactcgcgaacccagtgttgctgtcgcggtctctgcacctaacctccaatgtcgccaaggagaggagagatctaagaacttacagaatgtcgatgccgggcaaagacgagggcactgcaggagaaaaatccgttgacatcgatggtcttggagtacaagaggatcttttccccgatgagaatacgccaaacagattattcgatggtattccctacaaagagctgcctatatttaacataaaggtcactcccaacaacaccatcataactctcacagatttcaaaggaggtgtacacatattgaaatcgtgcggtactgaaggctttagaactgccaggaaaggaactaatattgcggcacagacaactgctatttctataagcacaaaagctcagtccataggtgttagaactgcaagagtgcgaatccgaggcataggtcctggtcgattggctgccatcaagggtcttcaaatgggaggcactaatatcgtatccatcacagacaacacccacgtgtcgtggtgtccacccagaccaagaaaacagagacgtgtctaa

SEQ ID NO: 172 - protein, 212 aa, Nasonia vitripennis
MFRPALNLLRLMPGSTATLVKTTQINELANPVLLSRSLHLTSNVAKERRDLRTYRMSMPGKDEGTAGEKSVDIDGLGVQEDLFPDENTPNRLFDGIPYKELPIFNIKVTPNNTIITLTDFKGGVHILKSCGTEGFRTARKGTNIAAQTTAISISTKAQSIGVRTARVRIRGIGPGRLAAIKGLQMGGTNIVSITDNTHVSWCPPRPRKQRRV

SEQ ID NO: 173 - DNA, 459 bp, Anopheles gambiae str. PEST
  CDS (1)..(459)
atggccccgtcacgaaagaacaaagttgtgaaggaggaagtgcaagtgtcgctcggaccgcaggttcgcgacggtgaggtggtgtttggagtggcgcacatctacgccagtttcaacgatacctttgtccacgttacggacctgtccggcaaggaaaccatctcgcgcgtgaccggcggtatgaaggtcaaagctgatcgcgatgaggcctcgccttacgccgctatgttggccgctcaggacgttgcggaaaagtgcaaatcgcttggcatcaccgcgcttcacattaagctgcgtgctacgggcggaaaccgcaccaaaacgccgggaccgggcgcccagtcggcgctgcgtgcgctggcgcgttcctcgatgaagattggtcgcatcgaagacgttacgcccatcccgtcggactccactcgccgaaagggtggtcgtcgcggtcgtcgtctatag

SEQ ID NO: 174 - protein, 152 aa, Anopheles gambiae str. PEST
MAPSRKNKVVKEEVQVSLGPQVRDGEVVFGVAHIYASFNDTFVHVTDLSGKETISRVTGGMKVKADRDEASPYAAMLAAQDVAEKCKSLGITALHIKLRATGGNRTKTPGPGAQSALRALARSSMKIGRIEDVTPIPSDSTRRKGGRRGRRL

SEQ ID NO: 175 - DNA, 459 bp, Anopheles gambiae str. PEST
  CDS (1)..(459)
atggctccgtctcgcaagaataaggtcgcgaaggaagaggtgcaggtgtcgctcggcccgcaggtccgcgacggtgaggtcgtgttcggcgtggcacacatctacgccagcttcaacgatacgttcgtgcatgtgacggatctgtccggcaaggaaaccatctcccgggtgacgggcggcatgaaggtgaaggccgatcgtgacgaagcgtcgccgtacgccgctatgttggccgcccaggatgtggccgagaagtgcaaatcgctcggcattaccgcactgcacatcaagctgcgcgctaccggtggtaaccgcaccaagacgcccggcccgggtgcccagtcggcgctccgtgcgctcgcccgttcgtcgatgaagatcggccgcatcgaggatgtgaccccgatcccgtcggattctacccgccgcaagggtggtcgtcgtggacgtcgtttgtaa

SEQ ID NO: 176 - protein, 152 aa, Anopheles gambiae str. PEST
MAPSRKNKVAKEEVQVSLGPQVRDGEVVFGVAHIYASFNDTFVHVTDLSGKETISRVTGGMKVKADRDEASPYAAMLAAQDVAEKCKSLGITALHIKLRATGGNRTKTPGPGAQSALRALARSSMKIGRIEDVTPIPSDSTRRKGGRRGRRL

SEQ ID NO: 177 - DNA, 600 bp, Anopheles gambiae str. PEST
  CDS (1)..(600)
atgtccttgctgaagcagctcaatctattatccggcctagtgcgccggacactggtcggcagtgtaaggccgctgcaccagacggccacactccgcaaggtggaagatcgcaaggcaatgctggcttcgctgcccagcaaagacgagggcacggtcggcgaacgttccatcgacattgattccatgatcgacaagaaaacgagcatatttcccgatgccaacacaccgacctccctgatcaatggggtaccgttcaacgagataccgatttgccacatccgcgtgtcaccgaacaataccatcatttcgatcacggatgccaagggtgtgccacagtttatccgctcgtgcggcatcgagggcttcaagaacacgcgcaaaggcacgaacattgcggcgcaggcgaccgcaatcagcatcagcacgagggcgatcgaacgtggctacaaaacggttcgcgtcacggtccgagggctcggcccgggacgaatgtccgctataaaggggctcgagatggctgggctgaacattgtttccattacggacacgaccccggtatcgtggaatcccccccgtcccagaaagcaaaggaagctgtaa

SEQ ID NO: 178 - protein, 199 aa, Anopheles gambiae str. PEST
MSLLKQLNLLSGLVRRTLVGSVRPLHQTATLRKVEDRKAMLASLPSKDEGTVGERSIDIDSMIDKKTSIFPDANTPTSLINGVPFNEIPICHIRVSPNNTIISITDAKGVPQFIRSCGIEGFKNTRKGTNIAAQATAISISTRAIERGYKTVRVTVRGLGPGRMSAIKGLEMAGLNIVSITDTTPVSWNPPRPRKQRKL

SEQ ID NO: 179 - DNA, 453 bp, Magnaporthe grisea 70-15
  CDS (1)..(453)
atgcctcccaagaagactcaacgtcccgcccaggagaacatctccttgggcccccaggtccgcgagggtgagctcgtcttcggcgttgcccgtatcttcgcttcgttcaacgacaccttcgtccacgtcaccgatctgagtggccgcgaaaccatctgccgtgtcaccggtggaatgaaggtcaaggccgaccgtgacgagtcgtcgccctacgccgccatgttggctgctcaggacgtcgccgctcgctgcaaggagctgggcatcaccgccctgcacatcaagatccgtgccactggtggtaacggcaccaagacccccggccccggtgcccagtccgccctccgtgccttggcccgttctggcatgaagatcggccgtatcgaggacgttactcccacgccctccgactcgacccgccgcaagggtggtcgccgtggtcgtcgtctctga

SEQ ID NO: 180 - protein, 150 aa, Magnaporthe grisea 70-15
MPPKKTQRPAQENISLGPQVREGELVFGVARIFASFNDTFVHVTDLSGRETICRVTGGMKVKADRDESSPYAAMLAAQDVAARCKELGITALHIKIRATGGNGTKTPGPGAQSALRALARSGMKIGRIEDVTPTPSDSTRRKGGRRGRRL

SEQ ID NO: 181 - DNA, 456 bp, Gibberella zeae PH-1
  CDS (1)..(456)
atgcctcccaagaagaccgccacccgtgctccccaggagaacatctccctcggaccttccgttcgcgatggcgagctggtcttcggcgttgcccgtatcttcgcctccttcaacgataccttcgtccacgtcaccgatctgagtggccgtgagactatcacccgtgttactggtggtatgaaggtcaaggccgaccgtgacgagtcctccccctacgctgccatgttggctgcccaggacgtcgctgcccgctgcaaggagcttggcatcaacgctcttcacatcaagatccgtgccactggtggtaacggtaccaagacccccggtcccggtgcccagtccgctctccgtgcccttgcccgtgctggtatgaagattggccgaattgaggacgttacccctactccttccgactctacccgcagaaagggtggtcgccgtggtcgtcgtctctga

SEQ ID NO: 182 - protein, 151 aa, Gibberella zeae PH-1
MPPKKTATRAPQENISLGPSVRDGELVFGVARIFASFNDTFVHVTDLSGRETITRVTGGMKVKADRDESSPYAAMLAAQDVAARCKELGINALHIKIRATGGNGTKTPGPGAQSALRALARAGMKIGRIEDVTPTPSDSTRRKGGRRGRRL

SEQ ID NO: 183 - DNA, 591 bp, Apis mellifera
  CDS (1)..(591)
atgattttatttaatgaaaaacttattactttaccatgtttgaaattcatgaatgttcgaaatattcatttaacctcaaatattatgaaagaatttcgaagtggattttccaaagtaagagctaatacaaaaagaaaaaatgtagttatggaaggagaaaaagcaattgattttattgatgtaaaatcaaaatcattatttcctgatgcttctacactatatcaattttttgatggtgtacaatatactcaattacatgttattaatataaaatcatctcataataatacaataatgtctcttactgattttaaaggatcaggaataatattacattctgctggacttgaaggttttaaaaatacaaagaaaggtactaatattgcagcacaacaagctgcaattacatttggaacacgtgttcttaatcatggtattaaaacagtcaaattaagaatacaaggtattggacctggaagaatgggtgctataaaaggtttgcagctaacagaattaaatattgtttctatcacagatgatactagagtatcatggaatcctccaagaccaagaaaacaaagaagaatataa

SEQ ID NO: 184 - protein, 196 aa, Apis mellifera
MILFNEKLITLPCLKFMNVRNIHLTSNIMKEFRSGFSKVRANTKRKNVVMEGEKAIDFIDVKSKSLFPDASTLYQFFDGVQYTQLHVINIKSSHNNTIMSLTDFKGSGIILHSAGLEGFKNTKKGTNIAAQQAAITFGTRVLNHGIKTVKLRIQGIGPGRMGAIKGLQLTELNIVSITDDTRVSWNPPRPRKQRRI

SEQ ID NO: 185 - DNA, 417 bp, Candida glabrata CBS 138
  CDS (1)..(417)
atggctaaagaccttgttcaatcccgtgacgcttcccaagtctttggtgttgctagaatctacgcttccttcaacgatactttcgtgcatgttaccgacctgtctggtagagaaaccatctccagagtcactggtggtatgaaggttaaggctgacagagatgagtcctctccttacgctgctatgttggccgcccaagatgttgccgctaagtgtttggaagtcggtattactgctgtccatgttaagatcagagccactggtggtactagaaccaagaccccaggccctggtggtcaagccgctttgagagctttggctagatctggtttgagaattggtagaatcgaagacgttactccagttccatccgattccaccagaaagaagggtggtagaagaggtagaagattgtga

SEQ ID NO: 186 - protein, 138 aa, Candida glabrata CBS 138
MAKDLVQSRDASQVFGVARIYASFNDTFVHVTDLSGRETISRVTGGMKVKADRDESSPYAAMLAAQDVAAKCLEVGITAVHVKIRATGGTRTKTPGPGGQAALRALARSGLRIGRIEDVTPVPSDSTRKKGGRRGRRL

SEQ ID NO: 187 - DNA, 408 bp, Candida glabrata CBS 138
  CDS (1)..(408)
atggttgttcaagctcgtgacgcttcccaagtctttggtgttgctagaatctacgcctccttcaacgatactttcgtccatgttactgacttgtctggtagagaaaccatcgccagagttactggtggtatgaaggtcaaggctgacagagatgaatcttctccatacgctgctatgttggctgcccaagatgttgctgctaagtgtttggaagttggtatcactgccgtccacgttaagatcagagctactggtggtactagaaccaagaccccaggtccaggtggtcaagctgctttgagagctttggctagatccggtttgagaattggtagaatcgaagatgtcactccagttccatccgactccaccagaaagaagggtggtagaagaggtagaagattgtga

SEQ ID NO: 188 - protein, 135 aa, Candida glabrata CBS 138
MVVQARDASQVFGVARIYASFNDTFVHVTDLSGRETIARVTGGMKVKADRDESSPYAAMLAAQDVAAKCLEVGITAVHVKIRATGGTRTKTPGPGGQAALRALARSGLRIGRIEDVTPVPSDSTRKKGGRRGRRL

SEQ ID NO: 189 - DNA, 420 bp, Debaryomyces hansenii CBS767
  CDS (1)..(420)
atgcgactgggaatggttattgttggatcagatggctcccaagtttttggtgttgcccgtatctttgcttcattcaacgataccttcgttcacgttactgatttatccggtcaagaaactattgctagagttaccggtggtatgaaagtcaaggctgatagagatgaatcttctccatacgccgctatgttggctgcccaagatgttgctcaaaaatgtaaagaagtcggtattactgccgtccacgttaagttgagagctaccggtggtaccaagaccaagaccccaggtccaggtggtcaatccgctttaagagctttagccagatccggtttaagaatcggtagaatcgaagatgttactccagttccatctgattccaccagaagaaagggtggtagacgtggtagaagattgtga

SEQ ID NO: 190 - protein, 139 aa, Debaryomyces hansenii CBS767
MRLGMVIVGSDGSQVFGVARIFASFNDTFVHVTDLSGQETIARVTGGMKVKADRDESSPYAAMLAAQDVAQKCKEVGITAVHVKLRATGGTKTKTPGPGGQSALRALARSGLRIGRIEDVTPVPSDSTRRKGGRRGRRL

SEQ ID NO: 191 - DNA, 450 bp, Aspergillus nidulans FGSC A4
  CDS (1)..(450)
atggctcccaagaccaaggcccccgctaaggacaacgtcactctcggccctctcgccggtgatggcaagctcgttttcggcgttgcgcgtatcttcgcctctttcaacgacaccttcgtccacgttaccgatctctccggtcgcgaaaccatctgccgtgtcaccggtggtatgaaggtcaaggctgaccgtgacgagtcttctccctacgccgccatgttggctgctcaggacgttgccgcccgctgcaaggagctcggcattaacgctcttcacatcaagatccgtgctactggtggtaacggcaccaagacccccggtcccggagcccagtctgcccttcgtgctctcgcccgttccggtatgagaatcggtcgtattgaggacgtcacccctactccttccgactctactcgtcgcaagggtggtcgccgcggtcgtcgtctgtag

SEQ ID NO: 192 - protein, 149 aa, Aspergillus nidulans FGSC A4
MAPKTKAPAKDNVTLGPLAGDGKLVFGVARIFASFNDTFVHVTDLSGRETICRVTGGMKVKADRDESSPYAAMLAAQDVAARCKELGINALHIKIRATGGNGTKTPGPGAQSALRALARSGMRIGRIEDVTPTPSDSTRRKGGRRGRRL

SEQ ID NO: 193 - DNA, 453 bp, Cryptococcus neoformans var. neoformans B-3501A
  CDS (1)..(453)
atggcccccaagaaggttcgagccccccaggaagctgctgtctctctcggtccccaggtcgctgagggtgagaatgtcttcggcgttgcccacatcttcgcttccttcaacgacactttcgtccacgttaccgacttgaccggcaaggagaccatctcccgagttactggtggtatgaaggtcaaggctgaccgtgacgagtcttccccttacgctgcgatgcttgccgctcaggacgttgccgctaagtgcaaggaggtcggcattaccgccctccacgtcaagctccgtgctactggtggtaccggcaccaagcaacccggtcccggtggtcaggccgctctccgagccctcgcccgtgccggtatgaggatcggtcgaattgaggacgttacccctactccttccgactccaccaggaggaagggtggtaggcgtggtaggaggttgtaa

SEQ ID NO: 194 - protein, 150 aa, Cryptococcus neoformans var. neoformans B-3501A
MAPKKVRAPQEAAVSLGPQVAEGENVFGVAHIFASFNDTFVHVTDLTGKETISRVTGGMKVKADRDESSPYAAMLAAQDVAAKCKEVGITALHVKLRATGGTGTKQPGPGGQAALRALARAGMRIGRIEDVTPTPSDSTRRKGGRRGRRL

SEQ ID NO: 195 - DNA, 456 bp, Tribolium castaneum
  CDS (1)..(456)
atggcaccaagaaaaggcaaagtccagaaggaggaagtccaggtgtcactgggcccccaggtgcgcgagggtgagatcgtcttcggcgtggcgcacattttcgccagtttcaacgacactttcgtgcacgttaccgatctgtcgggccgtgagaccatctccagggtgaccgggggcatgaaggtgaaggccgacagggacgaggcttcgccctatgctgctatgttggctgcgcaggacgtcgctgagaagtgcaagtcgttggggatcacagcattgcatattaaattgagggccacggggggcaacaagaccaagacacccggcccgggggcgcagagcgcgttgagggccttagcccggtcgaatatgaaaattgggaggattgaggatgtcacccccattccgagcgactccacgcgcaggaagggcggacggcgtggccgtaggttgtaa

SEQ ID NO: 196 - protein, 151 aa, Tribolium castaneum
MAPRKGKVQKEEVQVSLGPQVREGEIVFGVAHIFASFNDTFVHVTDLSGRETISRVTGGMKVKADRDEASPYAAMLAAQDVAEKCKSLGITALHIKLRATGGNKTKTPGPGAQSALRALARSNMKIGRIEDVTPIPSDSTRRKGGRRGRRL

SEQ ID NO: 197 - DNA, 615 bp, Tribolium castaneum
  CDS (1)..(615)
atgttttctaaacaaattatttcaactttccaaaaatttacaagtgcccaaagtggtctcattgcaaatcataatgtccgttctttgtttctcaccagtcagagacagagggaggttgtcgacagaagagaaatgcttcgttctgttccaaaattagacgagggaagtgctggggaaaaagcctttgaagttgatgcactgatccaccaaaaaacagatatttttccagatgctgatactccaaataggcttttcaatggtattccatttaagaacttgcctataatgaacataagagtatccccaaataacacaataattactatgaccgatgataagggtgctgtgaaactgctgaggtcttgtggtattgagggctttaagaacacgagaaaagggacgaacatagcggcacaagccacggcaattactataggaacaaaagttttagaaagaggaataaagacagttagggtgcgtgtgagggggctaggacctggcagaatgtcggcgattaaaggcttgcaaatgtcaggcctagagattgtttcaataacagacagcactccagtatcttggaacccgccaaggccgcgaaaggcgaaaaagttgtaa

SEQ ID NO: 198 - protein, 204 aa, Tribolium castaneum
MFSKQIISTFQKFTSAQSGLIANHNVRSLFLTSQRQREVVDRREMLRSVPKLDEGSAGEKAFEVDALIHQKTDIFPDADTPNRLFNGIPFKNLPIMNIRVSPNNTIITMTDDKGAVKLLRSCGIEGFKNTRKGTNIAAQATAITIGTKVLERGIKTVRVRVRGLGPGRMSAIKGLQMSGLEIVSITDSTPVSWNPPRPRKAKKL

SEQ ID NO: 199 - DNA, 417 bp, Nuphar advena
  CDS (1)..(417): transl_table=11
atgacaaaacctataccaagaattggttcacgtagaaatagccgtattagttcacgtaagagtgggggtcgaacaccaataggagttattcatgttcaagcgagtttcaacaatactattgttactgttacagacccacaaggtcgggtcgtttcttggtcctccgcgggtacctgtggattcaagggcacaagaaggggtaccccatttgctgctcaaaccgcagcaggaaatgctattcgtacggtagtagaccagggtatgcaacgagcagaagtcatgataaaaggtcccggtctcggaagagatgcagcattacgagcgattcgtaggagtggtatactattaaatttcgtacgtgacgtaacccctatgccacataatggatgtagaccgccaaaaaaaaggcgcgtttag

SEQ ID NO: 200 - protein, 138 aa, Nuphar advena
MTKPIPRIGSRRNSRISSRKSGGRTPIGVIHVQASFNNTIVTVTDPQGRVVSWSSAGTCGFKGTRRGTPFAAQTAAGNAIRTVVDQGMQRAEVMIKGPGLGRDAALRAIRRSGILLNFVRDVTPMPHNGCRPPKKRRV

SEQ ID NO: 201 - DNA, 405 bp, Herminiimonas arsenicoxydans
  CDS (1)..(405): transl_table=11
atggcaaaagcacctaataacgccgcagcagcacgtgtgcgtaagaaagttaagaaaaacgttgcagaaggcatcgcgcacatccacgcgtccttcaacaacaccatcatcacgatcaccgatcgtcaaggcaatgcgctgtcatgggcaacgtctggcggtgccggcttcaaaggttcgcgtaaatcgaccccgtttgcagcgcaggttgcagctgaagccgcgggtaaagtcgcgatcgaatgcggcatcaagaatctggaagtacgcatcaagggtccaggcccaggccgtgagtcgtcggtgcgtgcgttgaacaatctcggtatcaaaattacccagattcaagacgtcactccagtgccgcacaacggttgccgcccacctaagcgtcgtcgtatctaa

SEQ ID NO: 202 - protein, 134 aa, Herminiimonas arsenicoxydans
MAKAPNNAAAARVRKKVKKNVAEGIAHIHASFNNTIITITDRQGNALSWATSGGAGFKGSRKSTPFAAQVAAEAAGKVAIECGIKNLEVRIKGPGPGRESSVRALNNLGIKITQIQDVTPVPHNGCRPPKRRRI

SEQ ID NO: 203 - DNA, 399 bp, Dichelobacter nodosus VCS1703A
  CDS (1)..(399): transl_table=11
atggctaaggctgctggtaaacaaaaaaacgtaagaaagaaagcaaagcgtgtcgttgtggacgccgttgcgcacgttcatgcatcatttaataacacaattgtaacgattactgatggtcaaggaaacacgctttcttgggcaactgccggtggttcaggttttcgaggttctcgtaaaagtaccccttttgctgcacaaattgccgctgaacgcgcgggtgaagttgcaaaggaatacggtgtacaaaatcttgatgtcaacatcaaaggtccaggacctggacgtgaatctgcaattcgtgcattaaattcggctggttttaatattcacagcataacggatgtcacaccgattcctcacaacggatgtcgtccccctaagaagcgtcgcgtgtaa

SEQ ID NO: 204 - protein, 132 aa, Dichelobacter nodosus VCS1703A
MAKAAGKQKNVRKKAKRVVVDAVAHVHASFNNTIVTITDGQGNTLSWATAGGSGFRGSRKSTPFAAQIAAERAGEVAKEYGVQNLDVNIKGPGPGRESAIRALNSAGFNIHSITDVTPIPHNGCRPPKKRRV

SEQ ID NO: 205 - DNA, 393 bp, Synechococcus sp. WH 7803
  CDS (1)..(393): transl_table=11
atggccaagaccgtcaagaaatcaggcccgaagaaggccaagcgcaacgtccccaacggcgttgctcatattcagagcacgttcaacaacacgatcgtttccattaccgacaccaccggagaagtcatctcctggtcatcggctggtgccagcggtttcaaaggtgctcgcaaaggcacacccttcgcagcccagacagcggccgaagctgcagcccgtcgcgcactcgatcagggaatgcgtcagatcgaagtgttggtccgtggccctggctcaggccgggaaaccgccattcgcgcgcttcaggtcgctggcctggaaatcaccctgatccgtgatgtcacgccgttgcctcacaacggctgccgccgtcccaagcgtcgccgcgtctga

SEQ ID NO: 206 - protein, 130 aa, Synechococcus sp. WH 7803
MAKTVKKSGPKKAKRNVPNGVAHIQSTFNNTIVSITDTTGEVISWSSAGASGFKGARKGTPFAAQTAAEAAARRALDQGMRQIEVLVRGPGSGRETAIRALQVAGLEITLIRDVTPLPHNGCRRPKRRRV

SEQ ID NO: 207 - DNA, 417 bp, Chloranthus spicatus
  CDS (1)..(417): transl_table=11
atgacaaaacctataccaagaattggttcacgcaagaatggacgtattagttcacgtaagaatggacgtagaataccaaagggagttattcatgttcaagcgagtttcaacaataccattgtgactgttacagatgtacggggtcgggtggtttcttggtcctccgctggtacttccggatttagaggaacaagaagaggaaccccatttgctgctcaaaccgcagcaggaaatgctattcgtacagtagtggatcaaggtatgcagcgagcagaagtcatgataaagggacccggtctcggaagagatgcagcattacgagccattcgtagaagtggtctactattaagtttcgtacgtgacgtaacccctatgccacataatggatgtagacctcctaaaaaaagacgtgtgtag

SEQ ID NO: 208 - protein, 138 aa, Chloranthus spicatus
MTKPIPRIGSRKNGRISSRKNGRRIPKGVIHVQASFNNTIVTVTDVRGRVVSWSSAGTSGFRGTRRGTPFAAQTAAGNAIRTVVDQGMQRAEVMIKGPGLGRDAALRAIRRSGLLLSFVRDVTPMPHNGCRPPKKRRV

SEQ ID NO: 209 - DNA, 417 bp, Buxus microphylla
  CDS (1)..(417): transl_table=11
atggcaaaacctataccaagaattggttcacgtaagaatgggcgtatcggttcacgtaagagtggacgtagaataccaaagggggttattcatgttcaagcaagtttcaacaataccattgtgactgttacagatgtacggggcagggtggtttcttggtcctccgccggcacttgtggattcaggggaacaagaagagggacaccttttgctgctcaaaccgcagcgggaaatgctattcgtacagtaatggatcagggtatgcaacgagcagaagtcatgataaagggtcctggtctcggaagagatgcagcattacgagctattcgtagaagtggtctactattaagtttcgtacgggacgtaacccctatgccacataatggatgtagacctcctaaaaaaagacgtgtgtag

SEQ ID NO: 210 - protein, 138 aa, Buxus microphylla
MAKPIPRIGSRKNGRIGSRKSGRRIPKGVIHVQASFNNTIVTVTDVRGRVVSWSSAGTCGFRGTRRGTPFAAQTAAGNAIRTVMDQGMQRAEVMIKGPGLGRDAALRAIRRSGLLLSFVRDVTPMPHNGCRPPKKRRV

SEQ ID NO: 211 - DNA, 417 bp, Illicium oligandrum
  CDS (1)..(417): transl_table=11
atgacaaaacctataccaagaattggtttacgtaggaatggacgtattggtttacgtaagaatggacgtagaatatcaaaaggagttattcatgttcaagcgagtttcaacaataccattgtgactgttacagatgtacggggtcgggttgtttcttggtcctccgcgggtacttgtggattcagaggcgcaagaagagggacaccatttgctgctcaaaccgcagcaggaaatgctattcgtacagtagtggatcagggtatgcaacgagcagaagttatgataaagggccccggtctcggaagagatgcagcattacgagccattcgtagaagtggtatactattaagtttcgtacgtgacgtaactcctatgccacataatggatgtagaccgcctaaaaaaaggcgcgtatag

SEQ ID NO: 212 - protein, 138 aa, Illicium oligandrum
MTKPIPRIGLRRNGRIGLRKNGRRISKGVIHVQASFNNTIVTVTDVRGRVVSWSSAGTCGFRGARRGTPFAAQTAAGNAIRTVVDQGMQRAEVMIKGPGLGRDAALRAIRRSGILLSFVRDVTPMPHNGCRPPKKRRV

SEQ ID NO: 213 - DNA, 417 bp, Dioscorea elephantipes
  CDS (1)..(417): transl_table=11
atgacaaaacctataccaagaattggttcccgtaggaatgggcgtattggttcacgcaagaatgcacgtagaataccaaaaggagttattcatgttcaagcgagtttcaataataccattgtaactgtttcagatgtacgtggtcaggtgatttcttgggcctccgcgggtacttctggattcaaaggcacaagaagaggaacaccctatgctgctcaagctgcagcagtaaacgctattcgtacaataattgatcaggatatgcaacgagcagaagttatgataaagggtgctggtttcggaagagatgcagcattacgagccattcgtagaagtggtatactattaagtttcgtacgtgatgtaacacctatgccacataatggatgtcgacctccccaaaaaagacgtgtatag

SEQ ID NO: 214 - protein, 138 aa, Dioscorea elephantipes
MTKPIPRIGSRRNGRIGSRKNARRIPKGVIHVQASFNNTIVTVSDVRGQVISWASAGTSGFKGTRRGTPYAAQAAAVNAIRTIIDQDMQRAEVMIKGAGFGRDAALRAIRRSGILLSFVRDVTPMPHNGCRPPQKRRV

SEQ ID NO: 215 - DNA, 393 bp, Cycas taitungensis
  CDS (1)..(393): transl_table=11
atgtcaaaacctataagaaaaattggttcacgtagaaatgaacgtagaataccaaaaggagttattcacgttcaagcaagttttaacaataccattgttactgttacggatgtacggggacaggtggtttcttggtcttctgccggtgcctgtggattcaaaggcacgaaaagaagtacaccatttgctgctcagactgcagcagaaaatgctattcgtacgttaatggatcaaggtatggaacgagcagaagtcatgataagtggccctggtccggggagagatacagcattacgggccattcgtagaagtggtgtactcttaagttttgtacgtgacgtaacccctatgccacataatggatgtagacctcccaagaagagacgtgtgtag

SEQ ID NO: 216 - protein, 130 aa, Cycas taitungensis
MSKPIRKIGSRRNERRIPKGVIHVQASFNNTIVTVTDVRGQVVSWSSAGACGFKGTKRSTPFAAQTAAENAIRTLMDQGMERAEVMISGPGPGRDTALRAIRRSGVLLSFVRDVTPMPHNGCRPPKKRRV

SEQ ID NO: 217 - DNA, 789 bp, Chlorokybus atmophyticus
  CDS (1)..(789)
atgataagaaatactattgtgacttcaaaagaagaaaacaaaggcgagcaatctccaaatatgacacaagaaaaaagactgactggaatcccccctttcccagttgatgcggcgggggagcgcccccaattgcaggttgaatcatataacttggttcaccaaggcggcttaactggtttttccctaaagactttgttacaccagcgaggctcattttcaagtgaaaattttcaaagggggttgcccatcgggaaaaatggctaccaatcggactcttttcaaaaggggcaagacaaagaggggaggcagctgataaaatcggaaaattacgaaagagtggattggaccaaaggttcagaaaagatcggtaaaaaagaagtgggaactatctcgcttttgcacaggaaactagctgataagatgggaaagaaaaaaagaggggtacagcgtttgggggtagcacacattcaaacaacattaaataatactataataacaataaccgatttagatggtaatactaaatcttggtcttcttcaggtagtatagggtttaaaggatcccgacgaaaaacaagctatgctgcgcaagccgcagcagaaactgcggcaaaaaagtcaattcaattgggaattaaagatgtaaccgttaaaattcgtggatttggtcctggtagagattcttcattacgtggtttacaaattggcgggttaaaaatctataaaattcaagatactacgccattacctcataatggatgtaggcctccaaaaaaacctcgtggttaa

SEQ ID NO: 218 - protein, 262 aa, Chlorokybus atmophyticus
MIRNTIVTSKEENKGEQSPNMTQEKRLTGIPPFPVDAAGERPQLQVESYNLVHQGGLTGFSLKTLLHQRGSFSSENFQRGLPIGKNGYQSDSFQKGQDKEGRQLIKSENYERVDWTKGSEKIGKKEVGTISLLHRKLADKMGKKKRGVQRLGVAHIQTTLNNTIITITDLDGNTKSWSSSGSIGFKGSRRKTSYAAQAAAETAAKKSIQLGIKDVTVKIRGFGPGRDSSLRGLQIGGLKIYKIQDTTPLPHNGCRPPKKPRG

SEQ ID NO: 219 - DNA, 408 bp, Kineococcus radiotolerans SRS30216
  CDS (1)..(408): transl_table=11
atgcctcccaagagccgtacggccacggcgtcgcgcaagccgcgtcgcaaggagaagaagaacgtcgcgcacggtcacgcgcacatcaagtcgacgttcaacaacacgatcgtctcgatcaccgacccgaccggcgcggtcatcgcgtgggcctcggccggccaggtcggcttcaaggggtcccgcaagtcgaccccgttcgccgcgcagatggccgccgaggcggccgcccgccgtgcgcaggagcacggcatgcgcaaggtcgacgtcttcgtcaaggggccgggctccggccgcgagaccgcgatccgctccctccaggccaccggcctcgaggtcggcgcgatccaggacgtcacccccagcccgcacaacggctgccggccgcccaagcgtcggcgcgtctga

SEQ ID NO: 220 - protein, 135 aa, Kineococcus radiotolerans SRS30216
MPPKSRTATASRKPRRKEKKNVAHGHAHIKSTFNNTIVSITDPTGAVIAWASAGQVGFKGSRKSTPFAAQMAAEAAARRAQEHGMRKVDVFVKGPGSGRETAIRSLQATGLEVGAIQDVTPSPHNGCRPPKRRRV

SEQ ID NO: 221 - DNA, 417 bp, Medicago truncatula
  CDS (1)..(417): transl_table=11
atggcaaaatctataccaaaaattggttcacgtaaaaatggacgtattggttcgcgtaaacatcctcgtaaaataccaaagggagttatttatgttcaagctagtttcaacaataccattgtgactgttacagatgtacgaggtcgggtgatttcttggtcctctgccggttcgtgtggattcaagggtacacgaagggggacaccatttgccgctcaaaccgcagcagcaaatgctattcgaacagtagtagatcaaggcatgcaacgagccgtagtcataataaaaggtcccggtctaggaagagatgcggcattaagagctattgctagaagtggtatactattaagatttatacgggatgtaacccctatcccacataatggatgtagggctcctaaaaaaagacgtgtgtaa

SEQ ID NO: 222 - protein, 138 aa, Medicago truncatula
MAKSIPKIGSRKNGRIGSRKHPRKIPKGVIYVQASFNNTIVTVTDVRGRVISWSSAGSCGFKGTRRGTPFAAQTAAANAIRTVVDQGMQRAVVIIKGPGLGRDAALRAIARSGILLRFIRDVTPIPHNGCRAPKKRRV

SEQ ID NO: 223 - DNA, 390 bp, Leptosira terrestris
  CDS (1)..(390): transl_table=11
atggcaaaactaactcgaaaaattcctaaaaaaacaaaacgcaaattttcccggggccttgttcatattcaagtaagttttaataatacaattgttaccattactaatttaaagggtgatgttcttgcttggtcttccgcgggagcttgcggatttaaaggggcgcgaaaaggaactccttttgcagcacaaattgttgctgaaacagctgcacgaaaatcatttgatcgtggattaaaacaagcacaggttttagtaaaaggaccgggaccaggacgagataaagctctcgtagggctatttaaagctggaattcagatatctcttattagagatattactgcaattccgcataatggttgtagacctcccaaaaaaaggcgtttataa

SEQ ID NO: 224 - protein, 129 aa, Leptosira terrestris
MAKLTRKIPKKTKRKFSRGLVHIQVSFNNTIVTITNLKGDVLAWSSAGACGFKGARKGTPFAAQIVAETAARKSFDRGLKQAQVLVKGPGPGRDKALVGLFKAGIQISLIRDITAIPHNGCRPPKKRRL

SEQ ID NO: 225 - DNA, 390 bp, Xanthobacter autotrophicus Py2
  CDS (1)..(390): transl_table=11
atggctaaggaagctacccgcgttaagcgccgcgagcgcaagaacattgcctcgggcgtggcgcatgtgaacgcctcgttcaacaacaccatgatcaccatcaccgacgcccagggcaacaccatctcctggtcctcggccggcgccatggggttcaagggttcgcgcaagtccaccccgtacgccgcgcaggtggcggccgaggacgcggcccgcaaggcggccgagcacgggatgcgcacccttgaggtggaagtctccggccccggttcgggacgtgagtccgccctgcgcgcgctgcaggcggcgggtttcctcgtcacctccatccgcgacgtgacgccgatcccgcacaacggctgccgtccgcgcaagcgccgtcgcgtctga

SEQ ID NO: 226 - protein, 129 aa, Xanthobacter autotrophicus Py2
MAKEATRVKRRERKNIASGVAHVNASFNNTMITITDAQGNTISWSSAGAMGFKGSRKSTPYAAQVAAEDAARKAAEHGMRTLEVEVSGPGSGRESALRALQAAGFLVTSIRDVTPIPHNGCRPRKRRRV

SEQ ID NO: 227 - DNA, 417 bp, Cuscuta gronovii
  CDS (1)..(417): transl_table=11
atggtaaaattaatcccgagacttagttcgcgtcggaatggacgtattcgtttacgtaaaaatacacgtaaaatctcacaaggagtaattcatattcaggccagtttacagaatactatagtcactgttacagatgtacgagggcgcgtagtttcgtgggcttctgcaggtagtgccggattcaaaggaactacaagacggacgccgtttgctgcgcaaacggcagcaacaaatgctatccgtacagcaataaaccatggtatgcgtgaagcagacgtgttaataaaaggccctgggcttggaagagacgcagcattacgagcgattcgtcgaagtggtatacgattagagttgatactggatgtcactcctatgccacacaatggctgtagacctccgaaaaaacgacgtgtatag

SEQ ID NO: 228 - protein, 138 aa, Cuscuta gronovii
MVKLIPRLSSRRNGRIRLRKNTRKISQGVIHIQASLQNTIVTVTDVRGRVVSWASAGSAGFKGTTRRTPFAAQTAATNAIRTAINHGMREADVLIKGPGLGRDAALRAIRRSGIRLELILDVTPMPHNGCRPPKKRRV

SEQ ID NO: 229 - DNA, 417 bp, Cuscuta reflexa
  CDS (1)..(417): transl_table=11
atggcaaaatctataccgagaattagttcgcgtaggaatggacgtattggttcaggtaataatgtacggagaataccaaaaggagtaattcatgttcaagctagtttccataataccatagtcactgttacagatgtacggggtcgggtagtttcttggtcctctgccggtacttctggattcaaaggaactagaagagggacaccttttgctgctcaaactgcggcaacaaatgctatccgtacagtagtggatcaaggtatgctacgagcagaagtattgataaaaggtcctggtctcggaagagacgcagcattacgagctattcgtagaagtggtatacttttaacttttgtacgggatctaacccctatgccacacaatggctgtagacctccgaaacaaagacgtgtgtag

SEQ ID NO: 230 - protein, 138 aa, Cuscuta reflexa
MAKSIPRISSRRNGRIGSGNNVRRIPKGVIHVQASFHNTIVTVTDVRGRVVSWSSAGTSGFKGTRRGTPFAAQTAATNAIRTVVDQGMLRAEVLIKGPGLGRDAALRAIRRSGILLTFVRDLTPMPHNGCRPPKQRRV

SEQ ID NO: 231 - DNA, 342 bp, Anaplasma marginale str. St. Maries
  CDS (1)..(342): transl_table=11
gtgggcgaggtgcatatctacgccacgtataacaacgtaattgtgacgattgctgatcagcaggggcacgttcttgtcactacctcggccggggcttgtaactttaaaggctccaagaaggcgaccccttatgccgctcaggagacggtcgcgagagcagttaaagccgttgttgagcggaatggtatgaggacggtgtcggtgtgcatatccggtcctggtgctggtagggaagctgccatcagggcggttcagacctgtaacctcaatgttacgtccataagggatactactaagctccctcacaatgggtgtaagctgccgaagaggcgcagggtatag

SEQ ID NO: 232 - protein, 113 aa, Anaplasma marginale str. St. Maries
MGEVHIYATYNNVIVTIADQQGHVLVTTSAGACNFKGSKKATPYAAQETVARAVKAVVERNGMRTVSVCISGPGAGREAAIRAVQTCNLNVTSIRDTTKLPHNGCKLPKRRRV

SEQ ID NO: 233 - DNA, 357 bp, Physcomitrella patens
  CDS (1)..(357)
atgcagaagaaaaaaaagcacggtattgcatatattcgatcaactttaagtaataccattattactgtaacagattataaaggagatacaaaaacttggtcctcctcaggttcattggggttcaagggatctcgtcgctcaaccaattatgctgctcaagcaactgcagaaaatgctgcccgaactgctattcaactgggaattaagtcggttgaagttgaaataaaagggttaggttacggaaaggaatcgtcgctacgtggtttacgactaggaggtcttattattaccaaaattagagatgtaaccccaaccccacataatggatgccgaccccctaaaaaacgccgtgtttaa

SEQ ID NO: 234 - protein, 118 aa, Physcomitrella patens
MQKKKKHGIAYIRSTLSNTIITVTDYKGDTKTWSSSGSLGFKGSRRSTNYAAQATAENAARTAIQLGIKSVEVEIKGLGYGKESSLRGLRLGGLIITKIRDVTPTPHNGCRPPKKRRV

SEQ ID NO: 235 - DNA, 387 bp, Nephroselmis olivacea
  CDS (1)..(387)
atgttaaaaaaacaacaaaagcaacgaagaaaacaatcaataaatcttctaggtataatttatgtgcaaagtacaaaaaacaatacaattttaactttaacagattctgtcggagctgctaaagcatggtcatctgctggatccgttggatttaagggtgctcgtcgtgcaacaggatttgcagctcaaacagctgctgaaacacttgcaaaaaaatctagtcgtttaggcttttttcatattgatgtaaaactaaaaggattaggaaatggacgacgtagttctttgcgagggttaaaattaggaggactaaaaattcgaaaaattcaagatataacacctcttccacataatggatgtcgtcaacctaaacaaagacgtatttag

SEQ ID NO: 236 - protein, 128 aa, Nephroselmis olivacea
MLKKQQKQRRKQSINLLGIIYVQSTKNNTILTLTDSVGAAKAWSSAGSVGFKGARRATGFAAQTAAETLAKKSSRLGFFHIDVKLKGLGNGRRSSLRGLKLGGLKIRKIQDITPLPHNGCRQPKQRRI

SEQ ID NO: 237 - DNA, 387 bp, Mesostigma viride
  CDS (1)..(387)
atgaaaacaacaggaaatcgtagcaacaaaacagcagttgcattaccaataggaatacttcatgttcaaacaacattaaataatactataatgacgcttacagatagaaaaggaaatacgatttttggattttcttcgggtatgctcggatttggaggttctcgtaaaaaaactcggtttgcttctcgttctgtagctcaacatatggtacttcgttgtaaacaattacgtattcaaagattaattttagctattaaaggtcgtatgaatttaaattttttaacttctttaataaaaaaaggacgaaaaatttctattgtgcaaattatagataaaactccaaaagtgcataatggttgtcgtcctccaaaaatgcctagaaaataa

SEQ ID NO: 238 - protein, 128 aa, Mesostigma viride
MKTTGNRSNKTAVALPIGILHVQTTLNNTIMTLTDRKGNTIFGFSSGMLGFGGSRKKTRFASRSVAQHMVLRCKQLRIQRLILAIKGRMNLNFLTSLIKKGRKISIVQIIDKTPKVHNGCRPPKMPRK

SEQ ID NO: 239 - DNA, 390 bp, Magnetospirillum magnetotacticum MS-1
  CDS (1)..(390): transl_table=11
atggccaaggaaccgacccgcgtccgccgccgcgaacgcaagaacatcgtctccggcgtggcgcatgtgaacgcctcgttcaacaacacgatgatcaccatcaccgacgcgcagggcaacacgatctcgtggtcgtccgccggcgccatgggcttcaagggctcgcgcaagtcgaccccgtacgcggcccaggtcgccgccgaggatgccggccgcaaggctgccgagcacggcatgcgcaccctcgaggtcgaggtgtccggtccgggttcgggccgtgagtcggcgctccgcgcgttgcaggccgccggcttcaccgtgacctcgatccgcgacgtcacctcgatcccgcataacggctgccgcccgcgcaagcgccgtcgcgtctga

SEQ ID NO: 240 - protein, 129 aa, Magnetospirillum magnetotacticum MS-1
MAKEPTRVRRRERKNIVSGVAHVNASFNNTMITITDAQGNTISWSSAGAMGFKGSRKSTPYAAQVAAEDAGRKAAEHGMRTLEVEVSGPGSGRESALRALQAAGFTVTSIRDVTSIPHNGCRPRKRRRV

SEQ ID NO: 241 - DNA, 396 bp, Nostoc punctiforme PCC 73102
  CDS (1)..(396): transl_table=11
atggcgagacaaccaactaaaaaatccgggagcaagaagcagaaacggaacgtacccagcgggatggcctacatccagtctactttcaacaatagcattgtcaccattaccgatcaaaatggagatgtcatctcctgggccagcgctggttctagcggttttaagggagcaaaaaagggaactccctttgcagcgcaaactgctgctgaaagtgcagcccgtagagctatagatcaaggaatgcgccaaattgaggtaatggtaagtgggccaggagcaggtagagaaaccgctatccgcgcacttcaaggagcaggactggaaattacactcattcgggatattacccccattcctcacaatggctgccgtccacccaagcgccgtcgagtttaa

SEQ ID NO: 242 - protein, 131 aa, Nostoc punctiforme PCC 73102
MARQPTKKSGSKKQKRNVPSGMAYIQSTFNNSIVTITDQNGDVISWASAGSSGFKGAKKGTPFAAQTAAESAARRAIDQGMRQIEVMVSGPGAGRETAIRALQGAGLEITLIRDITPIPHNGCRPPKRRRV

SEQ ID NO: 243 - DNA, 390 bp, Bacillus anthracis str. A2012
  CDS (1)..(390): transl_table=11
  misc_feature (25)..(25): w is a or t
  misc_feature (26)..(26): w is a or t
  misc_feature (247)..(247): k is g or t
atggcacgtaaaacaaacactcgtwwaaaacgtgtgaaaaagaatattgaagctggtgtagctcatattcgttctactttcaacaacacaatcgtaacacttacagatactcacggtaacgcactttcttggtctagtgctggtgcacttggtttccgtggatctcgtaaatctactccattcgctgcacaaatggctgctgaaactgctgctaaagctgcaatggaacacggtttaaaaactttakaggttactgttaaaggtcctggtgctggtcgtgaagctgcaattcgtgctcttcaagctgcaggtctagaagtaacagcaattagagatgttactccagttcctcataatggatgtcgtccaccaaaacgtcgtcgtgtgtaa

SEQ ID NO: 244 - protein, 129 aa, Bacillus anthracis str. A2012
  misc_feature (9)..(9): The Xaa at location 9 stands for Stop, Ile, Leu, or Lys.
  misc_feature (83)..(83): The Xaa at location 83 stands for Stop, or Glu.
MARKTNTRXKRVKKNIEAGVAHIRSTFNNTIVTLTDTHGNALSWSSAGALGFRGSRKSTPFAAQMAAETAAKAAMEHGLKTLXVTVKGPGAGREAAIRALQAAGLEVTAIRDVTPVPHNGCRPPKRRRV

SEQ ID NO: 245 - DNA, 393 bp, Crocosphaera watsonii WH 8501
  CDS (1)..(393): transl_table=11
atggcgcgaccaacaaaaaaaggcggaccaaaaagacaaaagaaaaacgttcctaatggagtggctcatattcaatccactttcaacaataccattatcaccatttctgataccaaaggagatgtggtttcttggtcttcagcaggagccagtggctttaaaggagccaaaaaagggactccctttgctgctcaaaccgcagccgactcagcagcccgtcgggcgatagatcagggaatgcggcaaatagaagtgatggtaagcggacctggagccggtcgagaaacagcgatccgcgcattacaaggggcaggattagaaattaccctaattcgtgatgttacccctattccccataacggctgtcgtcctccaaaaagacgaagagtttag

SEQ ID NO: 246 - protein, 130 aa, Crocosphaera watsonii WH 8501
MARPTKKGGPKRQKKNVPNGVAHIQSTFNNTIITISDTKGDVVSWSSAGASGFKGAKKGTPFAAQTAADSAARRAIDQGMRQIEVMVSGPGAGRETAIRALQGAGLEITLIRDVTPIPHNGCRPPKRRRV

SEQ ID NO: 247 - DNA, 396 bp, Exiguobacterium sibiricum 255-15
  CDS (1)..(396): transl_table=11
atggcaaaacgtaaacagaatgttcgtagtaaacgtaaagtcaaaaagaatattgaatctggtatcgtgcatatccgttcaacattcaacaacacaatcgttacgatcactgacatgcaagggaatgcaatctcttgggcaactgcaggtaacatgggcttcaaaggctcacgtaaatctactccatttgctgcgcaactcgcttcagaaactgctgcgaaaacagcaatggacaacggtatgcgtactgtagaagttaacgttaaaggtcctggtgcaggtcgtgaagctgcaatccgtgcgcttcaagcaatcggtcttgaagtaacagcgatccgtgacgtaactccagttccacacaacggttgccgccctccaaaacgtcgtcgcgtgtaa

SEQ ID NO: 248 - protein, 131 aa, Exiguobacterium sibiricum 255-15
MAKRKQNVRSKRKVKKNIESGIVHIRSTFNNTIVTITDMQGNAISWATAGNMGFKGSRKSTPFAAQLASETAAKTAMDNGMRTVEVNVKGPGAGREAAIRALQAIGLEVTAIRDVTPVPHNGCRPPKRRRV

SEQ ID NO: 249 - DNA, 384 bp, Prosthecochloris aestuarii DSM 271
  CDS (1)..(384): transl_table=11
atggctacaattagcaggaaaaagaaaaaggtaaaagttacgcctgaaggtgccgtacatatcaaggcctccttcaataacgttctggttaccattaccgatatgcagggaaacacagtttcctggtcaagcgctggtaaaaacggttttaaaggttccaagaaaaataccccttatgcttcgcaggttacttcagaggctgctgctaaggaagcttttgacctcggcatgaggtatgtgcatgtgtttatcaaaggccccggctctggtagggatgctgctatccgtgcactccagggagcaggtcttgatgtgaaaaccatcaaggatatcaccccgctgccgcataacggttgccgccctcccaagcgcagaagggtataa

SEQ ID NO: 250 - protein, 127 aa, Prosthecochloris aestuarii DSM 271
MATISRKKKKVKVTPEGAVHIKASFNNVLVTITDMQGNTVSWSSAGKNGFKGSKKNTPYASQVTSEAAAKEAFDLGMRYVHVFIKGPGSGRDAAIRALQGAGLDVKTIKDITPLPHNGCRPPKRRRV

SEQ ID NO: 251 - DNA, 393 bp, Xylella fastidiosa Ann-1
  CDS (1)..(393): transl_table=11
atggctaaacagtctgttgtcaaaactaagaagagggttaagcgtgttatcaccgatggcgttgcccatatttgcgcttctttcaataatactattgttaccattactgaccgacagggtaattcgttgttctggtgtacctccggtgcttctggttttcgcgggtcacgtaaatgtacaccttttgctgcgcaggtagctgccgagaaggctgggcgtgctgtcttagattatggaatgaaatctttggaagtgcggatcaatggtccaggtcctggtcgagaatcagcagtccgttctttaagtaacgtcggttataaaattacaaatatcattgatgtgacgccaatcccgcataatggctgtcgtcctccaaaaaagcgtcgtgtctaa

SEQ ID NO: 252 - protein, 130 aa, Xylella fastidiosa Ann-1
MAKQSVVKTKKRVKRVITDGVAHICASFNNTIVTITDRQGNSLFWCTSGASGFRGSRKCTPFAAQVAAEKAGRAVLDYGMKSLEVRINGPGPGRESAVRSLSNVGYKITNIIDVTPIPHNGCRPPKKRRV

SEQ ID NO: 253 - DNA, 414 bp, Croceibacter atlanticus HTCC2559
  CDS (1)..(414): transl_table=11
atggcaaaacaagtaaaaggtaaagctggtgcagctaaagccaaagctagaaaacgtaaagttgctgttgaagcatttggagaagcacatatctctgcatctttcaacaacattatcgtttctttaaccaataagaaaggtgatgtaatctcttggtcttctgcaggtaagatgggctttagaggatctaagaaaaacactccttacgctgctcaattagcagcagaagatgcaagtggtgttgctcatgaagctggtttacgtaaagtaaaagtatatgtgaaaggtcctggaaatggtagagaatctgctatccgttctattcacaatgcaggaattgaagtaacagaaattattgatgttactccaatgcctcacaatggttgtcgtccaccaaaaagacgtcgagtttaa

SEQ ID NO: 254 - protein, 137 aa, Croceibacter atlanticus HTCC2559
MAKQVKGKAGAAKAKARKRKVAVEAFGEAHISASFNNIIVSLTNKKGDVISWSSAGKMGFRGSKKNTPYAAQLAAEDASGVAHEAGLRKVKVYVKGPGNGRESAIRSIHNAGIEVTEIIDVTPMPHNGCRPPKRRRV

SEQ ID NO: 255 - DNA, 390 bp, Roseovarius nubinhibens ISM
  CDS (1)..(390): transl_table=11
atggcacgtgatactcgtcgcgggaagcgcaaggtttccaagaatatcgccactggtgtggcgcatgtgaacagctcgttcaacaacaccaagatcctgatctcggacgtgcaaggcaatgcgatcgcttggtcgtcggccggcaccatgggtttcaaaggttcgcggaagtcgaccccctatgccgcacagatggccgcagaagacgcgggcaagaaggcacaggaacatggcatgaagacccttgaggtcgaagtgcagggtccgggttcgggccgtgagagcgcgctgcgcgccctggccgctgtcggtttcaacatcacgtcgatccgtgacgtgacgccgatcgcccacaatggctgccgcccgccgaagcgccgccgggtctaa

SEQ ID NO: 256 - protein, 129 aa, Roseovarius nubinhibens ISM
MARDTRRGKRKVSKNIATGVAHVNSSFNNTKILISDVQGNAIAWSSAGTMGFKGSRKSTPYAAQMAAEDAGKKAQEHGMKTLEVEVQGPGSGRESALRALAAVGFNITSIRDVTPIAHNGCRPPKRRRV

SEQ ID NO: 257 - DNA, 390 bp, Oceanicola batsensis HTCC2597
  CDS (1)..(390): transl_table=11
atggcacgtgatacccgccgcgtcaaaaagaaggtttccaagaacatcgccgccggcgttgcgcatgtgaactcttcgttcaacaacaccaagatcctgatctcggacgtccagggcaatgcgatttcctggtcctcggccggcaccatgggcttcaagggctcgcgcaagtcgaccccctacgccgcccagatggccgccgaagatgccggccgcaaggcgcaggaacacggcgtgaagacgctggaagtcgaagtgcaggggccgggttcgggccgcgagagcgcgctgcgcgccctggccgccgtcgggttcaacatcacctcgatccgtgacgtgaccccgatcgcgcacaacggctgccgcccgccgaagcgccgccgcgtctga

SEQ ID NO: 258 - protein, 129 aa, Oceanicola batsensis HTCC2597
MARDTRRVKKKVSKNIAAGVAHVNSSFNNTKILISDVQGNAISWSSAGTMGFKGSRKSTPYAAQMAAEDAGRKAQEHGVKTLEVEVQGPGSGRESALRALAAVGFNITSIRDVTPIAHNGCRPPKRRRV

SEQ ID NO: 259 - DNA, 393 bp, Prochlorococcus marinus str. MIT 9211
  CDS (1)..(393): transl_table=11
atggccacacccgcaaagaaaactggttctaaaaagtctaagcgcaacgtcccaaacggcgttgtgcatattcaaagcacttttaataacaccatcgtttcaatcactgatactaatggtgaagttgtttcttggtcttctgcaggggcaagtggatttaaaggtgcccgaaaaggtaccccattcgctgctcaaactgccgctgaggcagcagcaagacgtgctctagaacaaggtatgagacaaatcgaggttctcgtaagaggaccaggttccggccgggaaacagccataagagctttgcaagttgctggcttggagattactttgatcagagatgttactcctcttcctcacaatggttgcaggagacccaaacgcagacgcgtttga

SEQ ID NO: 260 - protein, 130 aa, Prochlorococcus marinus str. MIT 9211
MATPAKKTGSKKSKRNVPNGVVHIQSTFNNTIVSITDTNGEVVSWSSAGASGFKGARKGTPFAAQTAAEAAARRALEQGMRQIEVLVRGPGSGRETAIRALQVAGLEITLIRDVTPLPHNGCRRPKRRRV

SEQ ID NO: 261 - DNA, 390 bp, Erythrobacter sp. NAP1
  CDS (1)..(390): transl_table=11
atggcacgcgaacccggcaaagtaaggcgccgcgacagaaagaacatcacgagcggcgttgcgcacatcaacgccagcttcaacaacaccatgatcaccatcaccgatgcgcagggcaatgcgatcagctggtccagcgccggcatgatgggcttcaagggtagccgtaagtcgaccccgtatgcagcacaggttgctgccgatgacgcgggcaagaaggctgctgaacacggtgttcgcaccctcgaggttgaagtgaagggtccgggctcgggccgtgaaagcgcacttcgcggtctcgccgcagtgggcttcaacatcacctcgatccgtgacgtgaccccgatcccgcacaacggtgtgcgtccttccaagcgccgccgcgtttga

SEQ ID NO: 262 - protein, 129 aa, Erythrobacter sp. NAP1
MAREPGKVRRRDRKNITSGVAHINASFNNTMITITDAQGNAISWSSAGMMGFKGSRKSTPYAAQVAADDAGKKAAEHGVRTLEVEVKGPGSGRESALRGLAAVGFNITSIRDVTPIPHNGVRPSKRRRV

SEQ ID NO: 263 - DNA, 393 bp, Synechococcus sp. RS9917
  CDS (1)..(393): transl_table=11
atggccaaacccgccaaaaaatcaggcccaaagaaggccaagcgcaacgtccccaacggtgttgcccatatccagagcaccttcaacaacacgatcgtgtcgatcaccgacaccaccggtgaggtgatctcctggtcctccgccggagccagcggcttcaaaggtgcccgtaaaggcacccccttcgccgcccagaccgctgccgaagccgcggcacgtcgtgctctcgagcagggcatgcgacagatcgaagtgctggtgcgcggccccggctcaggtcgtgaaactgccatccgggctctgcaggtggccggcctggaaatcacgctcatccgtgatgtcacccccttgccccacaacggctgccgtcgtcccaagcgtcgccgcgtctga

SEQ ID NO: 264 - protein, 130 aa, Synechococcus sp. RS9917
MAKPAKKSGPKKAKRNVPNGVAHIQSTFNNTIVSITDTTGEVISWSSAGASGFKGARKGTPFAAQTAAEAAARRALEQGMRQIEVLVRGPGSGRETAIRALQVAGLEITLIRDVTPLPHNGCRRPKRRRV

SEQ ID NO: 265 - DNA, 393 bp, Synechococcus sp. WH 5701
  CDS (1)..(393): transl_table=11
atggcgaagccagccaagaaaaccggcgcgaagaaaaccaagcgcaacgtgcccaacggtgtggcacacatccagagcaccttcaacaacaccatcgtgtcgatcaccgacacggccggtgaggtgatctcctggtcgtcggccggcgccagcggcttcaaaggagctcgtaagggcacccccttcgccgcccagaccgccgctgaagccgcaggccgcagggcccttgagcaggggatgcgtcagatcgaggtgctggtgcgcggtccgggctccgggcgtgaaaccgctatccgggccctgcaggtggccggccttgagatcaccctcatccgggatgtcacccccctgccccacaacggctgccgccgctccaagcgccgccgggtctga

SEQ ID NO: 266 - protein, 130 aa, Synechococcus sp. WH 5701
MAKPAKKTGAKKTKRNVPNGVAHIQSTFNNTIVSITDTAGEVISWSSAGASGFKGARKGTPFAAQTAAEAAGRRALEQGMRQIEVLVRGPGSGRETAIRALQVAGLEITLIRDVTPLPHNGCRRSKRRRV

SEQ ID NO: 267 - DNA, 387 bp, Pseudoalteromonas tunicata D2
  CDS (1)..(387): transl_table=11
atggcaaaagcaccaattcgtcgtaagaaagttaaaaaacaagttgctgatggtatggctcatgttcatgcatctttcaacaacactattgtaacgattacagatcgccaaggtaacgcgttatcttgggcaactgcaggtggttctggtttccgtggttcacgtaaatctactccattcgctgcacaggttgctgctgagcgtgcaggtactgcagctcaagagtacggtttgaaaaacctagaagtattcattaagggaccaggcccaggccgtgagtctgcagttcgtgctcttaatgcagtaggttaccgtattacaaacatcactgacgtgacgccaattcctcataacggttgtcgtccaccgaagaaacgtcgcgtataa

SEQ ID NO: 268 - protein, 128 aa, Pseudoalteromonas tunicata D2
MAKAPIRRKKVKKQVADGMAHVHASFNNTIVTITDRQGNALSWATAGGSGFRGSRKSTPFAAQVAAERAGTAAQEYGLKNLEVFIKGPGPGRESAVRALNAVGYRITNITDVTPIPHNGCRPPKKRRV

SEQ ID NO: 269 - DNA, 390 bp, Oceanospirillum sp. MED92
  CDS (1)..(390): transl_table=11
atggcaaagccaggtaatcgcacacgcaaaaaagtgaagaagcaaatagctgatggcttcgcgcacatccatgcttcttttaacaatacgatcattacaattaccgatcgtcagggtaacgctctttcttgggcaactgcgggtggctccggcttccgtggttctcgtaagagtacccctttcgctgctcaggttgcggctgagcgcgctggacaggctgcattagaatatggcctgaaaaacttagacgtatttgtaaaaggcccaggaccaggtcgcgaatcagcggttcgtgctctgaatgctgtaggctacaaaattgcaaatatcactgacgtgacgccaatccctcacaatggttgtcgtccaccgaagaaacgtcgcgtttaa

SEQ ID NO: 270 - protein, 129 aa, Oceanospirillum sp. MED92
MAKPGNRTRKKVKKQIADGFAHIHASFNNTIITITDRQGNALSWATAGGSGFRGSRKSTPFAAQVAAERAGQAALEYGLKNLDVFVKGPGPGRESAVRALNAVGYKIANITDVTPIPHNGCRPPKKRRV

SEQ ID NO: 271 - DNA, 390 bp, Flavobacteria bacterium BBFL7
  CDS (1)..(390): transl_table=11
atggcaaagtctaaaacagtatcaaaaaagcgtaaggttgttgttgaatcagtaggagaggtacatatctcttcttcctttaataacatactagtttctttgacaaataaaaaaggagaagttatttcttggtcatctgctgggaaaatgggtttccgtggttctaagaaaaacactccatatgctgcgcaactagctgcagaggatgcttctaaagtagcacatgaggcaggtttacgtaaggtgaaagcatatgtaaagggacctggtaatggtcgtgaaagtgctatccgtagtattcacaattctggaattgaagtaactgaaattattgatgttactccattgccacataatggatgtcgtcctcctaaacgtcgtagagtataa

SEQ ID NO: 272 - protein, 129 aa, Flavobacteria bacterium BBFL7
MAKSKTVSKKRKVVVESVGEVHISSSFNNILVSLTNKKGEVISWSSAGKMGFRGSKKNTPYAAQLAAEDASKVAHEAGLRKVKAYVKGPGNGRESAIRSIHNSGIEVTEIIDVTPLPHNGCRPPKRRRV

SEQ ID NO: 273 - DNA, 396 bp, delta proteobacterium MLMS-1
  CDS (1)..(396): transl_table=11
atggccaagccgagcaaaaccgtgcgtccccgcaagaaggaccgcaaaaatattcccgaaggggtttgctttattaagtcgaccttcaacaacaccatcgtcacttttgccgatcccgccgggaatgtgatttcctggtgcagttccggttgcctgggtttcaaggggtcgcgcaagagcaccccttttgccgcccagaacgccgtggaaaccgcggtcaaaaaggcccaggaccacggactgcgcaaggtggaagtacgggtcaacggccccggccccggtcgtgagtccgctattcgggccttgcaggcggccggcgtcgaggttaattttattcgcgacatgacaccgctgccccacaatggatgtaagccccccaagcggcggcgggtgtaa

SEQ ID NO: 274 - protein, 131 aa, delta proteobacterium MLMS-1
MAKPSKTVRPRKKDRKNIPEGVCFIKSTFNNTIVTFADPAGNVISWCSSGCLGFKGSRKSTPFAAQNAVETAVKKAQDHGLRKVEVRVNGPGPGRESAIRALQAAGVEVNFIRDMTPLPHNGCKPPKRRRV

SEQ ID NO: 275 - DNA, 444 bp, Rickettsiella grylli
  CDS (1)..(444): transl_table=11
atggcagattacaatttacatgcatcgcagcaattaacgatggctgagagggcggggtcgcatcgtaagcgtaaagagattgttcccgatgcaatcgttcatttgagcacctcttttaataatacgattatttgtatccgtaaaggaggggatactttagggatatcctcagcgggagcgtgtgattttaaagggactaaaaaaggcacggcttttgcggctcgagtcgctttcgaaaaagcgattgaaaaagcagtcgataagtataaatcaaaatataaacataatttaggacgcgttgaagtgagaattaaagggccaggtcaagggtctgagcaagcgataatggctttaaaaaataaggatattgaggttactcaaatcttgaatattacaggcgtgcctcataatggttgccgaccgcccaaacggcgtcgtgtatag

SEQ ID NO: 276 - protein, 147 aa, Rickettsiella grylli
MADYNLHASQQLTMAERAGSHRKRKEIVPDAIVHLSTSFNNTIICIRKGGDTLGISSAGACDFKGTKKGTAFAARVAFEKAIEKAVDKYKSKYKHNLGRVEVRIKGPGQGSEQAIMALKNKDIEVTQILNITGVPHNGCRPPKRRRV

SEQ ID NO: 277 - DNA, 390 bp, Oceanobacter sp. RED65
  CDS (1)..(390): transl_table=11
atggcaaagccacaacgtaacgttaagaaaaaagttaaaaagaccgtcgtagacggcgtggcgcacatccatgcgtcatttaataacaccatcgtaaccattactgatcgtcaaggtaacgcattatcttgggcgactgcaggtggttctggtttccgtggttctcgtaagagtacccctttcgctgcacaggttgctgcggaacgcgctggtgaagccgctaaagagtatggtttaaagaacttggacgtggaagttaaaggcccaggtcctggtcgtgaatctgctgtacgtgcattgaatgcatgtggctataaaattggcaacattaccgatgtgactcctattcctcacaacggttgtcgcccaccgaagaaacgtcgcgtttaa

SEQ ID NO: 278 - protein, 129 aa, Oceanobacter sp. RED65
MAKPQRNVKKKVKKTVVDGVAHIHASFNNTIVTITDRQGNALSWATAGGSGFRGSRKSTPFAAQVAAERAGEAAKEYGLKNLDVEVKGPGPGRESAVRALNACGYKIGNITDVTPIPHNGCRPPKKRRV

SEQ ID NO: 279 - DNA, 393 bp, Synechococcus sp. RS9916
  CDS (1)..(393): transl_table=11
atggccaagaccgtcaaaaaatctggccccaaaaaggccaagcgcaatgtccccaacggcgttgcccacattcagagcacgttcaacaacacgatcgtgtccatcaccgacaccaccggagaagtgatctcctggtcgtcggctggtgccagcggcttcaagggcgcccgtaagggaacccctttcgctgcacagaccgcagctgaagctgctgcccgccgtgctcttgagcaaggcatgcgtcaaatcgaagtactggtgcgcggccctggttcaggccgtgaaaccgccatccgcgcccttcaagtggccggcctggaaatcaccctgattcgcgacgtcacacctctgccccacaacggctgccgtcgttccaagcgtcgtcgcgtctga

SEQ ID NO: 280 - protein, 130 aa, Synechococcus sp. RS9916
MAKTVKKSGPKKAKRNVPNGVAHIQSTFNNTIVSITDTTGEVISWSSAGASGFKGARKGTPFAAQTAAEAAARRALEQGMRQIEVLVRGPGSGRETAIRALQVAGLEITLIRDVTPLPHNGCRRSKRRRV

SEQ ID NO: 281 - DNA, 390 bp, marine gamma proteobacterium HTCC2143
  CDS (1)..(390): transl_table=11
atggctaaagataataagccggctcgtaaaaaggtcaaaaagaccgttgtggatggcattgcgcacattcatgcgtcttttaataacaccataattactataactgaccgtcagggtaacgctcttagttgggcgactgcgggcgggtctggtttccgtgggtctcgtaaaagtacgcctttcgctgcccaggtggctgctgagcgtgctggtatagcagcccaggaatatggtctaaaaaatctcgacgttgaagttaagggcccaggtccaggtcgagagtctgccgtacgtgcacttaataatgcagggtacaagataggtagcattaatgacgtaacgccaattccacacaatggctgccgtcctcccaagaaacgtcgcgtttaa

SEQ ID NO: 282 - protein, 129 aa, marine gamma proteobacterium HTCC2143
MAKDNKPARKKVKKTVVDGIAHIHASFNNTIITITDRQGNALSWATAGGSGFRGSRKSTPFAAQVAAERAGIAAQEYGLKNLDVEVKGPGPGRESAVRALNNAGYKIGSINDVTPIPHNGCRPPKKRRV

SEQ ID NO: 283 - DNA, 399 bp, marine gamma proteobacterium HTCC2080
  CDS (1)..(399): transl_table=11
atggccaagaacgccaagaacagtaagacaacgaaacgcaagatcactaagcaggtggtcgacggtgtcgcccacgtgcatgcgtcctttaacaatacgatcgtgaccattaccgaccgccaaggcaatacacttagctgggccacagcggggggctctggcttccgtggatccagaaaatctacgccgtttgctgcacaggtggctgcagaacgcgctggagaagccgccaaggagtatgggttaaaaaacctagacgttcaggttaaaggccccggtccaggccgtgagtcagcggttcgagcgttgaacagctgtggttacaagattactaacattaccgacgtgacgcccattccccataatggctgtcgcccccctaagaagcgccgcgtctaa

SEQ ID NO: 284 - protein, 132 aa, marine gamma proteobacterium HTCC2080
MAKNAKNSKTTKRKITKQVVDGVAHVHASFNNTIVTITDRQGNTLSWATAGGSGFRGSRKSTPFAAQVAAERAGEAAKEYGLKNLDVQVKGPGPGRESAVRALNSCGYKITNITDVTPIPHNGCRPPKKRRV

SEQ ID NO: 285 - DNA, 387 bp, Candidatus Desulfococcus oleovorans Hxd3
  CDS (1)..(387): transl_table=11
atggcgaaacgagtccagaccaagaaaaaggtaagaaagaatattgcaagcggggtggtccatattcagtccacctttaacaataccatcgtgaccgttaccgatgtggccggtaacgtgatctcctggtcgtcggccgggggccgcggattcaaggggtcgcgcaagagcacgccctttgccgcccagatggcgtccgaggacgcggtgaagaaggccatggcccagggcttgcagacggttgaagtctatgtcaagggaccggggccgggccgggaatcggcgctacgcgcccttcaggccgccgggcttaccgtgaccatgattcgggacgtaacccccattcctcacaacggctgccggcctcccaagcggcgccgggtgtaa

SEQ ID NO: 286 - protein, 128 aa, Candidatus Desulfococcus oleovorans Hxd3
MAKRVQTKKKVRKNIASGVVHIQSTFNNTIVTVTDVAGNVISWSSAGGRGFKGSRKSTPFAAQMASEDAVKKAMAQGLQTVEVYVKGPGPGRESALRALQAAGLTVTMIRDVTPIPHNGCRPPKRRRV

SEQ ID NO: 287 - DNA, 390 bp, Pseudomonas putida GB-1
  CDS (1)..(390): transl_table=11
atggcaaaacctgctgctcgtcctcgtaagaaaatcaaaaagacagtggttgatggcatcgcccacatccatgcgtctttcaacaacaccatcgtgaccatcaccgaccgtcagggcaatgctttgtcctgggcgacctccggtggttcgggtttccgtggttcgcgcaaatccaccccgttcgcagctcagatcgctgctgagcgtgctggtcaagctgcgctggaatacggtctgaagaacctcgacgttaacgtcaagggtccaggtccaggtcgtgagtccgccgttcgtgcattgaacagctgcggctacaagatcgccagcatcaccgacgtgacgcctatcccgcataacgggtgccgtccgccgaagaagcgtcgcgtgtaa

SEQ ID NO: 288 - protein, 129 aa, Pseudomonas putida GB-1
MAKPAARPRKKIKKTVVDGIAHIHASFNNTIVTITDRQGNALSWATSGGSGFRGSRKSTPFAAQIAAERAGQAALEYGLKNLDVNVKGPGPGRESAVRALNSCGYKIASITDVTPIPHNGCRPPKKRRV

SEQ ID NO: 289 - DNA, 390 bp, Marinobacter sp. ELB17
  CDS (1)..(390): transl_table=11
atggcaaagccaggtacacgtacccgtaaaaaggtgaaaaaaacggttgttgatggcgtcgcgcacattcacgcttccttcaacaacactatcgtgaccatttcggaccgccagggcaacgtattgtcttgggccactgctggtggttctggtttccgcggttcacgtaagagtacaccttttgctgcgcaggtagcagctgaaagagccggtaatgcggctgctgaatacggccttaaaaacctggatgttgaagtcaagggccccggccctggtcgtgaatctgcagttcgtgcgcttaactcgtgcggctacaagatcaacaacatcacagatgtgacgccgattccccacaacggatgtcgcccgcctaaaaagcgccgcgtctaa

SEQ ID NO: 290 - protein, 129 aa, Marinobacter sp. ELB17
MAKPGTRTRKKVKKTVVDGVAHIHASFNNTIVTISDRQGNVLSWATAGGSGFRGSRKSTPFAAQVAAERAGNAAAEYGLKNLDVEVKGPGPGRESAVRALNSCGYKINNITDVTPIPHNGCRPPKKRRV

SEQ ID NO: 291 - DNA, 390 bp, Erythrobacter sp. SD-21
  CDS (1)..(390): transl_table=11
atggcacgcgaaccaggccgcgtacggcgccgcgataagaagaacatttcttcgggcgtcgcgcacatcaacgccagcttcaacaacacgatgatcaccatcaccgacgcgcagggcaacgctatcagctggtccagcgccggcatgatgggcttcaagggcagccgcaagtcgactccctatgccgcacaggttgccgccgacgacgcaggccgtaaggccgccgaacacggcgtgcgcaccctcgaagtcgaagtgaagggcccgggctcgggtcgtgagagcgcgctgcgcggtctcgcggctgtgggcttcaccatcacctcgatccgcgacgtgacgccgatcccgcacaacggggtccgtccttccaagcgtcgtcgcgtctga

SEQ ID NO: 292 - protein, 129 aa, Erythrobacter sp. SD-21
MAREPGRVRRRDKKNISSGVAHINASFNNTMITITDAQGNAISWSSAGMMGFKGSRKSTPYAAQVAADDAGRKAAEHGVRTLEVEVKGPGSGRESALRGLAAVGFTITSIRDVTPIPHNGVRPSKRRRV

SEQ ID NO: 293 - DNA, 399 bp, unidentified eubacterium SCB49
  CDS (1)..(399): transl_table=11
atggcaaaggcaaatccaaaagctaaaagcacaaaaaaacgtaaagttaatgtggagtctgtaggtgcagcgcacataacagcgtcattcaataatattattgtttcgttgacaaataaagcaggagatgttatctcttggtcatctgccggtaaaatgggcttcagaggatctaagaaaaatactccttatgcagcacaattagcttctgaagactgtgcaaaagttgctcacgaagcaggaatgcgtaaatgtaaagtatacgttaaaggaccaggaaatggtagagaatctgctattcgtgcaatacataatatgggaatagaagtaacagaaattattgatgttactccaatgccacataatggttgtcgtcctgcaaaaagacgtagagtataa

SEQ ID NO: 294 - protein, 132 aa, unidentified eubacterium SCB49
MAKANPKAKSTKKRKVNVESVGAAHITASFNNIIVSLTNKAGDVISWSSAGKMGFRGSKKNTPYAAQLASEDCAKVAHEAGMRKCKVYVKGPGNGRESAIRAIHNMGIEVTEIIDVTPMPHNGCRPAKRRRV

SEQ ID NO: 295 - DNA, 636 bp, Opitutaceae bacterium TAV2
  CDS (1)..(636): transl_table=11
atggccgaagaaacgtctgctcccaagaaagagaaggctcccaagaaggaagcctccgccgctgctcccgctgccggcgcccctgtcgccgccgagaagcccgccaaggctcccaaggccgccaagcccgccgctgaaggcgaggccgccgctcccgccgctcctgcggctgcctcggcagaaaaacccgttgaactcgtcggtggcgttgccaagcagcccaccgctgaagagctcctcaaggaagagcttggcgcgatcaagatccgccgtgccaagggctccaagaacgtcacctcgggcatcgccacggtgctcgcctcgttcaacaacaccatcgtctcgatcaccgacgccaaggggcaggtcatcgcctggtccagcgccggcaagtgcaacttccgcggttcgcgcaagtccaccgcctacgccgctcaggtcgtcgcccaggacgccgcccgcaacgccatgtcgcacggactcaaggacgtcaccatccgcctctccggccccggcctcggacgcgacagcgccgtccgcgccctgcaagccatcggcctcgaaatcaactccatcatcgacgtcacgccggtgccgcacaacggctgccgtccacgcaagcgccgccgcgtctaa

SEQ ID NO: 296 - protein, 211 aa, Opitutaceae bacterium TAV2
MAEETSAPKKEKAPKKEASAAAPAAGAPVAAEKPAKAPKAAKPAAEGEAAAPAAPAAASAEKPVELVGGVAKQPTAEELLKEELGAIKIRRAKGSKNVTSGIATVLASFNNTIVSITDAKGQVIAWSSAGKCNFRGSRKSTAYAAQVVAQDAARNAMSHGLKDVTIRLSGPGLGRDSAVRALQAIGLEINSIIDVTPVPHNGCRPRKRRRV

SEQ ID NO: 297 - DNA, 456 bp, Maconellicoccus hirsutus
  CDS (1)..(456)
atggcgccacgaaaaggaaaacaacagcaagaacaagttcaagtagctttgggcccccaagttaaagacggagaggacgtattcggtgtcgcacatatattcgctagctttaacgatactttcgtccatgtcaccgatttatcggggagagaaacgattgctcgtgttaccggtggtatgaaagtaaaagctgacagagatgaagcttctccctatgctgctatgttggctgcacaggatgttgccgagaaatgtagagcagtaggaatcactgcattgcacatcaaattgagagctaccggtggaaataaaacgaaaacgccaggtccaggagctcaatctgctctgagagctttagccagatccggaatgcatattggacgaattgaagacgtaacaccaattccttctgatgctacccgaaggaaaggaggtagacgtggtcgcagattgtaa

SEQ ID NO: 298 - protein, 151 aa, Maconellicoccus hirsutus
MAPRKGKQQQEQVQVALGPQVKDGEDVFGVAHIFASFNDTFVHVTDLSGRETIARVTGGMKVKADRDEASPYAAMLAAQDVAEKCRAVGITALHIKLRATGGNKTKTPGPGAQSALRALARSGMHIGRIEDVTPIPSDATRRKGGRRGRRL

SEQ ID NO: 299 - DNA, 489 bp, Oryza sativa subsp
  CDS (1)..(489)
atgtcgaagaggaagaccagggagcctaaggaggagaatgtcactcttggacccactgtccgtgaaggagagtatgtgttcggagttgcccacatcttcgcatccttcaatgacactttcattcatgtcactgacttgtctggaagggaaactcttgttcgcattactggtggcatgaaggtcaaagctgaccgtgatgagtcatcaccatatgcagctatgcttgcttctcaagatgttgcacagcgttgcaaggagcttggtattactgctctgcacatcaagcttcgtgccactggaggcaacaagacaaagacacccggtcctggtgctcaatctgctcttagggctcttgctcgctctggcatgaagattggtcgcattgaggatgtgaccccggttcccacggacagcacccgcagaaagggagtactggaactagtcaattctaagctagcattaggaggtgattcattctctctgaggtga

SEQ ID NO: 300 - protein, 162 aa, Oryza sativa subsp
MSKRKTREPKEENVTLGPTVREGEYVFGVAHIFASFNDTFIHVTDLSGRETLVRITGGMKVKADRDESSPYAAMLASQDVAQRCKELGITALHIKLRATGGNKTKTPGPGAQSALRALARSGMKIGRIEDVTPVPTDSTRRKGVLELVNSKLALGGDSFSLR

SEQ ID NO: 301 - DNA, 489 bp, Oryza sativa subsp
  CDS (1)..(489)
atgtccgggaggaagaagacacgggagcccaaggaggagaacgtcaccctcggcccgaccgtgcgcgagggcgagtacgtcttcggcgtcgcccacatcttcgcctccttcaacgacaccttcatccatgtcaccgatctgtccgggagggagacgctcgtccgcatcactggtggcatgaaggttaaagctgatcgcgacgaatcttccccttatgctgctatgcttgcttcacaggatgttgctcaaagatgcaaggagcttggaataactgctttgcatatcaagctccgtgctactggtggtaacaagacaaaaacccctggtcctggtgctcagtccgcacttagagcacttgctcgatctggcatgaagattggtcgtattgctgatgacgtcttgtcaattttctgtcatacagaggatgttactccagtgccgactgatagcacacgcagaaagggtggtagaaggggtaggaggctgtaa

SEQ ID NO: 302 - protein, 162 aa, Oryza sativa subsp
MSGRKKTREPKEENVTLGPTVREGEYVFGVAHIFASFNDTFIHVTDLSGRETLVRITGGMKVKADRDESSPYAAMLASQDVAQRCKELGITALHIKLRATGGNKTKTPGPGAQSALRALARSGMKIGRIADDVLSIFCHTEDVTPVPTDSTRRKGGRRGRRL

SEQ ID NO: 303 - DNA, 471 bp, Oryza sativa subsp
  CDS (1)..(471)
atggagcagaggttcaagtccgggaggaagaagacgcgagagcccaaggaggagaacgtgacgctcggccccacggtccgcgagggcgagtacgtcttcggcgtcgcgcacatcttcgcgtcgttcaacgacaccttcatccacgtgacggatctgtccggcagggagacgctcgtccgcatcaccggtggcatgaaggtgaaagctgaccgtgatgagtcatccccttatgctgccatgcttgcatcccaggatgttgcacagagatgcaaggagcttggaattactgctctgcacattaagctccgtgctactggtggaaacaagacaaaaactcctggtcctggtgctcaatctgcgcttagagctcttgcacgttctggcatgaagattggacgcattgaggatgttactccagtcccaactgacagtacccgcagaaagggtggcagaagaggaaggaggctgtaa

SEQ ID NO: 304 - protein, 156 aa, Oryza sativa subsp
MEQRFKSGRKKTREPKEENVTLGPTVREGEYVFGVAHIFASFNDTFIHVTDLSGRETLVRITGGMKVKADRDESSPYAAMLASQDVAQRCKELGITALHIKLRATGGNKTKTPGPGAQSALRALARSGMKIGRIEDVTPVPTDSTRRKGGRRGRRL

SEQ ID NO: 305 - DNA, 393 bp, Magnetospirillum gryphiswaldense
  CDS (1)..(393): transl_table=11
atggcaaagcctgctgccgctcgtccgcgtcgtcgcgagcgcaaaaacatcacctccggtgttgctcacgtgaactccacgttcaacaacaccatgatcaccatcaccgacgcccagggcaacaccatctcgtggtcgtcctcgggtatgcagggcttcaagggctcgcgcaagtcgaccccgtacgccgcccaggtggctgccgaagacgctggccgcaaggccatggaacacggcatgcgcaccctggaagtggaagtcaagggtccgggcgctggtcgtgaaagcgccttgcgcgcgctgcaggcggtgggcttttccatcacctcgatccgcgacgtcactccgatcccgcacaacggttgccgtccgcgcaagcgtcgtcgcgtctga

SEQ ID NO: 306 - protein, 130 aa, Magnetospirillum gryphiswaldense
MAKPAAARPRRRERKNITSGVAHVNSTFNNTMITITDAQGNTISWSSSGMQGFKGSRKSTPYAAQVAAEDAGRKAMEHGMRTLEVEVKGPGAGRESALRALQAVGFSITSIRDVTPIPHNGCRPRKRRRV

SEQ ID NO: 307 - DNA, 453 bp, Vitis vinifera
  CDS (1)..(453)
atgtcgaggaggaaggtcagggaaccaaaggaagaaaatgtaacccttggaccaactgtaagggatggagaacatgtttttggtgtggctcacatttttgcttccttcaatgacacattcattcatgtgactgatttgtctggcagagagaccttggttcgcatcactggtggcatgaaggtgaaagctgacagggatgagtcttcaccatatgcagccatgcttgcggcccaagatgtttcacaaagatgcaaggaacttggcgttactgctcttcatatcaagctccgtgccactggaggaaataagaccaagacacctggtcctggtgcccagtctgctctccgagcccttgctcgttctggaatgagaattggtcgcatagaggatgttaccccaatccccactgacagcactcgaagaaagggtggaagaagagggagaagactgtga

SEQ ID NO: 308 - protein, 150 aa, Vitis vinifera
MSRRKVREPKEENVTLGPTVRDGEHVFGVAHIFASFNDTFIHVTDLSGRETLVRITGGMKVKADRDESSPYAAMLAAQDVSQRCKELGVTALHIKLRATGGNKTKTPGPGAQSALRALARSGMRIGRIEDVTPIPTDSTRRKGGRRGRRL

SEQ ID NO: 309 - DNA, 399 bp, Gnetum parvifolium
  CDS (1)..(399): transl_table=11
atggcactaacaaaaccgaaaaaaatacctagatatagacgtaataagccagaaatacgcaaagtggataaaggaattatccatatccgagcaagttttaataataccattattaccgtgacaaatgttttaggatgtgtgatttcttggtcctccgccggcgcttgtggttttaaaggaccgaaaaagggctcagcgtttgctgctcagaaagctaccgaaaacgttattcgtatggttgttattaaccgtgcaaccgttttgataactggctgcggtaagggacgagatgcagcattacgtgtaattcaccaaaattacatacctatacacgctgtgcttgatgtaacccccactccccataatgggtgtagacctcctgtaaaaagacgtatataa

SEQ ID NO: 310 - protein, 132 aa, Gnetum parvifolium
MALTKPKKIPRYRRNKPEIRKVDKGIIHIRASFNNTIITVTNVLGCVISWSSAGACGFKGPKKGSAFAAQKATENVIRMVVINRATVLITGCGKGRDAALRVIHQNYIPIHAVLDVTPTPHNGCRPPVKRRI

SEQ ID NO: 311 - DNA, 522 bp, Vitis vinifera
  CDS (1)..(522)
atggcaagattatgtgacggctgtaaatgttttatactttttttgtgctttgattattttataacttttaattcaaggaggaaggttagagagcccaaggaggaaaatgtgacactcggacccactgtaagggatggggagcatgcttttggtgtggcccatatttttgcatcatttaacgatacattcatccatgttactgacttgtctgggagagaaacccttgttcgcattactggtggtatgaaggtaaaagctgacagggatgaatcgtcaccatatgcagccatgcttgcagcacaagatgttgctcaaagatgcaaggaacttggaatcactgccctccacattaagctccgggctactggagggaacaagactaagacccctggtccaggcgcccagtctgcgcttagagccctggctaggtcaggcatgagaattggccgcatagaggatgttactcccattcctactgacagtacgcgaagaaaaggtggcagaaggggaagaaggttgtga

SEQ ID NO: 312 - protein, 173 aa, Vitis vinifera
MARLCDGCKCFILFLCFDYFITFNSRRKVREPKEENVTLGPTVRDGEHAFGVAHIFASFNDTFIHVTDLSGRETLVRITGGMKVKADRDESSPYAAMLAAQDVAQRCKELGITALHIKLRATGGNKTKTPGPGAQSALRALARSGMRIGRIEDVTPIPTDSTRRKGGRRGRRL

SEQ ID NO: 313 - DNA, 417 bp, Vitis vinifera
  CDS (1)..(417)
atggcaaaacctataccaagaattggttcacgtaggaatggacgtattggttcacataagagtgcgcgtagagtaccaaagggagttattcatgttcaagcaagttttaacaataccattgtgactgttacagatgtacgaggtcgggtggtttcttggtcctcggccggtacttgtggattcaggggtacaagaagagggacgccatttgctgctcaaaccgcagcaggaaatgctattcgtacagtagtggatcaaggtatgcaacgagcagaagtcatgataaagggtcctggtctcggaagagatgcagcattacgagctattcttagaagtggtatactattaagtttcgtacgggatgtaactcctatgccacataacggctgtagacctcctaaaaaaagacgtgtatag

SEQ ID NO: 314 - protein, 138 aa, Vitis vinifera
MAKPIPRIGSRRNGRIGSHKSARRVPKGVIHVQASFNNTIVTVTDVRGRVVSWSSAGTCGFRGTRRGTPFAAQTAAGNAIRTVVDQGMQRAEVMIKGPGLGRDAALRAILRSGILLSFVRDVTPMPHNGCRPPKKRRV

SEQ ID NO: 315 - DNA, 579 bp, Vitis vinifera
  CDS (1)..(579)
atgtttctttatgaggaactatgtcttcttgttcaattttgtgtccaaaaatttctaagaaagcatacatattattgcaggattgaacttattactttgaatagaaggtttagaccccaaatttctctgtcgaggaggaaggtcagggaaccaaaggaagaaaatgtaacccttggaccaactgtaagggatggagaacatgtttttggtgtggctcacatttttgcttccttcaatgacacattcattcatgtgactgatttgtctggcagagagaccttggttcgcatcactggtggcatgaaggtgaaagctgacagggatgagtcttcaccatatgcagccatgcttgcggcccaagatgtttcacaaagatgcaaggaacttggcgttactgctcttcatatcaagctccgtgccactggaggaaataagaccaagacacctggtcctggtgcccagtctgctctccgagcccttgctcgttctggaatgagaattggtcgcatagaggatgttaccccaatccccactgacagcactcgaagaaagggtggaagaagagggagaagactgtga

SEQ ID NO: 316 - protein, 192 aa, Vitis vinifera
MFLYEELCLLVQFCVQKFLRKHTYYCRIELITLNRRFRPQISLSRRKVREPKEENVTLGPTVRDGEHVFGVAHIFASFNDTFIHVTDLSGRETLVRITGGMKVKADRDESSPYAAMLAAQDVSQRCKELGVTALHIKLRATGGNKTKTPGPGAQSALRALARSGMRIGRIEDVTPIPTDSTRRKGGRRGRRL

SEQ ID NO: 317 - DNA, 471 bp, Vitis vinifera
  CDS (1)..(471)
atggacaaccctaggtttgaatcgaggaggaaggttagagaacccaaggaagaaaatgtgacacttggacccactgtaagagatggagagcatgttttcggtgttgcccatatctttgcatcatttaatgatactttcattcatgtgactgacttgtcaggaagagaaactcttgttcgcattactggtggtatgaaggtgaaagctgacagggatgagtcatccccatatgcagccatgcttgcagctcaggatgttgcccaaagatgcaaggaacttggaatcactgctcttcacattaagctccgtgctacaggtggtaataaaacaaaaacacctggtccaggtgcccagtctgcactcagggctcttgctcgttctggaatgagaattggtcgtatagaggatgtgaccccaatcccaactgacagcactaggagaaagggtggtagaagagggagaaggctgtaa

SEQ ID NO: 318 - protein, 156 aa, Vitis vinifera
MDNPRFESRRKVREPKEENVTLGPTVRDGEHVFGVAHIFASFNDTFIHVTDLSGRETLVRITGGMKVKADRDESSPYAAMLAAQDVAQRCKELGITALHIKLRATGGNKTKTPGPGAQSALRALARSGMRIGRIEDVTPIPTDSTRRKGGRRGRRL

SEQ ID NO: 319 - DNA, 417 bp, Vitis vinifera
  CDS (1)..(417)
atggcaaaacctataccaagaattggttcacgtaggaatggacgtattggttcacataagagtgcgcgtagagtaccaaagggagttattcatgttcaagcaagttttaacaataccattgtgaccgttactgatgtacggggtcgggtggtttcttggtcctcggccggtacttgtggattcaggggtacaagaagagggacgccatttgctgctcaaaccgcagcaggaaatgctattcgtacagtagtggatcaaggtatgcaacgagcagaagtcatgataaagggtcctggtctcggaagagatgcagcattacgagctattcgtagaagtggtatactattaagtttcgtacgggatgtaactcctatgccacataacggctgtagacctcctaaaaaaagacgtgtatag

SEQ ID NO: 320 - protein, 138 aa, Vitis vinifera
MAKPIPRIGSRRNGRIGSHKSARRVPKGVIHVQASFNNTIVTVTDVRGRVVSWSSAGTCGFRGTRRGTPFAAQTAAGNAIRTVVDQGMQRAEVMIKGPGLGRDAALRAIRRSGILLSFVRDVTPMPHNGCRPPKKRRV

SEQ ID NO: 321 - DNA, 456 bp, Diaphorina citri
  CDS (1)..(456)
atggcaccacgtaaaggaaaagtacagaaagaagaagtgttggtgtctcttggacctcaagttaaggaaggtgaagatgtgtttggagttgctcacattttcgccagtttcaatgacacctttgtccacgttactgatttgtccggccgtgaaaccattgctagaatcaccggaggaatgaaagtgaaggctgacagagatgaggcttcaccatatgctgctatgttggctgcacaggatgttgctgaaaaatgcaaaactctaggaatcactgcactacacatcaagctgagagccaccggtggaaacagaaccaagaccccaggacctggagctcaatctgcactccgagctttagcccgttccaacatgaaaattggcagaattgaagatgttacacccatcccatctgattccaccagaaggaagggaggtcgcagaggtagacgtctgtaa

SEQ ID NO: 322 - protein, 151 aa, Diaphorina citri
MAPRKGKVQKEEVLVSLGPQVKEGEDVFGVAHIFASFNDTFVHVTDLSGRETIARITGGMKVKADRDEASPYAAMLAAQDVAEKCKTLGITALHIKLRATGGNRTKTPGPGAQSALRALARSNMKIGRIEDVTPIPSDSTRRKGGRRGRRL

SEQ ID NO: 323 - DNA, 435 bp, Phaeosphaeria nodorum
  CDS (1)..(435)
atgcctcccaagaagaaggtcgagcgcggtgcgcaggagaacatccagggcgagctcgtcttcggcgttgcccgcattttcgcttccttcaacgacaccttcgtccacatcaccgatctgtccggccgcgaaaccatctcccgtgtcaccggtggcatgaaggtcaaggctgaccgtgacgagtcctccccctacgctgccatgttggcggcccaggacgtcgctgcccgctgcaaggaactcggcatctctgccctccacgtcaagatcagggccactggtggaaacggcaccaagacccccggccccggtgcccagtctgctctccgcgcgcttgcccgtgccggtatgcgcattggacgtatcgaggatgtcacccccaccccgtccgactccaccaggaggaagggtggtcgccgtggtcgtcgtctctga

SEQ ID NO: 324 - protein, 144 aa, Phaeosphaeria nodorum
MPPKKKVERGAQENIQGELVFGVARIFASFNDTFVHITDLSGRETISRVTGGMKVKADRDESSPYAAMLAAQDVAARCKELGISALHVKIRATGGNGTKTPGPGAQSALRALARAGMRIGRIEDVTPTPSDSTRRKGGRRGRRL

SEQ ID NO: 325 - DNA, 390 bp, Spiroplasma citri
  CDS (1)..(390): transl_table=4
atggctgttagaaaaaaaacgaataagaaaaaagttaaaaaaaatgtcctaaaaggaattgcacatattcattcaactttcaataatacaattgttactctttctgatgaagcgggtaatgtcatttcatgagcatcagcaggggcaatgggttttaaaggaagcaaaaagtcaactccttatgctgctcaaatggttgctgaagcagctgggaaagcaagccaagaacacggaatgagtagtgttcaagttgaagtaaaagggccaggcccagggcgtgatgctgcggtacggagcattcaaacaattggattagaaatcacttcaattaaagatgtaactccaattcctcacaatggggcacgcccaccaaaaaggccaagaggatag

SEQ ID NO: 326 - protein, 129 aa, Spiroplasma citri
MAVRKKTNKKKVKKNVLKGIAHIHSTFNNTIVTLSDEAGNVISWASAGAMGFKGSKKSTPYAAQMVAEAAGKASQEHGMSSVQVEVKGPGPGRDAAVRSIQTIGLEITSIKDVTPIPHNGARPPKRPRG

SEQ ID NO: 327 - DNA, 378 bp, Candidatus Kuenenia stuttgartiensis
  CDS (1)..(378): transl_table=11
atgtctaaaactagcaaaaaaattaggcgcaatgttacaagagctatcgcaaatattaaagctacatttaataatacttatgtgacaatagcagatgttaatggtgagacaatttgctgggcaagtgctggtaccgcaggttataaaggatcccggaaaagcaccccttttgcagctcaaaaagcagcgacaagtgctgctgaaaaagcacagaaatatggaatacaagaaatagaaataagagttaaggggcctgggcctggcagagaatctgctatcacggcccttcaagccgcaggattgagtgtaaaagcgatagaagatgttacgcctcttccacataatggttgcagaccccgtaaaaagcgcagggtgtaa

SEQ ID NO: 328 - protein, 125 aa, Candidatus Kuenenia stuttgartiensis
MSKTSKKIRRNVTRAIANIKATFNNTYVTIADVNGETICWASAGTAGYKGSRKSTPFAAQKAATSAAEKAQKYGIQEIEIRVKGPGPGRESAITALQAAGLSVKAIEDVTPLPHNGCRPRKKRRV

SEQ ID NO: 329 - DNA, 378 bp, Medicago truncatula
  CDS (1)..(378)
atggattttgagatggatgcgaaaaagctaaggcggcctcgtaaaataccaaagggagttatttatgttcaagctagtttcaacaataccattgtgactgttacaaatgtacgaggtcgggcgatttcttggtcctctgccggttcgtgtggattcaagggtacacgaagggggacaccatttgccgctcaaaccgcagcagcaaatgctattcgaacagcagtagatcaaggcatgcaacgagccgtagtcataataaaaggtcccggtctaggaagagatgcggcattaagagctattgctagaagtggtatactattaagatttatacgggatgtaacccctatcccacataatggatgtagggctacattgtga

SEQ ID NO: 330 - protein, 125 aa, Medicago truncatula
MDFEMDAKKLRRPRKIPKGVIYVQASFNNTIVTVTNVRGRAISWSSAGSCGFKGTRRGTPFAAQTAAANAIRTAVDQGMQRAVVIIKGPGLGRDAALRAIARSGILLRFIRDVTPIPHNGCRATL

SEQ ID NO: 331 - DNA, 453 bp, Aspergillus oryzae
  CDS (1)..(453)
atggcccccaagcagaagaccgctgccgctaaggagaacgtcactctcggccctctggccggagatggcaagctcgttttcggcgttgcccgtatcttcgcctccttcaacgataccttcgtccacgtcaccgatctgagtggtcgcgaaaccatctgccgtgtcaccggtggtatgaaggtcaaggctgaccgtgacgagtcttctccttacgctgccatgttggctgctcaggatgttgctgcccgttgcaaggagctcggtatcaacgctctccacatcaagatccgtgctaccggtggtaacggtaccaagacccccggtcccggtgctcagtccgccctccgtgctcttgcccgttccggcatgagaatcggccgtatcgaggacgtcacccccactccctccgactctactcgtcgcaagggtggtcgccgtggtcgtcgtctctag

SEQ ID NO: 332 - protein, 150 aa, Aspergillus oryzae
MAPKQKTAAAKENVTLGPLAGDGKLVFGVARIFASFNDTFVHVTDLSGRETICRVTGGMKVKADRDESSPYAAMLAAQDVAARCKELGINALHIKIRATGGNGTKTPGPGAQSALRALARSGMRIGRIEDVTPTPSDSTRRKGGRRGRRL

SEQ ID NO: 333 - DNA, 453 bp, Solanum tuberosum
  CDS (1)..(453)
atgtcgaggagaaagaccagggagcctaaggaagagactgttacacttggaccagcaacgagggaaggtgaattggtgttcggtgttgcacacatttttgcatcgttcaatgatacattcattcacgttactgatttgtctggaagagaaactatggttcgcattactggtggaatgaaggtgaaggctgacagagatgagtcttctccatatgctgctatgcttgctgctcaggatgtgtcacagcgatgcaaggaacttggaattaatgctcttcacattaagctccgagctacaggaggcaacaagaccaagactcctggtcctggtgcccagtccgctcttagagctttggctcgttctggcatgaaaattggacgtatagaggatgttactccaattcctaccgatagtactcgcagaaagggtggtagaaggggaaggaggctgtga

SEQ ID NO: 334 - protein, 150 aa, Solanum tuberosum
MSRRKTREPKEETVTLGPATREGELVFGVAHIFASFNDTFIHVTDLSGRETMVRITGGMKVKADRDESSPYAAMLAAQDVSQRCKELGINALHIKLRATGGNKTKTPGPGAQSALRALARSGMKIGRIEDVTPIPTDSTRRKGGRRGRRL

SEQ ID NO: 335 - DNA, 453 bp, Solanum tuberosum
  CDS (1)..(453)
atgtcgaagaggagaactagggagccaaaggaagagaccgtcactcttggtccttctgtgagagagggagagcttgttttcggtgtcgctcacatttttgcatcattcaatgacactttcattcacgtgactgatttgtctggacgggaaacaatggttcgtattactggtgggatgaaggtcaaagctgatagggatgaatcttccccatatgctgctatgcttgctgcacaagatgtttctcagagatgcaaggagcttggcatcaatgcacttcacatcaagcttcgagccactggtggaaacaagaccaaaacacctggacctggtgctcagtctgctctcagggctcttgctcgttcaggaatgaaaattggtcgtatagaggacgtgactccaattcctactgatagcactcgcagaaagggtggtaggagaggaagaaggctgtaa

SEQ ID NO: 336 - protein, 150 aa, Solanum tuberosum
MSKRRTREPKEETVTLGPSVREGELVFGVAHIFASFNDTFIHVTDLSGRETMVRITGGMKVKADRDESSPYAAMLAAQDVSQRCKELGINALHIKLRATGGNKTKTPGPGAQSALRALARSGMKIGRIEDVTPIPTDSTRRKGGRRGRRL

SEQ ID NO: 337 - DNA, 405 bp, Corynebacterium ammoniagenes
  CDS (1)..(405): transl_table=11
atggctcagaagactcagtccacgtcgcgccgttccggccgtcgtgtagtcaagaagaacgtggcccagggccacgcttacattaagtcaaacttcaacaacaccatcgtgtccatcacggacccatccggtgctgttatctcttggtcatcttccggacaggttggtttcaagggatcccgtaagtccactccattcgcagcgcagatggcagcagagtctgcagcacgcaaggcgatggagcacggcatgaagaaggttgacgtattcgttaagggcccaggttcgggccgcgaaaccgcaatccgctcactacaggccgccggcttggaagtttcgtccatctctgacgtaactcctcagccacacaatggctgccgaccaccgaagcgtcgccacgtttaa

SEQ ID NO: 338 - protein, 134 aa, Corynebacterium ammoniagenes
MAQKTQSTSRRSGRRVVKKNVAQGHAYIKSNFNNTIVSITDPSGAVISWSSSGQVGFKGSRKSTPFAAQMAAESAARKAMEHGMKKVDVFVKGPGSGRETAIRSLQAAGLEVSSISDVTPQPHNGCRPPKRRHV

SEQ ID NO: 339 - DNA, 456 bp, Curculio glandium
  CDS (1)..(456)
  misc_feature (171)..(171): w is a or t
  misc_feature (229)..(229): s is g or c
  misc_feature (230)..(230): m is a or c
  misc_feature (308)..(308): w is a or t
  misc_feature (328)..(328): s is g or c
atggcaccaaggaaaggaaaagttcaaaaagaagaagttcaagtgtctctaggacctcaggtccgtgagggagaaattgtttttggagtagctcacatctttgctagtttcaatgatacatttgtacatgtcacagatttatcaggtagagaaactatttcaagagttacwggaggcatgaaagtaaaagcagatcgtgatgaagcttctccttacgctgctatgttasmtgcccaagatgtggctgaaaaatgcaagtcccttggtatcacagcactccacattaaactgagagctactggaggcawcaagactaaaactcccggcsctggagctcaaagtgctcttagagctttggctcgttcaaacatgaaaatcggacgtattgaagacgtcacacctattccttctgactccacccgcaggaagggaggtcgccgtggtcgtagattgtaa

SEQ ID NO: 340 - protein, 151 aa, Curculio glandium
  misc_feature (77)..(77): The Xaa at location 77 stands for Ala, Asp, His, or Pro.
  misc_feature (103)..(103): The Xaa at location 103 stands for Asn, or Ile.
  misc_feature (110)..(110): The Xaa at location 110 stands for Ala, or Pro.
MAPRKGKVQKEEVQVSLGPQVREGEIVFGVAHIFASFNDTFVHVTDLSGRETISRVTGGMKVKADRDEASPYAAMLXAQDVAEKCKSLGITALHIKLRATGGXKTKTPGXGAQSALRALARSNMKIGRIEDVTPIPSDSTRRKGGRRGRRL

SEQ ID NO: 341 - DNA, 456 bp, Ixodes scapularis
  CDS (1)..(456)
atggcaccacgtaaaggaaagcagaaggaagaacagcccgtcgtggccttaggcccgcaagctctcggaggcgaaaacgtgtttggcgtagcccacatatacgccagtttcaacgacaccttcgttcacgtcaccgatctctccggcagggaaaccattgctcgggtgacgggtggcatgaaggtgaaggccgaccgtgatgaggcatctccctacgcggccatgttggctgctcaggacgtggccgagaaatgcaagcaggtcggcatcactgcacttcacatcaagctgcgtgccacagggggaacacggacaaagacgcctggaccgggagctcagtctgctctccgggccttggcccgttcagacatgaagattggccgcattgaggatgtgacgccaatcccatcagacagcactcggaggaaaggcggtcgtcggggcaggcgtctgtaa

SEQ ID NO: 342 - protein, 151 aa, Ixodes scapularis
MAPRKGKQKEEQPVVALGPQALGGENVFGVAHIYASFNDTFVHVTDLSGRETIARVTGGMKVKADRDEASPYAAMLAAQDVAEKCKQVGITALHIKLRATGGTRTKTPGPGAQSALRALARSDMKIGRIEDVTPIPSDSTRRKGGRRGRRL

SEQ ID NO: 343 - DNA, 456 bp, Lysiphlebus testaceipes
  CDS (1)..(456)
atggcaccaagaaaaaacaaagctccaaaagaagacgtccaacttcaacttggaccacaagtacgtgaaggtgaagatgtatttggtgttgcacatatttttgcaagtttcaatgatacatttgttcatgttactgatttaacaggccgtgaaacaattgttcgtgtaactggtggcatgaaagttaaggcagatcgtgatgaagcatctccttatgccgctatgttggcagctcaggatgttgctgaaaaatgtaaatcacttggcattactgctcttcatattaaattgagagcaactggtggtaacagaacaaaaacaccaggaccaggtgcacaatcagcacttcgtgctcttgctcgttcatcaatgaaaattggacgtattgaagatgttacaccaattccatcagattcaacacgcagaaagggtggtcgtcgtggtcgcagactttaa

SEQ ID NO: 344 - protein, 151 aa, Lysiphlebus testaceipes
MAPRKNKAPKEDVQLQLGPQVREGEDVFGVAHIFASFNDTFVHVTDLTGRETIVRVTGGMKVKADRDEASPYAAMLAAQDVAEKCKSLGITALHIKLRATGGNRTKTPGPGAQSALRALARSSMKIGRIEDVTPIPSDSTRRKGGRRGRRL

SEQ ID NO: 345 - DNA, 456 bp, Bombyx mori
  CDS (1)..(456)
atggccccgagaaaaaacaaagttgctaaagaggaggtccaggtgaccctcgggccccagcatttagtgggcgaaacagtgtttggtgtagcacacattttcgcttcattcaatgacacattcgttcatgttactgatttatccggccgggaaactatcgcccgtgtcactggtggcatgaaggtgaaggctgaccgtgatgaagcgtcaccctacgctgctatgttggcggcacaggatgtagcagagaaatgcaaaactcttggcataacggccttgcacataaagctccgtgctactggtggaaacaaaacaaagacccctggtcctggtgctcagtctgcacttcgggctcttgctcgttcaagtatgaagattggccgcattgaagatgtcacccccgtaccatcagactcgacccgtaggaagggtggccgaagaggacgcaggctgtaa

SEQ ID NO: 346 - protein, 151 aa, Bombyx mori
MAPRKNKVAKEEVQVTLGPQHLVGETVFGVAHIFASFNDTFVHVTDLSGRETIARVTGGMKVKADRDEASPYAAMLAAQDVAEKCKTLGITALHIKLRATGGNKTKTPGPGAQSALRALARSSMKIGRIEDVTPVPSDSTRRKGGRRGRRL

SEQ ID NO: 347 - DNA, 456 bp, Dascillus cervinus
  CDS (1)..(456)
atggcgccacgaaaaggaaaagttcagaaagaggaagtacaagtgtcgttaggaccacaagttcgcgaaggagaaattgtctttggtgtagctcacatttttgccagtttcaatgacacttttgtccatgtaacggatttgtcaggccgagaaactatctcaagagttacaggtggcatgaaagtgaaagcagacagagatgaagcttctccgtatgctgcaatgttagcagctcaagatgtggcagaaaagtgcaaggcattgggaataacggctcttcacataaaactgagggctacaggtggaaacaagacaaaaacccctggtccaggtgctcagagtgctttacgtgcattagctcgttcaaatatgaagattggccgtattgaagatgttactccaattccgtcagattccacacgcagaaagggaggtcgtcgtggccgtaggctgtaa

SEQ ID NO: 348 - protein, 151 aa, Dascillus cervinus
MAPRKGKVQKEEVQVSLGPQVREGEIVFGVAHIFASFNDTFVHVTDLSGRETISRVTGGMKVKADRDEASPYAAMLAAQDVAEKCKALGITALHIKLRATGGNKTKTPGPGAQSALRALARSNMKIGRIEDVTPIPSDSTRRKGGRRGRRL

SEQ ID NO: 349 - DNA, 456 bp, Branchiostoma belcheri tsingtauense
  CDS (1)..(456)
atggctccccgcaagggtaagaaggagaaggaagaacaggtcatctctctggggccgcaggtcgcggagggcgagaacgttttcggcgtcgcccacatcttcgcttcattcaacgacacattttgccacgtcacagatctctcgggcagagagacgattgtccttgtgactggcgggatgaaggtcgaggccgatcgtgacgaggcttccccctacgccgccatgttggcagcccaggacgtggccacccgctgtaaagaaatcggcatcaccgccctgcacatcaagctcagggctacgggaggaaacaagaccaagactccaggcccaggcgcccagtctgccctgagagcgctggcaagatcgggcatgaagatcggccgtattgaggacgtgacgcctatcccatcagacagcacgcgtaggagcggtggacgtcgcggtcgccgtctctag

SEQ ID NO: 350 - protein, 151 aa, Branchiostoma belcheri tsingtauense
MAPRKGKKEKEEQVISLGPQVAEGENVFGVAHIFASFNDTFCHVTDLSGRETIVLVTGGMKVEADRDEASPYAAMLAAQDVATRCKEIGITALHIKLRATGGNKTKTPGPGAQSALRALARSGMKIGRIEDVTPIPSDSTRRSGGRRGRRL

SEQ ID NO: 351 - DNA, 378 bp, uncultured marine gamma proteobacterium EBAC20E09
  CDS (1)..(378): transl_table=11
atggcagcaaaaggaaagaaaaataaaaaagtagtgaatgatggggtagctcatattcattcgtcttttaacaacactattgtgactattacagataaacaaggaaatacaatatgttgggcaacatcaggtggatccggattcaaaggctcaagaaaaagtacaccttttgcagctcaaattgctgctgataaggcaggaaatgcagctaaagaatttggcatggtaaatttagatgtaaaagtaaaaggcccggggggtggtagagagtctgctattagagcattaaatgcatgcggcttgaagatcaaaagcataaccgatgtaacacctttaccccacaatggatgtcgaccatctaaaaaaagacgagtttaa

SEQ ID NO: 352 - protein, 125 aa, uncultured marine gamma proteobacterium EBAC20E09
MAAKGKKNKKVVNDGVAHIHSSFNNTIVTITDKQGNTICWATSGGSGFKGSRKSTPFAAQIAADKAGNAAKEFGMVNLDVKVKGPGGGRESAIRALNACGLKIKSITDVTPLPHNGCRPSKKRRV

SEQ ID NO: 353 - DNA, 378 bp, uncultured bacterium 562
  CDS (1)..(378): transl_table=11
atggcagtaaaaggaaagaagggtaaaaaaattgttactgatggtgttgcacacattcactcatcatttaacaacacaattgtaaccataactgacaagcaaggtaataccgtatgttgggctacctcgggtggatctggttttaagggatcaagaaaaagtacaccatttgctgctcagatagctgcagataaagctggtaatgctgcaaaagaatttggaatgataaatttagacgttaaggttaaagggcctggtggtggaagagagtctgcaatcagatctttaaatgcgtgtggattaaaaattaaaagtatcacagatgttacgccactacctcacaatggttgtcgtccatctaagaaaagaagagtttaa

SEQ ID NO: 354 - protein, 125 aa, uncultured bacterium 562
MAVKGKKGKKIVTDGVAHIHSSFNNTIVTITDKQGNTVCWATSGGSGFKGSRKSTPFAAQIAADKAGNAAKEFGMINLDVKVKGPGGGRESAIRSLNACGLKIKSITDVTPLPHNGCRPSKKRRV

SEQ ID NO: 355 - DNA, 390 bp, Spiroplasma kunkelii
  CDS (1)..(390): transl_table=4
atggttgttagaaaaaaaacgaataagaaaaaaattaaaaaaaatatcctaaaaggaattgcacatgttcattcaactttcaataatacaattgttaccctttctgatgaagcgggtaatgtaatttcatgagcatcagcaggagcaatgggttttaaaggaagtaagaagtcaactccttatgccgcccaaatggttgctgaagcagctggaaaagcaagccaagaacacggaatgagtagtgttcaagttgaagtaaaaggcccaggcccagggcgtgatgctgcggtacggagcattcaagcaattggattagaaatcacttcaattaaagatgtaacgccaattcctcacaatggggcacgtccaccaaaaagaccaagaggatag

SEQ ID NO: 356 - protein, 129 aa, Spiroplasma kunkelii
MVVRKKTNKKKIKKNILKGIAHVHSTFNNTIVTLSDEAGNVISWASAGAMGFKGSKKSTPYAAQMVAEAAGKASQEHGMSSVQVEVKGPGPGRDAAVRSIQAIGLEITSIKDVTPIPHNGARPPKRPRG

SEQ ID NO: 357 - DNA, 393 bp, Candidatus Portiera aleyrodidarum
  CDS (1)..(393): transl_table=11
atggtaacaataaaatctagaaaaaaaaaagtactaaaaaaaaaagaaattataaatgcagtagcacatattaatgcttcttttaacaatactattgttacaataacagataaaaatggtaatactttagcttgggcaacttcagggggggctggttttaaaggatcgagaaaaagtactccgtttgctgcgcaaacggcaagtgaccgtgtagcaaaatcagcagcagaatgtggagtaaaatatatagatgttatagtaaagggaccaggtccaggccgagagtcagcagttagagcattgaattctcatggtattaatgtaaaaagtataacagacgcaactccaataccacataatggatgtcgtccacctaaaagaagaagagtataa

SEQ ID NO: 358 - protein, 130 aa, Candidatus Portiera aleyrodidarum
MVTIKSRKKKVLKKKEIINAVAHINASFNNTIVTITDKNGNTLAWATSGGAGFKGSRKSTPFAAQTASDRVAKSAAECGVKYIDVIVKGPGPGRESAVRALNSHGINVKSITDATPIPHNGCRPPKRRRV

SEQ ID NO: 359 - DNA, 453 bp, Brassica napus
  CDS (1)..(453)
atgtcgaggagaaagacaagagagccaaaggaggagacagtgacacttgggccagctgttcgtgacggagagcaagtctttggtgttgtccacatctttgcttctttcaacgatactttcattcatgtgactgatttgtctggacgggaaacacttgttcgtatcactggtgggatgaaggtgaaagccgacagagatgagtcctcaccttatgctgctatgcttgctgctcaagatgtcgctcagcgttgcaaggaacttggtatcacagccatgcatgtgaagctccgtgccactggtggtaacaagaccaagacccctggccctggtgctcagtctgcactcagagcccttgcccgttctggcatgaaaattggtcgcattgaggatgtgaccccagtcccaacagacagtacccgcagaaagggtggaagaaggggaaggaggctttga

SEQ ID NO: 360 - protein, 150 aa, Brassica napus
MSRRKTREPKEETVTLGPAVRDGEQVFGVVHIFASFNDTFIHVTDLSGRETLVRITGGMKVKADRDESSPYAAMLAAQDVAQRCKELGITAMHVKLRATGGNKTKTPGPGAQSALRALARSGMKIGRIEDVTPVPTDSTRRKGGRRGRRL

SEQ ID NO: 361 - DNA, 537 bp, Drosophila melanogaster
  CDS (1)..(537)
atgtcactgaaaagtgtatttctaagtgctcttcggagtattactatgcccgctgtgccgctccagacttctaggatacacacgagcgcttgctggcggaaggcggaggaccgcaaggaaatgctggcatttttaccggccaaagacgaaggaaccgtgggcgaaaagaccgtggacatcgacacacttatcaacgagctgcccatctgcaacattcgcgtttcacccaacaacacaattatttccgtcacggatcacaaaggagtcctccggctgatacgatcctgtggaattgagggattcaaaaacactcgcaagggaaccaacatagcagctcaagctacagcggttaccattagtggaaaagccattgaattgggctggaagacagtgcgagtaaaggttcgtggtcttggccctggaagaatgtcggccatcaaaggactgcaaatgggtgggctgaacatcgtttccattaccgacaacacacatgtttccttcaatcctccaagaccccgaaagcagagaagtctttaa

SEQ ID NO: 362 - protein, 178 aa, Drosophila melanogaster
MSLKSVFLSALRSITMPAVPLQTSRIHTSACWRKAEDRKEMLAFLPAKDEGTVGEKTVDIDTLINELPICNIRVSPNNTIISVTDHKGVLRLIRSCGIEGFKNTRKGTNIAAQATAVTISGKAIELGWKTVRVKVRGLGPGRMSAIKGLQMGGLNIVSITDNTHVSFNPPRPRKQRSL

SEQ ID NO: 363 - DNA, 456 bp, Penaeus japonicus
  CDS (1)..(456)
atggctccccgtaaaggaaaagttcaaaaggaggaggtccacgtttccctgggacctcaagttagggaaggagagaatgtgttcgcagtgtgccacatctacgctagctacaatgacacctttgtgcacgtgactgatctgtctggccgtgaaaccattgtccgtatcactggtggtcagaaggtgaaggccgatcgtgacgagtcctccccctacgccgctatgttggccgcccaagacgtttccgagaagtgcaagtcactgggcatcaatgctctgcacgtaaagatccgagccactggaggcaacaagaccaagaccccaggcccaggtggccagtctgccctccgtgcccttgcccgttctggcatgaagatcggccgtattgaagatgtcacaccagttccctctgacagcacacgcaggaagggtggtcgccgtggtaggcgtctgtaa

SEQ ID NO: 364 - protein, 151 aa, Penaeus japonicus
MAPRKGKVQKEEVHVSLGPQVREGENVFAVCHIYASYNDTFVHVTDLSGRETIVRITGGQKVKADRDESSPYAAMLAAQDVSEKCKSLGINALHVKIRATGGNKTKTPGPGGQSALRALARSGMKIGRIEDVTPVPSDSTRRKGGRRGRRL

SEQ ID NO: 365 - DNA, 456 bp, Spodoptera frugiperda
  CDS (1)..(456)
atggcaccaaggaaaaacaaagttcagaaagaggaggtccaggttactctgggccctcagcacttggtgggtgagacagtgttcggtgtagctcacattttcgcctccttcaatgacacattcgtgcacgttaccgacctgtctggccgggaaaccattgcccgtgtcaccggtggcatgaaggtgaaggctgaccgtgacgaggcctcaccctacgccgctatgttggccgctcaggatgttgctgagaagtgcaagactcttggcatcactgccctacacatcaaactgcgtgccacaggaggcaacaagaccaagacacccggacctggtgctcagtctgctctccgtgccctggctcgttccagcatgaagattggccgcattgaggatgtgacccccgtgccttcagactctacccgcaggaagggtggacgacgaggacgcaggctgtaa

SEQ ID NO: 366 - protein, 151 aa, Spodoptera frugiperda
MAPRKNKVQKEEVQVTLGPQHLVGETVFGVAHIFASFNDTFVHVTDLSGRETIARVTGGMKVKADRDEASPYAAMLAAQDVAEKCKTLGITALHIKLRATGGNKTKTPGPGAQSALRALARSSMKIGRIEDVTPVPSDSTRRKGGRRGRRL

SEQ ID NO: 367 - DNA, 708 bp, Arabidopsis thaliana
  CDS (1)..(708)
atgaaagcaggcttgttaaacagaggagtcaatggtttctcggctcctaatgctcctcctaccttcaaaagttcactgagatcaagattaccaaactctctacctgatcagttcggtcagacgaatccaggcttaccaaacacgggaggaagcggattctctgctccaagtttatcaagctacgagaatttcactcaatcttcttcgcttcttaaggagaattcccgcagtggagggaagtcaagcgacctggattttgttagagaagtaatagaagatgaaggaaggagaaccgcagggatattctctcatttccaacgcccaaacctcgaaacgaatgctgacatcattcacatcaagatgttgaggaacaacacttttgtcacggttacagattccaaaggaaacgtcaaatgcaaagctacatctggtagtttacccgatctgaaaggtggaaggaagatgacgaattacacagctgatgcaaccgctgaaaacattgggagaagagctaaggctatggggctgaaatctgtggtggttaaggtgaacggatttacgcatttcggaaagaagaagaaagctattatcgcgtttagagacggtttcaccaactcgaggtctgatcagaatccgatagtctacatcgaggacactactaggaaagctcataatggttgcagattaccaaggaaacgtcgggtgtga

SEQ ID NO: 368 - protein, 235 aa, Arabidopsis thaliana
MKAGLLNRGVNGFSAPNAPPTFKSSLRSRLPNSLPDQFGQTNPGLPNTGGSGFSAPSLSSYENFTQSSSLLKENSRSGGKSSDLDFVREVIEDEGRRTAGIFSHFQRPNLETNADIIHIKMLRNNTFVTVTDSKGNVKCKATSGSLPDLKGGRKMTNYTADATAENIGRRAKAMGLKSVVVKVNGFTHFGKKKKAIIAFRDGFTNSRSDQNPIVYIEDTTRKAHNGCRLPRKRRV

SEQ ID NO: 369 - DNA, 456 bp, Stomoxys calcitrans
  CDS (1)..(456)
atggctcctagaaaggctaaagctcaaaaagaagaagtccaagtctccttgggcccccaagtgcgtgatggcgaatttgttttcggtgttgcccacatctatgccagtttcaatgacactttcgtgcatgtcaccgatttgtctggccgtgaaaccattgcccgtgtcactggcggcatgaaggtaaaagctgatcgtgatgaagcctctccctacgctgctatgttggctgctcaagatgttgccgaaaaatgcaaaaccttgggcatcactgctttgcacatcaaattgcgtgccaccggtggcaacaagaccaaaacccctggacctggtgcccaatctgccctccgtgctttggcccgttcttccatgaagattggccgcattgaagatgttactcccattccttccgattccacacgcagaaagggtggtcgtcgtggtcgccgtttgtaa

SEQ ID NO: 370 - protein, 151 aa, Stomoxys calcitrans
MAPRKAKAQKEEVQVSLGPQVRDGEFVFGVAHIYASFNDTFVHVTDLSGRETIARVTGGMKVKADRDEASPYAAMLAAQDVAEKCKTLGITALHIKLRATGGNKTKTPGPGAQSALRALARSSMKIGRIEDVTPIPSDSTRRKGGRRGRRL

SEQ ID NO: 371 - DNA, 417 bp, Acorus calamus
  CDS (1)..(417): transl_table=11
atgacaaaaactataccaagaattggttcacgtaggaatggacgtattggtttacgtaagactggacgtagaataccaaaaggaattattcatgttcaggcaagtttcaacaataccattgtgactgttacagatgttcggggtcgagtagtttcttggtcctccgccggtacttgtggattcaaaggcacaagaagagggacgccgtttgcggctcaaaccgcagcgggaaatgctattcgtacagtagtagatcagggtatgcaacgagcagaagtcatgataaaaggtcctgggctcggaagagacgcagcattacgagccattcgtagaagcggcatattattaaatttcgtacgtgacgtgacccctatgccacataatggatgtagacctcctaaaaaaagacgtgtgtag

SEQ ID NO: 372 - protein, 138 aa, Acorus calamus
MTKTIPRIGSRRNGRIGLRKTGRRIPKGIIHVQASFNNTIVTVTDVRGRVVSWSSAGTCGFKGTRRGTPFAAQTAAGNAIRTVVDQGMQRAEVMIKGPGLGRDAALRAIRRSGILLNFVRDVTPMPHNGCRPPKKRRV

SEQ ID NO: 373 - DNA, 393 bp, Adiantum capillus
  CDS (1)..(393): transl_table=11
atgtcaaataaatcgagaaaaattcgttcacgtgggggaaaacgcggagttcaaaaaggagtcattcatatacaggcgagtttcaataacactatcattaccgtcacagacgtccggggacaggtaattatttggtcttccgccggtgcctgtggatttaagggaacacgcaaaagcacgccatttgctgcgcaagctgcggctgagaatgcaattaaagcatcagtggatcggggtatgaaacaagcagaagttatgatgagcgggcccggaccggggagagataccgctttgcgagctattcgcagaagcggcataatcctcagtttcatacgtgacgtgactcctatgccgtataatggttgtagaccccccagaaagagacgcgtctaa

SEQ ID NO: 374 - protein, 130 aa, Adiantum capillus
MSNKSRKIRSRGGKRGVQKGVIHIQASFNNTIITVTDVRGQVIIWSSAGACGFKGTRKSTPFAAQAAAENAIKASVDRGMKQAEVMMSGPGPGRDTALRAIRRSGIILSFIRDVTPMPYNGCRPPRKRRV

SEQ ID NO: 375 - DNA, 432 bp, Agrostis stolonifera
  CDS (1)..(432): transl_table=11
atggcaaaagctataccaaaaattggttcacgtaagaaagtgcgtattggtttacgtaggaatgcacgttttagtttacggaaaagtgcacgtagaataacaaaaggggttattcatgttcaagctagtttcaacaataccattataactgtgacagacccgcaaggtcgggtggttttctggtcctccgcgggtacttgtggattcaaaagctcaagaaaagcatcaccctatgctggtcaaagaacagcagtagatgctattcgtacagtaggtttgcaacgagcagaagttatggtaaagggcgctggtagtggaagagatgctgcattacgagccattgctaaaagcggtgtgcgattaagttgtatacgcgatgtaacacctatgccgcataatggatgtcgaccgcctaaaaaaagacggctgtaa

SEQ ID NO: 376 - protein, 143 aa, Agrostis stolonifera
MAKAIPKIGSRKKVRIGLRRNARFSLRKSARRITKGVIHVQASFNNTIITVTDPQGRVVFWSSAGTCGFKSSRKASPYAGQRTAVDAIRTVGLQRAEVMVKGAGSGRDAALRAIAKSGVRLSCIRDVTPMPHNGCRPPKKRRL

SEQ ID NO: 377 - DNA, 417 bp, Amborella trichopoda
  CDS (1)..(417): transl_table=11
atgaaaaaacctataccaagaattggttcgcgtagaaatggacgtattggttcacgtaagaatggacgtagaatacccaaaggagttattcatgttcaagcgagtttcaataataccattgtgactgttacagatgtacgagggcgggtggtttcttggtgctccgcgggtacctgtggattcagaggcacaagaagaggaacaccgtttgctgctcaaaccgcagcaacaaatgctattcgtacggtagtggatcagggtatgcaacgagcagaagttatgataaagggacctggtctcggaagagatgcagcattacgagccattcgcagaagtggtgtactattaagtttcgtacgtgacgtaactcccatgccacataatggatgtagaccccctaaaaaaagacgcgtgtag

SEQ ID NO: 378 - protein, 138 aa, Amborella trichopoda
MKKPIPRIGSRRNGRIGSRKNGRRIPKGVIHVQASFNNTIVTVTDVRGRVVSWCSAGTCGFRGTRRGTPFAAQTAATNAIRTVVDQGMQRAEVMIKGPGLGRDAALRAIRRSGVLLSFVRDVTPMPHNGCRPPKKRRV

SEQ ID NO: 379 - DNA, 393 bp, Angiopteris evecta
  CDS (1)..(393): transl_table=11
atggcaaaaccgataagaaagattggcttacgcaaaggaaaacgtaaaatacctaaaggagttattcatattcaagcaagttttaataataccattgttactgttacagatattcgaggacaagttgtttcttggtcttctgctggtgcttgtggattcaaaggtacgagaaaaagtacaccatttgctgctcagactgcagcagaaaacgctattcgtacacttattgatcaaggtatgaaacaggctgaagttatgataagtggtcccggcccaggaagagaaacagctttacgagctattcgtagaagcggtgtagttttgagtttcgtacgtgatgtaactcctatgccacataatggatgtagaccccccaagaaaagacgtgtataa

SEQ ID NO: 380 - protein, 130 aa, Angiopteris evecta
MAKPIRKIGLRKGKRKIPKGVIHIQASFNNTIVTVTDIRGQVVSWSSAGACGFKGTRKSTPFAAQTAAENAIRTLIDQGMKQAEVMISGPGPGRETALRAIRRSGVVLSFVRDVTPMPHNGCRPPKKRRV

SEQ ID NO: 381 - DNA, 417 bp, Arabis hirsuta
  CDS (1)..(417): transl_table=11
atggcaaaacctatattaagaattggttcacgtaaaaatacacgtagtggttcacgtaaaaatgtacgtagaataccaaagggaattattcatgttcaagcaagtttcaacaataccattgtgaccgttacagatgtacggggtcgggtgatctcttggtcctccgcgggtacttgtggattcaggggtacaagaagaggtacaccttttgctgctcaaaccgcagcaggaaatgctattcgagcagtagtggatcaaggcatgcaacgagctgaagtaaggataaaaggccctggactgggaagagatgcagcattacgagctattcgtagaagtggtatacttttaagtttcgtacgagacgtaacccctatgccacataatggttgtagaccccctaaaaaaagacgtgtatag

SEQ ID NO: 382 - protein, 138 aa, Arabis hirsuta
MAKPILRIGSRKNTRSGSRKNVRRIPKGIIHVQASFNNTIVTVTDVRGRVISWSSAGTCGFRGTRRGTPFAAQTAAGNAIRAVVDQGMQRAEVRIKGPGLGRDAALRAIRRSGILLSFVRDVTPMPHNGCRPPKKRRV

SEQ ID NO: 383 - DNA, 417 bp, Arabidopsis thaliana
  CDS (1)..(417): transl_table=11
atggcaaaacctatattaagaattggttcgcgtaaaaatacacgtagtggttcacgtaaaaatgtacgtagaataccaaagggagttattcatgttcaagcaagtttcaacaataccattgtaaccgttacagatgtacggggtcgggtgatttcttggtcctccgcaggtacttgtggattccggggtacaagaagaggaacaccctttgctgcccaaaccgcagcaggaaatgctattcgagcagtagtggatcaaggtatgcaacgagctgaagtaaggataaaaggccctggactcggaagagatgcggcattacgagctattcgtagaagcggtatacttttaagtttcgtacgagatgtaacccctatgccacataatggttgtagaccccctaaaaaaagacgtgtatag

SEQ ID NO: 384 - protein, 138 aa, Arabidopsis thaliana
MAKPILRIGSRKNTRSGSRKNVRRIPKGVIHVQASFNNTIVTVTDVRGRVISWSSAGTCGFRGTRRGTPFAAQTAAGNAIRAVVDQGMQRAEVRIKGPGLGRDAALRAIRRSGILLSFVRDVTPMPHNGCRPPKKRRV

SEQ ID NO: 385 - DNA, 417 bp, Atropa belladonna
  CDS (1)..(417): transl_table=11
atggcaaaagctataccgaaaattagttcgcgtaggaatggacgtattggttcacgtaagggtgcacgtagaataccaaagggagttattcatgttcaagcaagtttcaataataccattgtcactgttacagatgtacggggtcgagtagtttcttggtcctccgctggtacttctggattcaaaggtacgagaagaggaacaccgtttgctgctcaaaccgcagcagcaaacgctatccgtacagtagtggatcaaggtatgcaacgagcagaagtcatgataaaaggtcccggtctcggaagagatgcagcattacgagctattcgtcgaagtggtatactattaactttcgtacgggatgtaactcctatgccacataatggctgtagacctccgaaaaaaagacgtgtgtag

SEQ ID NO: 386 - protein, 138 aa, Atropa belladonna
MAKAIPKISSRRNGRIGSRKGARRIPKGVIHVQASFNNTIVTVTDVRGRVVSWSSAGTSGFKGTRRGTPFAAQTAAANAIRTVVDQGMQRAEVMIKGPGLGRDAALRAIRRSGILLTFVRDVTPMPHNGCRPPKKRRV

SEQ ID NO: 387 - DNA, 417 bp, Barbarea verna
  CDS (1)..(417): transl_table=11
atggcaaaacctatattaagaattggttcacgtaaaaatacacgtagtggttcacgtaaaaatgtacgtagaataccaaagggagttattcatgttcaagcaagtttcaacaataccattgtgaccgttacagatgtacggggtcgggtgatttcttggtcctccgcgggtacttgtggattcaagggtacaagaagaggaacaccttttgctgcccaaaccgcagcaggaaatgctattcgagcagtagtggatcaaggtatgcaacgagctgaagtaaggataaaaggccctggactgggaagagatgcagcattacgagctattcgtagaagcggtatacttttaagtttcgtacgagatgtaacccctatgccacataatggttgtagaccccctaaaaaaagacgtgtatag

SEQ ID NO: 388 - protein, 138 aa, Barbarea verna
MAKPILRIGSRKNTRSGSRKNVRRIPKGVIHVQASFNNTIVTVTDVRGRVISWSSAGTCGFKGTRRGTPFAAQTAAGNAIRAVVDQGMQRAEVRIKGPGLGRDAALRAIRRSGILLSFVRDVTPMPHNGCRPPKKRRV

SEQ ID NO: 389 - DNA, 417 bp, Calycanthus fertilis var
  CDS (1)..(417): transl_table=11
atgacaaaatctataccaagaattggttcacggaggggtgggcgtattgcttcacgtaagaatgcacgtagaataccaaaaggagttattcatgttcaagcgagtttcaacaataccattgtgactgttacagatgtaacaggtcgggtggtttcttggtcctccgcaggtacttgtggattcaggggcacaagaagagggacaccatttgctgctcaaaccgcagcagcaaacgctattcgtacagtaatcgatcagggtatgcaacgagcagaagtcatgataaagggccccgggctcggaagagatgcagcattacgagccattcgtagaagtggtatactgttaagtttcgtacgtgacgtaacccctatgccacataatggatgtaggcctcctaaaaaaagacgtgtgtag

SEQ ID NO: 390 - protein, 138 aa, Calycanthus fertilis var
MTKSIPRIGSRRGGRIASRKNARRIPKGVIHVQASFNNTIVTVTDVTGRVVSWSSAGTCGFRGTRRGTPFAAQTAAANAIRTVIDQGMQRAEVMIKGPGLGRDAALRAIRRSGILLSFVRDVTPMPHNGCRPPKKRRV

SEQ ID NO: 391 - DNA, 393 bp, Chaetosphaeridium globosum
  CDS (1)..(393): transl_table=11
atgcctaaacctagtaaaaaaattaacttaagaaaaataaaaaaaaaagttccgaaaggagtaatacatattcaagctagttttaacaatacaattgttactattacggacgttagaggacaagttatttcatggtcttctgcaggtgcttgtggatttaaaggagcaaaaaaaagtacaccttttgcagcgcaaacagctgctgaaaaagctttacgacctttaatcgaccaaggaatgcgtcaagctgaagttatgattagcggacctggaagaggaagagatacagctttgagaataatacgaaaaagtggtattacactaaattttgtacgagatgttacacctattcctcataacggttgcagacctcctagcaaaagacgtgtttaa

SEQ ID NO: 392 - protein, 130 aa, Chaetosphaeridium globosum
MPKPSKKINLRKIKKKVPKGVIHIQASFNNTIVTITDVRGQVISWSSAGACGFKGAKKSTPFAAQTAAEKALRPLIDQGMRQAEVMISGPGRGRDTALRIIRKSGITLNFVRDVTPIPHNGCRPPSKRRV

SEQ ID NO: 393 - DNA, 393 bp, Chara vulgaris
  CDS (1)..(393): transl_table=11
atgataagacctataaaaaaaataactctccgtaaaacaaaaaaaaagagccctaaaggagtaattcatatacaggctagcttcaataacactattgtaactataacagacttacgagggcaagtaatttcctggtcttcttcgggagcctgtggatttaaaggagcaaaaaaaagtactgcttatgctgctcaaattgctactgaaaatgcaattaaacaatggacagatcaaaataccaagcaagctgaagttatgatgagtggaccagggccaggaagagaaactgcattacgtgctattagaaatagtagggtaattcttagctttataagagacgttactcctatacctcataatggttgtagacctcctaagaaaagacgcgtttaa

SEQ ID NO: 394 - protein, 130 aa, Chara vulgaris
MIRPIKKITLRKTKKKSPKGVIHIQASFNNTIVTITDLRGQVISWSSSGACGFKGAKKSTAYAAQIATENAIKQWTDQNTKQAEVMMSGPGPGRETALRAIRNSRVILSFIRDVTPIPHNGCRPPKKRRV

SEQ ID NO: 395 - DNA, 393 bp, Chlorokybus atmophyticus
  CDS (1)..(393): transl_table=11
atggcaaaaaaaataagaaagataggtattcgtaagggcaaacggaagattcctaaaggagtggtacatgtacaagctacctttaataatactattgtaaccattacagatataaagggagaggtgatatcttggtcttccgcgggatcttgtgggtttaaaggaacaaaaaaaggaactccttttgctgctcaaactgcagcggagaacgctgtccgtcaagccatagaacaaggtatgaaagaagctgaaattactgtaagtggtccagggtcgggacgagaaacagctattcgtgctattcgaactgctgggttaggaataactgttcttaaagatgtaactcctattccccataatggttgtcgacctcctaagaaacgtcgagtttaa

SEQ ID NO: 396 - protein, 130 aa, Chlorokybus atmophyticus
MAKKIRKIGIRKGKRKIPKGVVHVQATFNNTIVTITDIKGEVISWSSAGSCGFKGTKKGTPFAAQTAAENAVRQAIEQGMKEAEITVSGPGSGRETAIRAIRTAGLGITVLKDVTPIPHNGCRPPKKRRV

SEQ ID NO: 397 - DNA, 393 bp, Chlamydomonas reinhardtii
  CDS (1)..(393): transl_table=11
atggcaaaacaaacacgtaaattaacaacaaataaaacaaaaaagaaaatttttagaggtgtagttcatattcaagcaggccaccataatacaattgtaaccattacaaatattcgtggtgaagttttatgctggagctctgctggagcttgtggctttagaggtaaacgtaaatcaacaagttttgctgctaaaaaagcagctgaaacagtagctcgtaaatcacgtgatttcacaatgaaagcagctaaaattttagtaacaggcccgggtcaaggtcgtgaaagtgctattcgtgagatttttaaagctggtattaaagtaagtgttattcgtgaaaaaacaggtatcccacacaatggttgtcgtccaccgaaaaaacgtagtgtttaa

SEQ ID NO: 398 - protein, 130 aa, Chlamydomonas reinhardtii
MAKQTRKLTTNKTKKKIFRGVVHIQAGHHNTIVTITNIRGEVLCWSSAGACGFRGKRKSTSFAAKKAAETVARKSRDFTMKAAKILVTGPGQGRESAIREIFKAGIKVSVIREKTGIPHNGCRPPKKRSV

SEQ ID NO: 399 - DNA, 393 bp, Chlorella vulgaris
  CDS (1)..(393): transl_table=11
atggcaaaaaaaatcgaaaaaagtgcgaaaaaaaaatttcgcgagaaagttcttctaggtgtagctcatatacaatctacatttaacaatactatagtaaccattacaacaaacaagggaaatgtattagcctggtcttctgccggagcttgtggttttaaaggtgcacgtaaaaaaacaccactagctgcaaaacaagctgctgaaaatgcagcacaaacgtgtgtaagtcaaggtatgagagaaatccgagtaaacgtaaaaggtgctggtgctggccgagaagctgcattacgcggcttacgtgatgccgggttaaatattacaattattcgagatattacccccattcctcataacgggtgtagaccccctaaaaaacgtagaatttaa

SEQ ID NO: 400 - protein, 130 aa, Chlorella vulgaris
MAKKIEKSAKKKFREKVLLGVAHIQSTFNNTIVTITTNKGNVLAWSSAGACGFKGARKKTPLAAKQAAENAAQTCVSQGMREIRVNVKGAGAGREAALRGLRDAGLNITIIRDITPIPHNGCRPPKKRRI

SEQ ID NO: 401 - DNA, 417 bp, Citrus sinensis
  CDS (1)..(417): transl_table=11
atggcaaaatctccaccacgaagtggttcacgtaggccgggacggatcggttcacgtaaaagtggacgtcgaataccaaagggcgttattcatgttcaagcaagtttcaacaacaccattgtgactgttacagatgtccggggtcgggtaatttcttggtcctcggccggtacttgtggattcaggggtacaagaagaggtacgccttttgctgctcaaaccgcagcaggaaatgctattcgagcagtagcggatcaaggtatgcaacgagcagaagtcatgataaagggtcctggtctcggaagagatgcggcattacgagctattcgtagaagcggtatccttttaaatttcgtacgggatgtaacccctatgccacacaatggttgcagaccccctaaaaaaagacgggtgtag

SEQ ID NO: 402 - protein, 138 aa, Citrus sinensis
MAKSPPRSGSRRPGRIGSRKSGRRIPKGVIHVQASFNNTIVTVTDVRGRVISWSSAGTCGFRGTRRGTPFAAQTAAGNAIRAVADQGMQRAEVMIKGPGLGRDAALRAIRRSGILLNFVRDVTPMPHNGCRPPKKRRV

SEQ ID NO: 403 - DNA, 417 bp, Coffea arabica
  CDS (1)..(417): transl_table=11
atggcaaaagctataccgagagttggttcacgtaagaacggacgtattagttcacgtaagagtgcgcgtagaataccaaagggagttattcatgttcaagcaagttttcataataccattgtcactgttacagatgtacggggtcgagtggtttcttggtcctccgccggtacttgtggattcagaggtacgagaagagggacaccatttgctgctcaaaccgcagcagcaaatgctattcgtacagtagtggatcaaggtatgcaacgagcagaagtcatgataaaaggtcccggcctcgggagagacgcagcgcttcgagctattcgtagaagtggtatagtattaactttcgtacgagatgtaactcctatgccacataatggctgtagacctcccaaaaaaagacgtgtgtag

SEQ ID NO: 404 - protein, 138 aa, Coffea arabica
MAKAIPRVGSRKNGRISSRKSARRIPKGVIHVQASFHNTIVTVTDVRGRVVSWSSAGTCGFRGTRRGTPFAAQTAAANAIRTVVDQGMQRAEVMIKGPGLGRDAALRAIRRSGIVLTFVRDVTPMPHNGCRPPKKRRV

SEQ ID NO: 405 - DNA, 417 bp, Cucumis sativus
  CDS (1)..(417): transl_table=11
atggcaaaacccataccaagaatcggttcacgtagaaatggacgtattagctcacgtaaaagtacgcgtagaataccaaagggcgttattcatgttcaagcaagtttcaacaatacaattgtgactgttacagatgtacggggtcgggtaatttcttggtcctccgccggtacgtgtggattcaaaggtacaagaagagggacaccatttgccgctcaaaccgcagcaggaaatgctattcggggagtagtggatcaagggatgcaacgagccgaagttatgataaagggccccggtctcggaagagatgcagcattaagagctattcggagaagcggtatattattaagtttcatacgggatgtaacccctatgccacataatggctgtaggccccctaaaaaacgacgtgtgtaa

SEQ ID NO: 406 - protein, 138 aa, Cucumis sativus
MAKPIPRIGSRRNGRISSRKSTRRIPKGVIHVQASFNNTIVTVTDVRGRVISWSSAGTCGFKGTRRGTPFAAQTAAGNAIRGVVDQGMQRAEVMIKGPGLGRDAALRAIRRSGILLSFIRDVTPMPHNGCRPPKKRRV

SEQ ID NO: 407 - DNA, 417 bp, Daucus carota
  CDS (1)..(417): transl_table=11
atggcaaaaactataccgagaattggttcacgtaagaatggacgtattggttcacgtaagaatacacggagaataccaaagggggttattcatgttcaagcaagtttcaataatactattgtgactgttacagatgtacggggtcgagtggtttcttggtcctccgccggtacttgtggattcaagggtacacgaaggggtacgccctttgctgctcaaaccgcagcaggaaacgctattcgtacagtagtggatcaaggtatgcaacgagcggaagtcatgataaaaggaccgggtctcggaagagacgcggcattacgcgctattcgcagaagtggtatactattaacttttgtgcgtgatgtaacccctatgccacataatggctgtagacctccaaaaaagcgacgtgtgtag

SEQ ID NO: 408 - protein, 138 aa, Daucus carota
MAKTIPRIGSRKNGRIGSRKNTRRIPKGVIHVQASFNNTIVTVTDVRGRVVSWSSAGTCGFKGTRRGTPFAAQTAAGNAIRTVVDQGMQRAEVMIKGPGLGRDAALRAIRRSGILLTFVRDVTPMPHNGCRPPKKRRV

SEQ ID NO: 409 - DNA, 417 bp, Draba nemorosa
  CDS (1)..(417): transl_table=11
atggcaaaacctatattaagagttggttcacgtaaaaatacacgtagtgcttcacgtaaaaatgtacgtaaaataccaaagggagttattcatgttcaagcaagtttcaacaataccattgtgaccgttacagatgtacggggtcgggttatttcttggtcctccgcgggtacttgtggattcaggggtacaagaagaggcacaccttttgctgctcaaaccgcagcaggaaatgctattcgagcagtagtggatcaaggcatgcaacgagctgaagtaaggataaaaggccccggactaggaagagatgcagcattacgcgctattcgtagaagtggtatacttttaagtttcgtacgagacgtaacccctatgccacataatggttgtagaccccctaaaaaaagacgtgtatag

SEQ ID NO: 410 - protein, 138 aa, Draba nemorosa
MAKPILRVGSRKNTRSASRKNVRKIPKGVIHVQASFNNTIVTVTDVRGRVISWSSAGTCGFRGTRRGTPFAAQTAAGNAIRAVVDQGMQRAEVRIKGPGLGRDAALRAIRRSGILLSFVRDVTPMPHNGCRPPKKRRV

SEQ ID NO: 411 - DNA, 393 bp, Drimys granadensis
  CDS (1)..(393): transl_table=11
atggcaaaacctataccaagaattggttcgcgtaggaatggacgtagaataccaaaaggagttattcatgttcaagcgagtttcaacaataccattgtaactgttacggatgtgcgaggtcgggtggtttcttggtcctccgcgggtacttgtggattcagaggcacaagaagagggacaccttttgctgctcaaaccgcagcaggaaatgctattcgtacagtagtggatcagggtatgcaacgagcagaagtcatgataaagggtcctggtctcggaagagatgcagcattacgagccattcgtagaagtggtatactattaagtttcgtacgtgacgtaacccctatgccacataatggatgtagacctcctaaaaaaaggcgtgtgtag

SEQ ID NO: 412 - protein, 130 aa, Drimys granadensis
MAKPIPRIGSRRNGRRIPKGVIHVQASFNNTIVTVTDVRGRVVSWSSAGTCGFRGTRRGTPFAAQTAAGNAIRTVVDQGMQRAEVMIKGPGLGRDAALRAIRRSGILLSFVRDVTPMPHNGCRPPKKRRV

SEQ ID NO: 413 - DNA, 411 bp, Epifagus virginiana
  CDS (1)..(411): transl_table=11
atggcaaaagctataccaataactggttcacgtaggaatgtacatgttggttcacgtaagagttcatttagaatacaaaagggagttattcatgtacaaacaagtttcaataataccattgttgcagttacagatataaagggtcgggttgtttcctggtcctcggctggtacttgtggatttaagggtacgagaagagggacatcctttgctgcccaaattgcagcaacaaatgctattcgtatagtccaaggtatgcaacgagcagaagtaatgataaaaggtcccggtataggaagagacgcagtattacgagctattcgtggaagtggtgtactattaacttttgtacgggatgtaacccctatgccacataatggctgtagaccacctaaaaaaagacgtgtgtaa

SEQ ID NO: 414 - protein, 136 aa, Epifagus virginiana
MAKAIPITGSRRNVHVGSRKSSFRIQKGVIHVQTSFNNTIVAVTDIKGRVVSWSSAGTCGFKGTRRGTSFAAQIAATNAIRIVQGMQRAEVMIKGPGIGRDAVLRAIRGSGVLLTFVRDVTPMPHNGCRPPKKRRV

SEQ ID NO: 415 - DNA, 417 bp, Eucalyptus globulus subsp
  CDS (1)..(417): transl_table=11
atggcaaaatctataccaagaactggttcacgtaggaatgtccgtagtggttcacgtaaaagtacacgtagaataccaaagggagttattcatgttcaagcaagtttcaacaataccattgtgactgttacagatgtacggggtcgggtaatttcttggtcctccgccggtacttgtggattcaatggtacaagaagggggacaccatttgctgctcaaaccgcagcaggaaatgctattcggacagtagtagatcaaggtatgcaacgagcagaagtcatgataaaaggtcctggtctcggaagagatgcagcattaagagctattcgtagaagtggtatactattaagtttcgtacgtgatgtaacccctatgccacataatggctgtagacctcctaaaaaaagacgtgtgtag

SEQ ID NO: 416 - protein, 138 aa, Eucalyptus globulus subsp
MAKSIPRTGSRRNVRSGSRKSTRRIPKGVIHVQASFNNTIVTVTDVRGRVISWSSAGTCGFNGTRRGTPFAAQTAAGNAIRTVVDQGMQRAEVMIKGPGLGRDAALRAIRRSGILLSFVRDVTPMPHNGCRPPKKRRV

SEQ ID NO: 417 - DNA, 417 bp, Gossypium barbadense
  CDS (1)..(417): transl_table=11
atggcaaaacctataccaaaagttggttcacgtaggaatgggcgcagtagtgcacggaaaagtgcacgtagaataccaaaaggagttattcatgttcaagcaagtttcaacaataccattgttactgttacagatgtacggggtcgggtaatctcttggtcctccgccggcacttgtggattcaagggtacaagaagggggaccccttttgctgctcaaaccgcagcgggaaatgctattcgagcagtagtagaccaaggtatgcaacgagcggaagttatgataaagggtcctggtctcggaagagatgcagcattacgagctattcgtagaagtggtatactattaagtttcgtacgggatgtaacccctatgccacataatggctgtagacctcctaaaaaaagacgtgtgtag

SEQ ID NO: 418 - protein, 138 aa, Gossypium barbadense
MAKPIPKVGSRRNGRSSARKSARRIPKGVIHVQASFNNTIVTVTDVRGRVISWSSAGTCGFKGTRRGTPFAAQTAAGNAIRAVVDQGMQRAEVMIKGPGLGRDAALRAIRRSGILLSFVRDVTPMPHNGCRPPKKRRV

SEQ ID NO: 419 - DNA, 411 bp, Helianthus annuus
  CDS (1)..(411): transl_table=11
atggcaaaagctataccgaaaaagggttcacgtggacgtattagttcgcgtaagagtatacgtaaaataccaaagggggttattcatattcaagcaagtttcaataataccattgtgactgttacagatgtacgagggcgagtggtttcttggtcctctgccggtacttgtggcttccaaggtacaagaagagggacgccgtttgctgctcaaaccgcagcggcaaatgctattcgtgcagtagtagatcaaggtatgcaacgagcagaagtcatgattaaaggtcccggtcttggaagagacgcagcattacgagctattcgcagaagtggtatactattaactttcgtacgggatgtaacccctatgccacataatggctgtagacccccgaaaaaaagacgtgtgtag

SEQ ID NO: 420 - protein, 136 aa, Helianthus annuus
MAKAIPKKGSRGRISSRKSIRKIPKGVIHIQASFNNTIVTVTDVRGRVVSWSSAGTCGFQGTRRGTPFAAQTAAANAIRAVVDQGMQRAEVMIKGPGLGRDAALRAIRRSGILLTFVRDVTPMPHNGCRPPKKRRV

SEQ ID NO: 421 - DNA, 399 bp, Huperzia lucidula
  CDS (1)..(399): transl_table=11
atgccaagacttattaaaaaagtaggtagtctacgtaggggtaaacgtggagtaccaaaaggagttattcacattcaagcaagctttaataataccatcgtgactgttacagatgtacgaggacaggctgtttcttggtcttccgccggtgcctgcggatccagaggtacaaagaaaagtacgccgtttgctgctcaaactgcagcagaaaatgctattcgtatgttaatcgatcaagggggtatggaacaagcagaaattataatgaaaggtccgggtccaggaagagacacagcatcacgagctattcgtaaaagtggtgtagtactgagtttcgtacgtgacataactcctatgccacataatgggtgtagacctcccaagaaaagacgtgtataa

SEQ ID NO: 422 - protein, 132 aa, Huperzia lucidula
MPRLIKKVGSLRRGKRGVPKGVIHIQASFNNTIVTVTDVRGQAVSWSSAGACGSRGTKKSTPFAAQTAAENAIRMLIDQGGMEQAEIIMKGPGPGRDTASRAIRKSGVVLSFVRDITPMPHNGCRPPKKRRV

SEQ ID NO: 423 - DNA, 441 bp, Jasminum nudiflorum
  CDS (1)..(441): transl_table=11
atggcaaaaggaactcgttttattaattttcgtagatatggacgttttggttcacgtagatatagacgttttggttcacataagagtgtacgtaaaataccaagaggggttattcatattcaaacaagtttccacaataccattgtcacggttacagacggacggggtcaggtggtttcttggtcctcggcgggtacttgtagattcaagggtccgagaaaaaggacaccctttgccgctcaaattgtagcagcagatgctattggtccagtagtggatcagggtctgcaacgagcaaaaatcaagctaaagggtaccggtcgcggaagagacgcagcattacgaactatttctaaaagtggtataggatttacttccgtacaggatgtaacccctgtcccccataatggttgcagacccccgaacaaaaaacgtcaatag

SEQ ID NO: 424 - protein, 146 aa, Jasminum nudiflorum
MAKGTRFINFRRYGRFGSRRYRRFGSHKSVRKIPRGVIHIQTSFHNTIVTVTDGRGQVVSWSSAGTCRFKGPRKRTPFAAQIVAADAIGPVVDQGLQRAKIKLKGTGRGRDAALRTISKSGIGFTSVQDVTPVPHNGCRPPNKKRQ

SEQ ID NO: 425 - DNA, 411 bp, Lactuca sativa
  CDS (1)..(411): transl_table=11
atggcaaaagctataccgaaaaaaggttcacgtggacgtattggttcacgtaagagtacacgtaaaataccaaagggggttattcatattcaagcaagtttcaataataccattgtgactgttacagatgtacgggggcgagtggtttcttggtcctctgccggtacttctggcttccgaggtacaaaaagagggacgccatttgctgctcaaaccgcagcaggacatgctattcgtgcagtagtagatcaaggtatgcaacgagcagaagtcatgattaaaggtcccggtctcggaagagacgcagcattacgagctattcgcagaagtggtatactattaactttcgtacgggatgtaacccctatgccacataatggctgtagacccccgaaaaaaagacgtgtgtag

SEQ ID NO: 426 - protein, 136 aa, Lactuca sativa
MAKAIPKKGSRGRIGSRKSTRKIPKGVIHIQASFNNTIVTVTDVRGRVVSWSSAGTSGFRGTKRGTPFAAQTAAGHAIRAVVDQGMQRAEVMIKGPGLGRDAALRAIRRSGILLTFVRDVTPMPHNGCRPPKKRRV

SEQ ID NO: 427 - DNA, 417 bp, Liriodendron tulipifera
  CDS (1)..(417): transl_table=11
atgacaaaacctataccaagaattggttcacgtaggaatgggcgtattggttcacgtaagagtgggcgtagaataccaaaaggagttattcatgttcaagcgagtttcaacaataccattgtgactgttacagatgtactaggtcaggtggtttcttggtcctccgctggtacttgtggatttagaggcacaagaagagggacaccatttgctgctcaaaccgcagcaggaaacgctattcgtacagtagtggatcagggtatgcaacgagcagaagtcatgataaagggtcctggtctcggaagagatgcagcactacgagctattcgtagaagtggtatactattaagtttcgtacgtgacgtaacccctatgccacataatggatgtagacctcctaaaaaaagacgtgtgtag

SEQ ID NO: 428 - protein, 138 aa, Liriodendron tulipifera
MTKPIPRIGSRRNGRIGSRKSGRRIPKGVIHVQASFNNTIVTVTDVLGQVVSWSSAGTCGFRGTRRGTPFAAQTAAGNAIRTVVDQGMQRAEVMIKGPGLGRDAALRAIRRSGILLSFVRDVTPMPHNGCRPPKKRRV

SEQ ID NO: 429 - DNA, 417 bp, Lotus japonicus
  CDS (1)..(417): transl_table=11
atggcaaaacctataccaaagattggttcacgtaaaaatgcacgtagtggttctcgtaagcatcttcgtaaaataccaaaggggattattcatgttcaagctagttttaacaataccattgtaactgttacagatgtacgaggtagggtgatttcttggtcctccgccggtacttgtggattcaagggtacacgaaggggaacaccatttgccgctcaaaccgcagcaggaaatgctattcgaacagtagcggatcaaggtatgcaacgagcagaagtcatgataaaaggtcccggtctcggaagagatgcagcattaagagctattcgtagaagcggtatattattaaactttatacgggatgtaactcctatgccacataatggatgtaggtcacctaaaaaaagacgtgtataa

SEQ ID NO: 430 - protein, 138 aa, Lotus japonicus
MAKPIPKIGSRKNARSGSRKHLRKIPKGIIHVQASFNNTIVTVTDVRGRVISWSSAGTCGFKGTRRGTPFAAQTAAGNAIRTVADQGMQRAEVMIKGPGLGRDAALRAIRRSGILLNFIRDVTPMPHNGCRSPKKRRV

SEQ ID NO: 431 - DNA, 432 bp, Zea mays
  CDS (1)..(432)
atgacaaaagctataccaaaaataggttcacgtaagaaagtgcgtattggtttgcgtaggaatgcccgttttagtttacggaagagtgcacgtagaataacaaaagggattattcatgttcaagctagtttcaacaataccattataaccgttacagacccacaaggtcgggtcgttttctggtcctccgcaggtacttgtggattcaaaagctcaagaaaagcatcaccctatgctggtcaaagaacagcagtagatgctattcgtacagtgggtttgcaacgagcagaagttatggtaaaaggtgctggtagcggaagagatgccgcattacgagccattgctaaaagtggtgtacggttaagttgtatacgcgatgtaacacctatgccgcataatggatgtcgacctcctaaaaaaagacgtctgtaa

SEQ ID NO: 432 - protein, 143 aa, Zea mays
MTKAIPKIGSRKKVRIGLRRNARFSLRKSARRITKGIIHVQASFNNTIITVTDPQGRVVFWSSAGTCGFKSSRKASPYAGQRTAVDAIRTVGLQRAEVMVKGAGSGRDAALRAIAKSGVRLSCIRDVTPMPHNGCRPPKKRRL

SEQ ID NO: 433 - DNA, 393 bp, Marchantia polymorpha
  CDS (1)..(393): transl_table=11
atgccaaaatctgtaaaaaaaattaatttacgtaaaggaaaacgtaggttacctaaaggagttattcatattcaagccagctttaataatacaattgtaactgttacagatattagagggcaagtcgtttcatggtcttctgctggtgcttgcggatttaaaggtacaaaaaaaagtaccccatttgccgctcaaaccgctgcagaaaatgctattcggatattaattgatcaaggtatgaaacaagcggaagttatgattagtggtccaggaccaggcagagatacggcattacgagcaattcgtcggagtggtataatacttagttttgtacgtgacgtaactcccatgcctcataatggatgtagaccacctagaaaaagacgtgtataa

SEQ ID NO: 434 - protein, 130 aa, Marchantia polymorpha
MPKSVKKINLRKGKRRLPKGVIHIQASFNNTIVTVTDIRGQVVSWSSAGACGFKGTKKSTPFAAQTAAENAIRILIDQGMKQAEVMISGPGPGRDTALRAIRRSGIILSFVRDVTPMPHNGCRPPRKRRV

SEQ ID NO: 435 - DNA, 411 bp, Marsilea quadrifolia
  CDS (19)..(411)
atgaacaataaaataactatgtcaaaaatttcaagaaagtctcgtttgcgtaaaggaaaacgcggagtccaaaaagggattattcacattcaagcaggttttaataataccatcattactgtcacggatgttcgaggacaagtcattctttggtcttctgccggtgcttgcggattcaaaggtactcgcaggagtacaccatttgccgcccaagctgcagcggaaaatgccgtccgtgcgtccatggatcggggactgaaacaggcagaggtaatgataagcgggcctggtccagggagagacaccgctttacgagccattcgacgaagcggtgtaacccttagtttcgtacgtgatgtgactcctatgccacataatggatgtagacccccaaaaaagagacgcgtatga

SEQ ID NO: 436 - protein, 130 aa, Marsilea quadrifolia
MSKISRKSRLRKGKRGVQKGIIHIQAGFNNTIITVTDVRGQVILWSSAGACGFKGTRRSTPFAAQAAAENAVRASMDRGLKQAEVMISGPGPGRDTALRAIRRSGVTLSFVRDVTPMPHNGCRPPKKRRV

SEQ ID NO: 437 - DNA, 393 bp, Mesostigma viride
  CDS (1)..(393): transl_table=11
atggcaaaacaaataagaaagataggtgttcgtaaaacaaagagaaagattcctaaaggagtcgttcatgtacaagctacgttcaataatactattgtaaccataacagatgttagaggtgaagtattgtcatggtcttctgctggtgcttgtggcttcaaaggaacaaaaaaaggaactccttttgcagcacaaactgctgctgaaaatgcagttagacaagtaattgatcaaggcatgaaacaagcagaaataatgattagtggacctggttctggaagagaaacagctatacgtgctattcaagctgctggattaggtattactttaattcgtgatgtaactcctattcctcataatggttgtcgacctcctaaaaaacgtagagtctaa

SEQ ID NO: 438 - protein, 130 aa, Mesostigma viride
MAKQIRKIGVRKTKRKIPKGVVHVQATFNNTIVTITDVRGEVLSWSSAGACGFKGTKKGTPFAAQTAAENAVRQVIDQGMKQAEIMISGPGSGRETAIRAIQAAGLGITLIRDVTPIPHNGCRPPKKRRV

SEQ ID NO: 439 - DNA, 417 bp, Morus indica
  CDS (1)..(417): transl_table=11
atggcaaaacctctaccaagaattggttcacgtaagaatagacatatgggttcacgtaaaaatgtacgtagaataccaaagggagttattcatgtccaagcaagtttcaacaatactattgtgactgttacagatgtacgggggcgggtaatttcttggtcctccgccggtacttgcggattcaaaggtacaaaaagagggacaccatttgccgctcaaaccgcagcaggaaatgctattcggacagtagtggatcagggtatgcaacgagcagaagtcatgataaaaggccccggtctcggaagagatgcggcattaagagctattcgcagaagtggtatactattaagtttcatacgagacgtaactcctatgccacataatggctgcaggccccctaaaaaaagacgtgtgtaa

SEQ ID NO: 440 - protein, 138 aa, Morus indica
MAKPLPRIGSRKNRHMGSRKNVRRIPKGVIHVQASFNNTIVTVTDVRGRVISWSSAGTCGFKGTKRGTPFAAQTAAGNAIRTVVDQGMQRAEVMIKGPGLGRDAALRAIRRSGILLSFIRDVTPMPHNGCRPPKKRRV

SEQ ID NO: 441 - DNA, 417 bp, Nandina domestica
  CDS (1)..(417): transl_table=11
atgacaaaacccatatcaagaattggttcacgtaggaatgtacgcatcggttcacgtaagagtggacgtagaataccaaaaggagttattcatgttcaagcaagtttcaacaataccattgtaacggttacagatatacggggtcgggtggtttcgtggtcctccgccggtacttgtggattcaggggcacaagaagaggcacgccatttgctgctcaaaccgcagcatcaaatgctattcgtacagtagtagatcagggtatgcaacgagcagaagtcaggataaaaggtcctggtctcggaagagatgcagcattacgagccattcgtagaagtggtatactattaagttttgtcagagacgtaacccctatgccacataatggatgtagacctcctaaaaaaagacgtgtatag

SEQ ID NO: 442 - protein, 138 aa, Nandina domestica
MTKPISRIGSRRNVRIGSRKSGRRIPKGVIHVQASFNNTIVTVTDIRGRVVSWSSAGTCGFRGTRRGTPFAAQTAASNAIRTVVDQGMQRAEVRIKGPGLGRDAALRAIRRSGILLSFVRDVTPMPHNGCRPPKKRRV

SEQ ID NO: 443 - DNA, 417 bp, Nasturtium officinale
  CDS (1)..(417): transl_table=11
atggcaaaacctatattaagaattggttcacgtaaaaatacacgtagtagttcacgtaaaaatgtacgtagaataccaaagggagttattcatgttcaagcaagtttcaacaataccattgtgaccgttacagatgtacggggtcgggtgatttcttggtcctccgcgggtacttgtggattcaggggtacaagaagaggaacaccttttgctgcccaaaccgcagcaggaaatgctattcgagcagtagtggatcaaggtatgcaacgagctgaagtaaggataaaaggccctggactgggaagagatgcagcattacgagctattcgtagaagcggtatacttttaagtttcgtacgagatgtaacccctatgccacataatggttgtagaccccctaaaaaaagacgtgtatag

SEQ ID NO: 444 - protein, 138 aa, Nasturtium officinale
MAKPILRIGSRKNTRSSSRKNVRRIPKGVIHVQASFNNTIVTVTDVRGRVISWSSAGTCGFRGTRRGTPFAAQTAAGNAIRAVVDQGMQRAEVRIKGPGLGRDAALRAIRRSGILLSFVRDVTPMPHNGCRPPKKRRV

SEQ ID NO: 445 - DNA, 393 bp, Nephroselmis olivacea
  CDS (1)..(393): transl_table=11
atggcaagacagtcgaaacgacttgcaccacgccgacttaaacgcaaggtttcaaaaggagttgtgcatattcaagccagttttaataatacaattgtcaccattacagattcctcaggtggcgtacttgcttggtcttctgcaggagcttgcggctttcgaggagcgaaaaaaggaactccttttgctgctcaaaccgctgcagaaactgctattcgtcaatgcattgatcaggggatgcgacaagctgatattattgttcaagggccagggaatggtcgtgaaacagcaattcgtgcattacaacttgcgggtgtcggtgtttctttgattcgtgatattacttctgtaccacataacggttgcagacctccaaaacaacgacgtatttaa

SEQ ID NO: 446 - protein, 130 aa, Nephroselmis olivacea
MARQSKRLAPRRLKRKVSKGVVHIQASFNNTIVTITDSSGGVLAWSSAGACGFRGAKKGTPFAAQTAAETAIRQCIDQGMRQADIIVQGPGNGRETAIRALQLAGVGVSLIRDITSVPHNGCRPPKQRRI

SEQ ID NO: 447 - DNA, 417 bp, Nicotiana tomentosiformis
  CDS (1)..(417): transl_table=11
atggcaaaagctataccgaaaattagttcgcgtaggaatggacgtattggttcacgtaagggtgcacgtagaataccaaagggagttattcatgttcaagcaagtttcaataataccattgtcactgttacagatgtacggggtcgagtagtttcttggtcctccgccggtacttctggattcaaaggtacaagaagaggaacaccgtttgctgctcaaaccgcagtagcaaacgctatccgtacagtagtggatcaaggtatgcaacgagctgaagtcatgataaaaggtcccggtctcggaagagatgcagcattacgagctattcgtcgaagtggtatactattaactttcgtacgggatgtaactcctatgccacataatggctgtagacctccgaaaaaaagacgtgtgtag

SEQ ID NO: 448 - protein, 138 aa, Nicotiana tomentosiformis
MAKAIPKISSRRNGRIGSRKGARRIPKGVIHVQASFNNTIVTVTDVRGRVVSWSSAGTSGFKGTRRGTPFAAQTAVANAIRTVVDQGMQRAEVMIKGPGLGRDAALRAIRRSGILLTFVRDVTPMPHNGCRPPKKRRV

SEQ ID NO: 449 - DNA, 417 bp, Nymphaea alba
  CDS (1)..(417): transl_table=11
atgacaaaacctataccaaaaattggttcacgtagaaatagccgtattagttcacgtaagagtgggtgtagaacaccaataggagttattcatgttcaagcgagtttcaacaatactattgttactgttacagacccacaaggtcgggtcgtttcttggtcttccgcaggtacctgtgggttcaagggcacaagaaggggtaccccatttgctgctcaaaccgcagcaggaaatgctattcgtgcggtagtggaccagggtatgcaacgagcagaagtcatgataaaggggcccggtctcgggagagatgcagcattacgagcgattcgtagaagtggtatactattaaattttgtacgtgacgtaacccctatgccgcataatggatgtagaccgccaaaaaaaaggcgcgtttag

SEQ ID NO: 450 - protein, 138 aa, Nymphaea alba
MTKPIPKIGSRRNSRISSRKSGCRTPIGVIHVQASFNNTIVTVTDPQGRVVSWSSAGTCGFKGTRRGTPFAAQTAAGNAIRAVVDQGMQRAEVMIKGPGLGRDAALRAIRRSGILLNFVRDVTPMPHNGCRPPKKRRV

SEQ ID NO: 451 - DNA, 435 bp, Oenothera hookeri
  CDS (1)..(435): transl_table=11
atggcaaaatctataccaagcgctggtttacgtttacgtttacgtttacgtaggaatgcgcgtaggcgttcacgtaagagtacgcgtaaaatcccaaagggggttattcatgttcaagcgagtttccacaatactattgtgactgttacagatgtgcgggggcgggtaatttcttggtcctccgccggtacttgtggattcaagagtacaagaaaagggacgccatttgctgctcaaaccgcagcaggagatgctattcggccagtagtggatcaaggtatgcaacgagcagaagtcaggataaaaggtcccggtctcggaagagatgcggcattacgagcgattcgtagaagtggtatacgattaagttgtatacgtgatgtaacccctctgccacataatggctgtatgcccccgaaaaaaaggcgcgtgtag

SEQ ID NO: 452 - protein, 144 aa, Oenothera hookeri
MAKSIPSAGLRLRLRLRRNARRRSRKSTRKIPKGVIHVQASFHNTIVTVTDVRGRVISWSSAGTCGFKSTRKGTPFAAQTAAGDAIRPVVDQGMQRAEVRIKGPGLGRDAALRAIRRSGIRLSCIRDVTPLPHNGCMPPKKRRV

SEQ ID NO: 453 - DNA, 390 bp, Oltmannsiellopsis viridis
  CDS (1)..(390): transl_table=11
atggcaaaacaagtacgtaaggcctcaaaaaaaacaaaattaaaagttccaagcggcgtcgctcatgtacaagcaacttttaataataccattattacaattacaaaccctgcgggggatgttcttgcatggtgctcagcaggcgcaagtggttttaaaggtgcgcgtaaatcaacgccctttgcagctaaaattgcagctgaaacagcagcccgtaaatcaatggattacgggttacgtcaaattagtgtaattattaaaggagcaggttcgggtcgtgaatctgctattcgtggattatcagaagcgggtctagaaattaaattattacgtgatattacttctattccacacaatggttgtcgtccacctaaaaaacgtcgtgtttaa

SEQ ID NO: 454 - protein, 129 aa, Oltmannsiellopsis viridis
MAKQVRKASKKTKLKVPSGVAHVQATFNNTIITITNPAGDVLAWCSAGASGFKGARKSTPFAAKIAAETAARKSMDYGLRQISVIIKGAGSGRESAIRGLSEAGLEIKLLRDITSIPHNGCRPPKKRRV

SEQ ID NO: 455 - DNA, 432 bp, Oryza nivara
  CDS (1)..(432): transl_table=11
atgacaaaagctataccaaaaattggttcacgtaggaaagtacgtattggtttgcgtaggaatgcgcgttttagtttacggaagagtgcacgtagaataacaaaaggagttattcatgttcaagctagtttcaacaatactattataactgttacagatccgcaaggtcgggtggttttctggtcctccgcgggtacttgtggattcaaaagctcaagaaaagcatcaccctatgctggtcaaagaacagctgtagatgctattcgtacagtgggtttgcaacgagcagaagttatggtaaagggtgctggtagtggaagagatgccgcattacgagccattgctaaaagtggtgtacgattaagttgtatacgcgatgtaacacctatgccgcataatgggtgtcgacctcctaaaaaaagacgtctgtaa

SEQ ID NO: 456 - protein, 143 aa, Oryza nivara
MTKAIPKIGSRRKVRIGLRRNARFSLRKSARRITKGVIHVQASFNNTIITVTDPQGRVVFWSSAGTCGFKSSRKASPYAGQRTAVDAIRTVGLQRAEVMVKGAGSGRDAALRAIAKSGVRLSCIRDVTPMPHNGCRPPKKRRL

SEQ ID NO: 457 - DNA, 393 bp, Ostreococcus tauri
  CDS (1)..(393): transl_table=11
atggcaacaaaacagcgtaaagttacgcaaaagaaatcacgtcgcaaagttcaacgtggagtagttcacattttagcgacgtttaacaatacattagtaactatcagtgatcgttctggtcttgttattgcatcgtcatctgctggtgcttgcgggttccgtggggcacgaaaaggaacgccatttgctgcacaaactgcatctgaagaagctgttcgtaaagctcttgattacggtttaaaatatgtggatgtaatggtaaaaggtcctggagctggtcgtgaaatggcaattcgtgctcttcaacagcttggattaggggttactttaattcgtgacgttactccattaccacacaatggttgtcgtcctccgaagaagcgtcgtgtataa

SEQ ID NO: 458 - protein, 130 aa, Ostreococcus tauri
MATKQRKVTQKKSRRKVQRGVVHILATFNNTLVTISDRSGLVIASSSAGACGFRGARKGTPFAAQTASEEAVRKALDYGLKYVDVMVKGPGAGREMAIRALQQLGLGVTLIRDVTPLPHNGCRPPKKRRV

SEQ ID NO: 459 - DNA, 417 bp, Panax ginseng
  CDS (1)..(417): transl_table=11
atggcaaaagctataccgagaagtggttcacgtaggagtgggcgtattggttcacgtaagagtacacgtagaataccaaagggggttattcatgttcaagcaagtttcaataatactattgtgactgttacagatgtacggggtcgggtggtctcttggtcctctgccggtacttgtggattcaagggtacaagaagggggacgccgtttgctgctcaaaccgcagcaggaaacgctattcgtacagtagtggatcaaggtatgcaacgagcagaagtcatgataaaaggacccggtctcggaagagacgcagcattacgagctattcgcagaagtggtatactattaactttcgtgcgggatgtaacccccatgccacataatggctgtagacctccgaaaaaacgacgtgtgtag

SEQ ID NO: 460 - protein, 138 aa, Panax ginseng
MAKAIPRSGSRRSGRIGSRKSTRRIPKGVIHVQASFNNTIVTVTDVRGRVVSWSSAGTCGFKGTRRGTPFAAQTAAGNAIRTVVDQGMQRAEVMIKGPGLGRDAALRAIRRSGILLTFVRDVTPMPHNGCRPPKKRRV

SEQ ID NO: 461 - DNA, 417 bp, Pisum sativum
  CDS (1)..(417): transl_table=11
atggcaaaatctataccaaaaattggttcacggaaaactggacgtattggttcgcgtaagcatcctcgtaaaataccaaagggggttatttatattcaagctagtttcaacaataccattgtgactgttacagatgtacgaggtcgggtgatttcttggtcctccgccggttcatgtggattcaagggtacacgaagggggacaccatttgccgctcaaaccgcagcgggaaatgctattcaaacagtagtcgagcaaggcatgcaacgagcagaagtaaggataaagggtccgggtctaggaagagatgcggcattaagagctatttatagaagtgggatactattaaaggttatacgggatgtaacccctctgccacataatggatgtcgggctcctaaaaaaagacgtgtgtaa

SEQ ID NO: 462 - protein, 138 aa, Pisum sativum
MAKSIPKIGSRKTGRIGSRKHPRKIPKGVIYIQASFNNTIVTVTDVRGRVISWSSAGSCGFKGTRRGTPFAAQTAAGNAIQTVVEQGMQRAEVRIKGPGLGRDAALRAIYRSGILLKVIRDVTPLPHNGCRAPKKRRV

SEQ ID NO: 463 - DNA, 423 bp, Pelargonium hortorum
  CDS (1)..(423): transl_table=11
atggcaaaaacgatacgaagatatagttcatttagattgaggaatagacgcattcgttcgcgtaagagtgcacggaaaatacccaaaggaattattcacgttcaagcaagtttcagcaataccattgttactgttacagatgtagggggtcgggtggttacttcggcctctgccggcgcttgtggattcaagggtagaagaaggggtacgccctttgccgcccaaacaaccgccgaaaatgctattcgcacagtagtaactcaaggtatgcaccgagctgttgtcttagtaaaaggtgtcggtcgtgggagagatgcggcattacgagctattttgagaagcggtgtgcggttgcatttgttacgagatagaacccctttaccacacaatgggtgtaggcctcctaaaagaagacgtacgtag

SEQ ID NO: 464 - protein, 140 aa, Pelargonium hortorum
MAKTIRRYSSFRLRNRRIRSRKSARKIPKGIIHVQASFSNTIVTVTDVGGRVVTSASAGACGFKGRRRGTPFAAQTTAENAIRTVVTQGMHRAVVLVKGVGRGRDAALRAILRSGVRLHLLRDRTPLPHNGCRPPKRRRT

SEQ ID NO: 465 - DNA, 432 bp, Pennisetum americanum
  CDS (1)..(432): transl_table=11
atgaccaaaactatacccaaaataggttcacgtaagaaagtacgtattggtttgcgtaggaatgcccgttttagtttacgaaagagtgcacgtagaataacaaaaggggttattcatgttcaagccagtttcaacaataccattataaccgttacagacccacaaggtcgggtggttttctggtcctccgcaggtacttgtggattcaaaagctcacgaaaagcatcaccctatgctggtcaaagaacagcagtagatgctattcgtacagtgggtttgcaacgagcagaagttatggtaaaaggtgctggtagcggaagagacgccgcattacgagccattgctaaaagtggtgtacggttaagttgtatacgcgatgtaacacctatgccgcataatggatgtcgacctcctaaaaaaagacgtctgtaa

SEQ ID NO: 466 - protein, 143 aa, Pennisetum americanum
MTKTIPKIGSRKKVRIGLRRNARFSLRKSARRITKGVIHVQASFNNTIITVTDPQGRVVFWSSAGTCGFKSSRKASPYAGQRTAVDAIRTVGLQRAEVMVKGAGSGRDAALRAIAKSGVRLSCIRDVTPMPHNGCRPPKKRRL

SEQ ID NO: 467 - DNA, 417 bp, Phaseolus angularis
  CDS (1)..(417): transl_table=11
atggcaaaatctatacctaaaacaggttcgcgtaaaaatgtacgtattggttcgcgtaatcagactcgtaaaataccaaagggaattattcatgttcaagctagtttcaacaatactattgtgactattacagatgtacgaggtcgggtgatttcttggtcctccgctggtacttgcggattcaagggtacacgaaggggaacaccttttgccgctcaaactgcagcaggaaatgctattcgaacagtatcggatcaaggcatgcaacgagcagaaatcatgataaaagggcctggcctcggaagagatgcagcattaagagctattcgtagaagtggtatactattaaattttatacgagatgtaactcctatgccacataatggatgtaggtctcctaaaaaaagacgtgtataa

SEQ ID NO: 468 - protein, 138 aa, Phaseolus angularis
MAKSIPKTGSRKNVRIGSRNQTRKIPKGIIHVQASFNNTIVTITDVRGRVISWSSAGTCGFKGTRRGTPFAAQTAAGNAIRTVSDQGMQRAEIMIKGPGLGRDAALRAIRRSGILLNFIRDVTPMPHNGCRSPKKRRV

SEQ ID NO: 469 - DNA, 393 bp, Phaeodactylum tricornutum
  CDS (1)..(393): transl_table=11
atggcacaaacaacgagaaaatcaacaattagaaaagagaaaaatagttttacaagtggggttgttcatattcaatcaacttttaacaatacaattgtgacgattactaatttaactggagatacaatttcctgggcatctgctggaagttcaggctttaaaggtgccagaaagagtacaccatttgcagctcaaacagctgctgaaaaagctgccctagaagctttaagtacgggtatgaaaactgttgaaattttagtaaaagggcaaggatcaggacgtgagacagccattcgagcaattgaaggtgcaggttttgatattatttctatacaagatataacatcagttcctcataatggttgtcgaccaccaaaaagacgtcgcgtttag

SEQ ID NO: 470 - protein, 130 aa, Phaeodactylum tricornutum
MAQTTRKSTIRKEKNSFTSGVVHIQSTFNNTIVTITNLTGDTISWASAGSSGFKGARKSTPFAAQTAAEKAALEALSTGMKTVEILVKGQGSGRETAIRAIEGAGFDIISIQDITSVPHNGCRPPKRRRV

SEQ ID NO: 471 - DNA, 417 bp, Phaseolus vulgaris
  CDS (1)..(417): transl_table=11
atggcaaaatatatacctaaaacaggttcgcgtaaaaatgtacgtattggttcgcggaatcatacgcgtaaaataccaaaaggaattattcatgttcaagctagtttcaacaatactattgtaactattacagatgtacgaggtcgggtgatttcttggtcctccgctggtacttgtggattcaagggtacacgaaggggaacaccttttgccgctcaaactgcagcaggaaatgctattcgaacagtatcggatcaaggcatgcaacgagcagaaatcatgatcaaagggcctggtctcggaagagatgcagcattaagagctattcgtagaagtggtatactcttaaattttatacgagatgtaactcctatgccacataatggatgtaggtctcctaaaaaaagacgtgtataa

SEQ ID NO: 472 - protein, 138 aa, Phaseolus vulgaris
MAKYIPKTGSRKNVRIGSRNHTRKIPKGIIHVQASFNNTIVTITDVRGRVISWSSAGTCGFKGTRRGTPFAAQTAAGNAIRTVSDQGMQRAEIMIKGPGLGRDAALRAIRRSGILLNFIRDVTPMPHNGCRSPKKRRV

SEQ ID NO: 473 - DNA, 393 bp, Physcomitrella patens
  CDS (1)..(393): transl_table=11
atggcaaaattaataaaaaaaattagtttacgtaaaggtaaacgtagaatacctaaaggagttattcatattcaagcaagttttaataatactattgttactgtaacagatatacgtggacaagtcgttttttggtcttctgcgggtgcttgtggttttaaaggtgcaaaaaaaagtaccccttttgcagctcaaactgccgcagaaaatgctattcgtgttttaattgatcaaggtatgaaacaagctgaagttatgataagtggtcctggtccagggcgagatacagcattacgtgctattcgccgaagtggtgttattttaaattttgttcgtgatgtaactcctatgccacataatggatgtagacctccgaaaaaacgacgtgtttaa

SEQ ID NO: 474 - protein, 130 aa, Physcomitrella patens
MAKLIKKISLRKGKRRIPKGVIHIQASFNNTIVTVTDIRGQVVFWSSAGACGFKGAKKSTPFAAQTAAENAIRVLIDQGMKQAEVMISGPGPGRDTALRAIRRSGVILNFVRDVTPMPHNGCRPPKKRRV

SEQ ID NO: 475 - DNA, 393 bp, Pinus koraiensis
  CDS (1)..(393): transl_table=11
atgtcaaaaactataaaaagaattggttcacgtaggaatgaacatcgagtactcaaaggagttatttacgttcaagcaagttttaacaataccattgtgactgctacagatgtacggggacaagttatttcttggtcttctgctggtgcctgtggattcaaaggtacaaggagaggtacaccatttgctgcccagactgcagcagaaaatgttattcgcacattaatggatcggggtataggacgagtagaagttatgataagtggccctggtcgagggagagatacagcattacgaaccattcgtagaagtggcatactattaagttttgtacgtgacgtaacccctatgccacataatggatgtagacctcccaaaaagagacgtgtttaa

SEQ ID NO: 476 - protein, 130 aa, Pinus koraiensis
MSKTIKRIGSRRNEHRVLKGVIYVQASFNNTIVTATDVRGQVISWSSAGACGFKGTRRGTPFAAQTAAENVIRTLMDRGIGRVEVMISGPGRGRDTALRTIRRSGILLSFVRDVTPMPHNGCRPPKKRRV

SEQ ID NO: 477 - DNA, 393 bp, Pinus thunbergii
  CDS (1)..(393): transl_table=11
atgtcaaaaactataaaaagaattggttcacgtaggaatgaacatcgagtactcaaaggagttatttacgttcaagcaagttttaacaataccatagtgactgctacagatgtacggggacaagttctttcttggtcttctgctggtgcctgtggattcaaaggtacaaggagaggtacaccatttgctgcccagactgcagcagaaaatgttattcgtgcattaatggatcggggtatggaacgagtagaagttatgataagtggccctggtcgagggagagatacagcattacgaaccattcgtagaagtggcatactattaagttttgtacgtgacgtaacccctatgccacataatggatgtagacctcccaaaaagagacgtgtgtaa

SEQ ID NO: 478 - protein, 130 aa, Pinus thunbergii
MSKTIKRIGSRRNEHRVLKGVIYVQASFNNTIVTATDVRGQVLSWSSAGACGFKGTRRGTPFAAQTAAENVIRALMDRGMERVEVMISGPGRGRDTALRTIRRSGILLSFVRDVTPMPHNGCRPPKKRRV

SEQ ID NO: 479 - DNA, 417 bp, Platanus occidentalis
  CDS (1)..(417): transl_table=11
atggcaaaacctatacaaagaattggttcacgtaggaatggacctattggttcacgtaagaatggacgtagaataccaaagggagttattcatgttcaagcaagtttcaacaacaccattgtgactgttacagatgtaaggggtcgggtggtttcttggtcctccgccggtgcttgtggatttaggggcacaagaagagggacaccttttgctgctcaaaccgcagcaggaaatgctattcgtacagtagtggatcagggtatgcaacgagcagaagtcatgataaagggtcctggtctcggaagagatgcagcattacgagccattcgtagaagtggtatactattaagtttcgtacgggacgtaactcctatgccacataatggatgtagacctcctaaaaaaagacgtgtgtag

SEQ ID NO: 480 - protein, 138 aa, Platanus occidentalis
MAKPIQRIGSRRNGPIGSRKNGRRIPKGVIHVQASFNNTIVTVTDVRGRVVSWSSAGACGFRGTRRGTPFAAQTAAGNAIRTVVDQGMQRAEVMIKGPGLGRDAALRAIRRSGILLSFVRDVTPMPHNGCRPPKKRRV

SEQ ID NO: 481 - DNA, 417 bp, Populus alba
  CDS (1)..(417): transl_table=11
atggcaaaacttttaccaagaattggttcccgcaagaatggacgtattagttcacgtaaaaatgcacgtaaaattcctaagggagttattcatgtccaagcaagtttcaacaatactattgtgaccgttacagatgtacgaggtcgggtgatctcttggtcctccgcaggcgcttgtggattcaggggcacaagaagagggacgccatttgctgctcaaactgcagcaggaaatgctattcggaccgtagtggatcaaggtatgcaacgagcagaagtcatgataaagggtcctggtctaggaagagatgcggcattaagagctattcgtagaagtggtatactattaagtttcgtccgggatgtaacccctatgccacataatggctgcaggcctcctaaaaaaagacgtgtgtaa

SEQ ID NO: 482 - protein, 138 aa, Populus alba
MAKLLPRIGSRKNGRISSRKNARKIPKGVIHVQASFNNTIVTVTDVRGRVISWSSAGACGFRGTRRGTPFAAQTAAGNAIRTVVDQGMQRAEVMIKGPGLGRDAALRAIRRSGILLSFVRDVTPMPHNGCRPPKKRRV

SEQ ID NO: 483 - DNA, 393 bp, Pseudendoclonium akinetum
  CDS (1)..(393): transl_table=11
atggcaaaacaaattcgaaaaacaaacaaaaaagtaaaaatgacaaagctcccaaaaggcgttgtccatattcaatcaacttttaataatacaatagtcacaattacaaatttaaaaggggaagttatatcttggtcatctgctggtgctgttggcttcaaaggtgcgcgtaaatccacgccatttgcggcaaaaaccgctgcgcaaactgctgctcgacaatcaatggatcaaggtcttaaacaagcaaaagttttagtaaaaggagcaggtccaggaagagaaacagcgattcgtggattaattgattcgggtcttcaaattactttaattcgcgatattacagcgattcctcacaatggttgcagacctccaaaaaaaagacgtgtttaa

SEQ ID NO: 484 - protein, 130 aa, Pseudendoclonium akinetum
MAKQIRKTNKKVKMTKLPKGVVHIQSTFNNTIVTITNLKGEVISWSSAGAVGFKGARKSTPFAAKTAAQTAARQSMDQGLKQAKVLVKGAGPGRETAIRGLIDSGLQITLIRDITAIPHNGCRPPKKRRV

SEQ ID NO: 485 - DNA, 393 bp, Psilotum nudum
  CDS (1)..(393): transl_table=11
atgccaaaacctataaaaagacttagttcacataaaaagaaacgtgtaatatttaaaggaattattcaaattaaagcaagttttaataatactattgtcactgttacaaatagtcaaggacaggttattacctggtcttctgctggtgcttgtggattcaaaggaacgaaaaggagtacaccattcgctgctcaaattgcaacagaaaacgctattcgtaccttgattagtcaaggtatgaaacaagcagaagttatgataagcggtcctggtccaggaagagacacagcattgcgtactattcgtaaaagtggtctagtcttacattttgtgcgcgatgtaactcctttgccgcataatggatgtagacctcccaaaaggagacgtgtataa

SEQ ID NO: 486 - protein, 130 aa, Psilotum nudum
MPKPIKRLSSHKKKRVIFKGIIQIKASFNNTIVTVTNSQGQVITWSSAGACGFKGTKRSTPFAAQIATENAIRTLISQGMKQAEVMISGPGPGRDTALRTIRKSGLVLHFVRDVTPLPHNGCRPPKRRRV

SEQ ID NO: 487 - DNA, 432 bp, Saccharum hybrid
  CDS (1)..(432): transl_table=11
atgacaaaagctataccaaaaataggttcacgtaagaaagtgcgtattggtttgcgtaggaatgcccgttttagtttacggaagagtgcacgtagaataacaaaaggggttattcatgttcaagccagtttcaacaataccattataaccgttacagacccacaaggtcgggtcgttttctggtcctccgcaggtacttgtggattcaaaagctcaagaaaagcatcaccctatgctggtcaaagaacagcagtagatgctattcgtacagtgggtttgcaacgagcagaagttatggtaaaaggtgctggtagcggaagagatgccgcattacgagccattgctaaaagtggtgtacggttaagttgtatacgcgatgtaacacctatgccgcataatggatgtcgacctcctaaaaaaagacgtctgtaa

SEQ ID NO: 488 - protein, 143 aa, Saccharum hybrid
MTKAIPKIGSRKKVRIGLRRNARFSLRKSARRITKGVIHVQASFNNTIITVTDPQGRVVFWSSAGTCGFKSSRKASPYAGQRTAVDAIRTVGLQRAEVMVKGAGSGRDAALRAIAKSGVRLSCIRDVTPMPHNGCRPPKKRRL

SEQ ID NO: 489 - DNA, 393 bp, Scenedesmus obliquus
  CDS (1)..(393): transl_table=11
atggctagacaaactagaaaagtatcacctacaaaaattaaaaaacgtacatatcgaggaattgtttatattcaagctggacatcataatactattattacattagcaaatcttcgtggtgaagtcctttgttggagttctgctggagcttgtggtttccgtggaaaaagaaaagcaacaacatttgcagcaaaaaaagctgctgaagttgtggcaaaaaaatcacgtgaatttgcattaaatgaagcaaaaattttagtaactggtccaggacaagggcgcgaaacagctattcgtgaaatttttaaagctggaattaaagtaaatgttattcgagaaaaaacaggaattccacataatggatgtcgtcctccaaaaaaaagacgtgtttaa

SEQ ID NO: 490 - protein, 130 aa, Scenedesmus obliquus
MARQTRKVSPTKIKKRTYRGIVYIQAGHHNTIITLANLRGEVLCWSSAGACGFRGKRKATTFAAKKAAEVVAKKSREFALNEAKILVTGPGQGRETAIREIFKAGIKVNVIREKTGIPHNGCRPPKKRRV

SEQ ID NO: 491 - DNA, 417 bp, Solanum bulbocastanum
  CDS (1)..(417): transl_table=11
atggcaaaagctataccgaaaattagttcgcgtcggaatggacgtattagttcacgtaagggtgcacgtagaataccaaagggagttattcatgttcaagcaagtttcaataataccattgtcactgttacagatgtacggggtcgagtagtttcttggtcctcagctggtacttctggattcaaaggtacgagaagaggaacaccgtttgctgctcaaaccgcagcagcaaacgctatccgtacagtagtggatcaaggtatgcaacgagcggaagtcatgataaaaggtcccggtctcggaagagatgcagcattacgagctattcgtcgcagtggtatactattaactttcgtacgggatgtaactccgatgccacataatggctgtagacctccgaaaaaaagacgtgtgtag

SEQ ID NO: 492 - protein, 138 aa, Solanum bulbocastanum
MAKAIPKISSRRNGRISSRKGARRIPKGVIHVQASFNNTIVTVTDVRGRVVSWSSAGTSGFKGTRRGTPFAAQTAAANAIRTVVDQGMQRAEVMIKGPGLGRDAALRAIRRSGILLTFVRDVTPMPHNGCRPPKKRRV

SEQ ID NO: 493 - DNA, 417 bp, Glycine max
  CDS (1)..(417): transl_table=11
atggcaaaacctatatctaaaaagggttcgcgtaaaaatgtacgtattggttcgcgtaagcatactcgtaaaataccaaagggagttattcatgttcaagctagtttcaacaatactattgtaactgttacagatgtacgaggtcgggtgatttcttggtcctccgccggtacttgcggattcaaaggtacacgaagggggacaccttttgccgctcaaactgcagcaggaaatgctattcgaacagtatcggatcaaggcatgcaacgagcagaagtcatgataaaaggtcctggtctcggaagagatgcggcattaagagctattcgtagaagtggtatactattaaattttatacgagatgtaactcctatgccacataatggatgtagatctcctaaaaaaagacgtgtgtaa

SEQ ID NO: 494 - protein, 138 aa, Glycine max
MAKPISKKGSRKNVRIGSRKHTRKIPKGVIHVQASFNNTIVTVTDVRGRVISWSSAGTCGFKGTRRGTPFAAQTAAGNAIRTVSDQGMQRAEVMIKGPGLGRDAALRAIRRSGILLNFIRDVTPMPHNGCRSPKKRRV

SEQ ID NO: 495 - DNA, 393 bp, Spirogyra maxima
  CDS (1)..(393)
atggcaaaaacagcaaacaaaataaatatacgtaaagtaaaaagaaaaactccaaaagcaataattcacgtacaagcaagttttaataatactattgtgactgtgactgatgtacaaggacaagttatatcttcttgctctgcaggagcttgtggttttaaaggagctaaaaagaacactccttttgctgctcaaactgcagcagaaaatgctattcgtttattaatagatcaaggcttaaaacaagcagaagttatgataagtggtccaggtcggggacgagatacagcattacgcgctattaggaatagtggtataacactaagtttagtaagagatgttactccattacctcataatggttgtagacgccctaaaacacgtcgtgtataa

SEQ ID NO: 496 - protein, 130 aa, Spirogyra maxima
MAKTANKINIRKVKRKTPKAIIHVQASFNNTIVTVTDVQGQVISSCSAGACGFKGAKKNTPFAAQTAAENAIRLLIDQGLKQAEVMISGPGRGRDTALRAIRNSGITLSLVRDVTPLPHNGCRRPKTRRV

SEQ ID NO: 497 - DNA, 417 bp, Spinacia oleracea
  CDS (1)..(417)
atggcaaaacctataccaaaaattggttcacgtagaaatggacgtattagttcgcgtaaaagtgcacgtaaaataccaaagggtgttattcatgttcaagcaagttttaataataccattgtaactgttacagatgtacgaggtcgagtcgtttcttgggcttctgccggtacttgtggattcaggggtacaaaaagaggaacaccatttgcggctcaaaccgcagcgggaaatgctattcgtacggtggtggaacaaggtatgcaacgagcagaagtcatgataaaaggtcctggtctcggaagggatgcagcattacgggctattcgtagaagcggtatactattaagtttcgtgcgagacgtaacccctatgccgcataatggctgtaggcctcctaaaaaaagacgcgtctag

SEQ ID NO: 498 - protein, 138 aa, Spinacia oleracea
MAKPIPKIGSRRNGRISSRKSARKIPKGVIHVQASFNNTIVTVTDVRGRVVSWASAGTCGFRGTKRGTPFAAQTAAGNAIRTVVEQGMQRAEVMIKGPGLGRDAALRAIRRSGILLSFVRDVTPMPHNGCRPPKKRRV

SEQ ID NO: 499 - DNA, 393 bp, Staurastrum punctulatum
  CDS (1)..(393): transl_table=11
atggcaagaccttcaaaaaaaataagtctaagaaaagggaaaaaaagagctccgaaaggagttattcatgttcaagctagttttaataatactatagttacagtaaccgatgtaagaggacaaacaatgtcgtggtcttctgctggttcttgtggttttaaaggagcaaaaaaaagtacaccttttgcagctcaaacagctgctgaaaatgcgatttctcttttaatagatcaaggtatgagacaagcagaagtaatgattagtggtcctggtcccggaagggataccgctttgcgagctattaaaaatagtggtcttgtaataagttttgtacgagatgtaactcctatgccgcataatggttgtagaccttctagccaacgtcgcgtttaa

SEQ ID NO: 500 - protein, 130 aa, Staurastrum punctulatum
MARPSKKISLRKGKKRAPKGVIHVQASFNNTIVTVTDVRGQTMSWSSAGSCGFKGAKKSTPFAAQTAAENAISLLIDQGMRQAEVMISGPGPGRDTALRAIKNSGLVISFVRDVTPMPHNGCRPSSQRRV

SEQ ID NO: 501 - DNA, 393 bp, Stigeoclonium helveticum
  CDS (1)..(393): transl_table=11
ttgtcaaaacaaattagaaaaaatgtcaagaaacctagaaaaaaaatttatcgtggggtagtttatattcaaacgactcaaaataatactattgtaacaatcacaaatattaaaggggatgctgtatgttggagttcagctgggtcatgtgatttgaaaggacgccgtaaggcaacagcttatgctgcaaaattagcagcagcaaatgctgcaaaaaaagcacgccgtgagtttgtattaaaagaggctaaagtattaattactggtccaggagcagctcgcgatactgctatacatgaaatccacaaagctgggattaaattaacgattttaagagaaaaatcaggtgttcctcataatggttgtcgaccgccaaaacgtcgtcgtgtttaa

SEQ ID NO: 502 - protein, 130 aa, Stigeoclonium helveticum
MSKQIRKNVKKPRKKIYRGVVYIQTTQNNTIVTITNIKGDAVCWSSAGSCDLKGRRKATAYAAKLAAANAAKKARREFVLKEAKVLITGPGAARDTAIHEIHKAGIKLTILREKSGVPHNGCRPPKRRRV

SEQ ID NO: 503 - DNA, 417 bp, Vitis vinifera
  CDS (1)..(417): transl_table=11
atggcaaaacctataccaagaattggttcacgtaggaatggacgtattggttcacgtaagagtgcgcgtagaataccaaagggagttattcatgttcaagcaagttttaacaataccattgtgaccgttacagatgtacggggtcgggtggtttcttggtcctcggccggtacttgtggattcaggggtacaagaagagggacgccatttgctgctcaaaccgcagcaggaaatgctattcgtacagtagtggatcaaggtatgcaacgagcagaagtcatgataaagggtcctggtctcggaagagatgcagcattacgagctattcgtagaagtggtatactattaagtttcgtacgggatgtaactcctatgccacataacggctgtagacctcctaaaaaaagacgtgtatag

SEQ ID NO: 504 - protein, 138 aa, Vitis vinifera
MAKPIPRIGSRRNGRIGSRKSARRIPKGVIHVQASFNNTIVTVTDVRGRVVSWSSAGTCGFRGTRRGTPFAAQTAAGNAIRTVVDQGMQRAEVMIKGPGLGRDAALRAIRRSGILLSFVRDVTPMPHNGCRPPKKRRV

SEQ ID NO: 505 - DNA, 393 bp, Zygnema circumcarinatum
  CDS (1)..(393): transl_table=11
atggttagaccagcaaataaaattcttattcgaaaaaataaaaggagaacttcaaagggagtaatccatgttcaagctagctttaacaatacgattattactatcacagatgtacgaggacaggtaatatcttggtcttctgctggagcttctggatttaaagcagctaaaaaaagcacaccttttgccgcacaaattgcagcagaaaatgctttacgcgttcttattgatcaaggcatgaaacaagcagaagttatgttgagtggtccaggtcgaggtcgagacacagcattaagggcaattatcaatagtggtattcaacttagttttgttagagacgtaaccccgatgccacataatggctgtagagcgcccaaaaaacgacgtgtataa

SEQ ID NO: 506 - protein, 130 aa, Zygnema circumcarinatum
MVRPANKILIRKNKRRTSKGVIHVQASFNNTIITITDVRGQVISWSSAGASGFKAAKKSTPFAAQIAAENALRVLIDQGMKQAEVMLSGPGRGRDTALRAIINSGIQLSFVRDVTPMPHNGCRAPKKRRV

SEQ ID NO: 507 - DNA, 387 bp, Acinetobacter sp
  CDS (1)..(387): transl_table=11
atggctaaagatactcgcacacgcaagaaggtcacccgtaccgtctctgaaggtgttgcacacattcacgcgtcttttaataacaccattgttacgattaccgatcgtcaaggtaatgcattggcttgggccacctcaggtggacaaggcttccgtggttcacgtaaatcaactccgtttgctgctcaggtagctgctgaagttgctggtaaagcagctttggattacggtttgaaaaacctagacgtccttgtaaaaggtcctggtccaggtcgtgagtctgcggttcgtgcattaggcgcagtgggttataagatcaacagcattaccgatgtgactccaatccctcacaacggttgccgtccacctaaaaaacgtcgcgtgtaa

SEQ ID NO: 508 - protein, 128 aa, Acinetobacter sp
MAKDTRTRKKVTRTVSEGVAHIHASFNNTIVTITDRQGNALAWATSGGQGFRGSRKSTPFAAQVAAEVAGKAALDYGLKNLDVLVKGPGPGRESAVRALGAVGYKINSITDVTPIPHNGCRPPKKRRV

SEQ ID NO: 509 - DNA, 405 bp, Acidovorax sp
  CDS (1)..(405): transl_table=11
atggctaaatctcctgccaataatgccgcgcaacgtgtgcgcaagaaggttcgcaagaacatttcggacggcatcgcccacgtgcacgcctccttcaacaacacgatcattacgatcaccgatcgccaaggcaatgctctgtcctgggcgtcttctggtggccagggcttcaagggttcgcgcaagtcaactccttttgctgctcaggtggcatcggaagtggccggtcgcgcagccattgagcaaggcatcaagaacctcgatgtcgaaatcaagggtcccggtcctggccgcgaatcctcggtgcgcgcgctgggcgctctcggcatccgcatcacctccatctcggatgtgacgcctgtgccccacaacggttgccgcccccagaaacgccgccgtatttaa

SEQ ID NO: 510 - protein, 134 aa, Acidovorax sp
MAKSPANNAAQRVRKKVRKNISDGIAHVHASFNNTIITITDRQGNALSWASSGGQGFKGSRKSTPFAAQVASEVAGRAAIEQGIKNLDVEIKGPGPGRESSVRALGALGIRITSISDVTPVPHNGCRPQKRRRI

SEQ ID NO: 511 - DNA, 402 bp, Aeropyrum pernix
  CDS (1)..(402): transl_table=11
ttggccatgtaccctagggagcttaaatggggtgtagcccatatttacagcagcttcaataacacacacgtccacatcaccgaccttacgggtgccgaaacggtagcgagggtgaccggaggtatggttgtcaaggccgacagggagaagcccagcccctacgcggccatgatagccgccagcagggcggctcagaaggccatggagcgtggtatagctgctatacacataaaggtcagggcgcccggggggcatggtcccaagaccccgggtcccggtgctcaggcggccataagggctctagctagagcaggcttcatcataggcaggatagaggatgtgacgccgataccccacgacacaactagaaggccaggcggcaggaggggtaggagagtctag

SEQ ID NO: 512 - protein, 133 aa, Aeropyrum pernix
MAMYPRELKWGVAHIYSSFNNTHVHITDLTGAETVARVTGGMVVKADREKPSPYAAMIAASRAAQKAMERGIAAIHIKVRAPGGHGPKTPGPGAQAAIRALARAGFIIGRIEDVTPIPHDTTRRPGGRRGRRV

SEQ ID NO: 513 - DNA, 390 bp, Agrobacterium tumefaciens
  CDS (1)..(390): transl_table=11
atggccaaggaagccgcacgcgtccgtcgtcgcgaacgcaaaaatatcacgtctggcgtcgcgcacgtcaattcgaccttcaacaacacgatgatcaccatcaccgacgcacagggcaatgctattgcctggtcgtccgctggtgccaagggcttcaagggttcgcgcaagtcgactccgttcgctgcccagatcgctgctgaagattgcgcgaagaaggctcaggaacacggcatgaagtcgcttgaagtcgaagtttgcggtccgggttccggtcgtgaatcggcacttcgcgctctgcaggctgccggtttcatgatcacttccattcgcgacgtgacgccgatcccgcacaacggttgccgtccgcgcaagaagcgccgcgtctga

SEQ ID NO: 514 - protein, 129 aa, Agrobacterium tumefaciens
MAKEAARVRRRERKNITSGVAHVNSTFNNTMITITDAQGNAIAWSSAGAKGFKGSRKSTPFAAQIAAEDCAKKAQEHGMKSLEVEVCGPGSGRESALRALQAAGFMITSIRDVTPIPHNGCRPRKKRRV

SEQ ID NO: 515 - DNA, 393 bp, Alkalilimnicola ehrlichei
  CDS (1)..(393): transl_table=11
atggcgaaagcagcgacccggtcacgcactaagcgtgccaagcgtacggtggttgacggcatcgcgcacatcaacgcgaccttcaacaacacgattatcaccatcacggaccgccagggcaatggcctggcctgggccagcgccggcggcagtggctttcgtggctcccgtaagagcacgccctttgcggcccaggtggcttccgagcgtgccggccgggctgccctggattacggcctgaaaaacctggaggttcgcgtcaagggcccggggccgggtcgtgagtcggcggtgcgcgcattgaacgccgtgggctaccggatcaccaatatttccgacgtcagccccattccgcacaacggctgccggccgcccaagaagcgccgcgtctga

SEQ ID NO: 516 - protein, 130 aa, Alkalilimnicola ehrlichei
MAKAATRSRTKRAKRTVVDGIAHINATFNNTIITITDRQGNGLAWASAGGSGFRGSRKSTPFAAQVASERAGRAALDYGLKNLEVRVKGPGPGRESAVRALNAVGYRITNISDVSPIPHNGCRPPKKRRV

SEQ ID NO: 517 - DNA, 375 bp, Anaplasma marginale
  CDS (1)..(375): transl_table=11
atggcggtagttaagaagaggaggaacgttgttgtgggcgaggtgcatatctacgccacgtataacaacgtaattgtgacgattgctgatcagcaggggcacgttcttgtcactacctcggccggggcttgtaactttaaaggctccaagaaggcgaccccttatgccgctcaggagacggtcgcgagagcagttaaagccgttgttgagcggaatggtatgaggacggtgtcggtgtgcatatccggtcctggtgctggtagggaagctgccatcagggcggttcagacctgtaacctcaatgttacgtccataagggatactactaagctccctcacaatgggtgtaagctgccgaagaggcgcagggtatag

SEQ ID NO: 518 - protein, 124 aa, Anaplasma marginale
MAVVKKRRNVVVGEVHIYATYNNVIVTIADQQGHVLVTTSAGACNFKGSKKATPYAAQETVARAVKAVVERNGMRTVSVCISGPGAGREAAIRAVQTCNLNVTSIRDTTKLPHNGCKLPKRRRV

SEQ ID NO: 519 - DNA, 375 bp, Anaplasma phagocytophilum
  CDS (1)..(375): transl_table=11
atggcggtagttaagaagaagagaaatgttgtagttggaagggtgcacatttgcgctacttataacaatgtcatcgtgactatagcggatcagcagggtcatgtgcttgtcactacttccgctggggcatgtaattttaagggtagtaagaagtctactccttatgcggcgcaggagactgtggctagggctgtaaaggctgtaatcgagcgaaatggtatgaagactgtatcggtatgtatttcagggccgggtgcaggtagggaagcggcgattagggctgtgcaggcttgcaatctgaatgttacgtctattaaggatgtgactaaacttcctcacaatgggtgtaagttgccaaaaaggcgcagggtgtag

SEQ ID NO: 520 - protein, 124 aa, Anaplasma phagocytophilum
MAVVKKKRNVVVGRVHICATYNNVIVTIADQQGHVLVTTSAGACNFKGSKKSTPYAAQETVARAVKAVIERNGMKTVSVCISGPGAGREAAIRAVQACNLNVTSIKDVTKLPHNGCKLPKRRRV

SEQ ID NO: 521 - DNA, 396 bp, Anabaena sp
  CDS (1)..(396): transl_table=11
atggcaagacaaccaacaaaaaaatctgggagtaagaagcagaaacggaacgttcccaatggaatggcttacatccaatctactttcaacaatagcattgtcaccatcaccgaccaaaatggagatgtaatttcttgggctagtgcaggttctagcggttttaaaggtgctaaaaaaggaactccctttgcagcacaaaccgcagcagaaagtgcagccagacgagctatcgaccaaggaatgcgccaaattgaagtgatggttagtgggccaggagcaggtagagaaactgcgattcgggcgcttcaaggagcagggctagaaattaccctgattcgagacataacccccattcctcacaatggttgccgtccgccaaaacgccgtcgcgtatag

SEQ ID NO: 522 - protein, 131 aa, Anabaena sp
MARQPTKKSGSKKQKRNVPNGMAYIQSTFNNSIVTITDQNGDVISWASAGSSGFKGAKKGTPFAAQTAAESAARRAIDQGMRQIEVMVSGPGAGRETAIRALQGAGLEITLIRDITPIPHNGCRPPKRRRV

SEQ ID NO: 523 - DNA, 378 bp, Aquifex aeolicus
  CDS (1)..(378): transl_table=11
atggcgaaaaagaaaaagaaacagaaaagacaggtaacaaaagccatagttcacatacacacaacctttaacaacacgatagttaacgtaacagacactcagggaaataccatcgcatgggctagcggtggaactgtagggtttaagggcacgagaaaatcaaccccttacgcagcacagcttgcagctcaaaaggctatgaaagaggcaaaggaacacggagttcaggaagttgagatatgggtcaaaggccccggagcaggaagggagtcagcggtaagggctgtattcgcttcgggggtaaaggtaaccgccataagggatgttacgcctattccccacaacggttgcagaccacctgcgaggaggagagtgtaa

SEQ ID NO: 524 - protein, 125 aa, Aquifex aeolicus
MAKKKKKQKRQVTKAIVHIHTTFNNTIVNVTDTQGNTIAWASGGTVGFKGTRKSTPYAAQLAAQKAMKEAKEHGVQEVEIWVKGPGAGRESAVRAVFASGVKVTAIRDVTPIPHNGCRPPARRRV

SEQ ID NO: 525 - DNA, 402 bp, Archaeoglobus fulgidus
  CDS (1)..(402): transl_table=11
atggccgagaagaagaagggaggaaggtgggggatagctcacatctactcgtcatacaacaacacgattatcacgattacagacataaccggagcggagataattgcaagagtaagcggcggaatgatcgtcaaggccgacagagatgagggcaacccttacaccgcaatgcaggcggcacttagggctgcagcgatagcgaaggaaaagggaattgacggtgtgcacataaaggttagggctccgggaggaaacaagcacacaactcccggccctggggcgcaggcggcgataagagcccttgcaagggcagggcttaagataggaagaattgaagacgttacgccaattccgcacgacggaacgagacctccgggaggtaagagaggcaggagagtctga

SEQ ID NO: 526 - protein, 133 aa, Archaeoglobus fulgidus
MAEKKKGGRWGIAHIYSSYNNTIITITDITGAEIIARVSGGMIVKADRDEGNPYTAMQAALRAAAIAKEKGIDGVHIKVRAPGGNKHTTPGPGAQAAIRALARAGLKIGRIEDVTPIPHDGTRPPGGKRGRRV

SEQ ID NO: 527 - DNA, 390 bp, Azoarcus sp
  CDS (1)..(390): transl_table=11
atggccaagactgcaactaaggttcgcaagaagatcaagaagaacgttgccgagggtatcgcccacgtgcacgcgagcttcaacaacacgatcatcacgatcaccgatcgccagggcaacgccctgtcgtgggcgacttccgggggcgccggcttcaagggctcgcgtaagagcaccccgttcgccgctcaggtcgccgccgaggcggccggcaaggtggcgcaggagtgcggcgtcaagaatctcgaggttcgcatcaaggggcccggccccggccgcgaatccgccgttcgcgcgctgaacgcgctggggatgaagatttccagcatcacggatatcacccccattccgcacaacggctgccgtccgccgaagaagcgccgtatctga

SEQ ID NO: 528 - protein, 129 aa, Azoarcus sp
MAKTATKVRKKIKKNVAEGIAHVHASFNNTIITITDRQGNALSWATSGGAGFKGSRKSTPFAAQVAAEAAGKVAQECGVKNLEVRIKGPGPGRESAVRALNALGMKISSITDITPIPHNGCRPPKKRRI

SEQ ID NO: 529 - DNA, 390 bp, Azoarcus sp
  CDS (1)..(390): transl_table=11
atggctaaaactgctgcgaaagttcgcaagaaggtcaagaagaacgtcgccgagggcatcgcccacgtgcacgcgagcttcaacaacacgatcatcactatcaccgaccgccagggcaatgcgttgtcctgggcgacctctggtggtgccggcttcaagggctcacggaaaagtaccccgtttgccgcccaggtcgcggccgaagctgccggcaaagctgcacaggaatgtggcgtcaagaacctggaggtccgcatcaagggcccggggcccgggcgcgaatccgctgtccgtgcactcaatgcgctgggcatgaagatctccagcattaccgacatcacgccgatcccgcataacggctgccgcccgccgaaaaagcgccgcatctga

SEQ ID NO: 530 - protein, 129 aa, Azoarcus sp
MAKTAAKVRKKVKKNVAEGIAHVHASFNNTIITITDRQGNALSWATSGGAGFKGSRKSTPFAAQVAAEAAGKAAQECGVKNLEVRIKGPGPGRESAVRALNALGMKISSITDITPIPHNGCRPPKKRRI

SEQ ID NO: 531 - DNA, 390 bp, Bacillus cereus
  CDS (1)..(390): transl_table=11
atggcacgtaaaacaaacactcgtaaaaaacgtgtgaaaaagaatattgaagctggtatagctcatattcgttctactttcaacaacacaatcgtaacacttacagatactcacggtaacgcactttcttggtctagtgctggtgcacttggtttccgtggatctcgtaaatctactccattcgctgcgcaaatggctgctgaaactgctgctaaagctgcaatggaacacggtttaaaaactttagaggttactgttaaaggtcctggtgctggtcgtgaagctgcaattcgtgctcttcaagctgcaggtctagaagtaacagcaattagagatgttactccagttcctcataatggatgtcgtccaccaaaacgtcgtcgtgtgtaa

SEQ ID NO: 532 - protein, 129 aa, Bacillus cereus
MARKTNTRKKRVKKNIEAGIAHIRSTFNNTIVTLTDTHGNALSWSSAGALGFRGSRKSTPFAAQMAAETAAKAAMEHGLKTLEVTVKGPGAGREAAIRALQAAGLEVTAIRDVTPVPHNGCRPPKRRRV

SEQ ID NO: 533 - DNA, 390 bp, Bacteroides fragilis
  CDS (1)..(390): transl_table=11
atggcaaaaaaaacagtcgcagctaagaagagaaatgttaaggtagatgctaatggacaattgcatgttcattcatctttcaacaatattattgtttctcttgcaaatagtgaagggcagattatctcttggtcgtctgcaggaaagatgggatttagaggttctaaaaagaatactccttatgcagctcagatggctgcccaggattgtgctaaaattgcattcgatcttggcctgagaaaggtaaaagcatatgttaaaggtccgggtaacggtcgtgaatctgctattagaacgattcatggtgccggtattgaagttacagaaatcattgacgtaactccgcttccgcataacggttgtcgtcctccgaaaagacgtagagtttaa

SEQ ID NO: 534 - protein, 129 aa, Bacteroides fragilis
MAKKTVAAKKRNVKVDANGQLHVHSSFNNIIVSLANSEGQIISWSSAGKMGFRGSKKNTPYAAQMAAQDCAKIAFDLGLRKVKAYVKGPGNGRESAIRTIHGAGIEVTEIIDVTPLPHNGCRPPKRRRV

SEQ ID NO: 535 - DNA, 390 bp, Bacillus halodurans
  CDS (1)..(390): transl_table=11
atggctaagaaaacgaacactcgtaaacgtcgccaacgtaaaaatgtggagactggcgtagcgcacattcgttctacgttcaacaacacaatcgtgacgattacagaccctcatggaaacgccatttcttgggcgtctgctggggctcttggtttcaaaggttctcgtaaatccacaccattcgcagcacagatggctgctgaaactgctgcaaaagcagcaatggagcatggcatgaagtcaattgaagtgtcagttaaaggtcctggtgctggtcgtgaagcagcgatccgttcattacaagccgttggattagaagttaacatgatcaaagatgtgactcctgttccacataacggttgccgtccgccaaaacgtcgtcgtgtgtaa

SEQ ID NO: 536 - protein, 129 aa, Bacillus halodurans
MAKKTNTRKRRQRKNVETGVAHIRSTFNNTIVTITDPHGNAISWASAGALGFKGSRKSTPFAAQMAAETAAKAAMEHGMKSIEVSVKGPGAGREAAIRSLQAVGLEVNMIKDVTPVPHNGCRPPKRRRV

SEQ ID NO: 537 - DNA, 396 bp, Bacillus licheniformis
  CDS (1)..(396): transl_table=11
atggctgctgcacgtaaaacaaacacgcgtaaacgtcgcgtgaaaaagaatattgaatctggaattgctcatatccgttcaactttcaacaacacgattgttactatcacagatgttcatggcaatgctctttcttggtcaagtgccggagctttaggatttaaaggttctaaaaaatccactccattcgctgcacaaatggctgctgaaacagctgctaaaggttctatcgaacatggacttaaaactcttgaagttactgtaaaaggaccaggttccggccgtgaagctgcaattcgtgcacttcaagctgctggactagaagttacagcgatcagagacgtaacgcctgttcctcataacggatgccgtccgccaaaacgtcgccgcgtgtaa

SEQ ID NO: 538 - protein, 131 aa, Bacillus licheniformis
MAAARKTNTRKRRVKKNIESGIAHIRSTFNNTIVTITDVHGNALSWSSAGALGFKGSKKSTPFAAQMAAETAAKGSIEHGLKTLEVTVKGPGSGREAAIRALQAAGLEVTAIRDVTPVPHNGCRPPKRRRV

SEQ ID NO: 539 - DNA, 402 bp, Bacillus clausii
  CDS (1)..(402): transl_table=11
atgaaaaacatggctaaaaaaacgaatactcgtccaaaacgtcgtcaaagaaaaaacattgacagtggtgtggctcacatccgttctacattcaacaacacaattgtgacgattacagatcctcatggcaatgcgatttcttgggctagcgctggcgcacttggttttaaaggctctcgtaagtcaacaccatttgctgcgcaaatggctgctgaatcagctgccaaaacagcgatggagcatggcatgaaaacgatcgaagtttcagttaaaggcccaggagctggccgtgaagcggcaatccgttcattgcaagctgtagggcttgaagtgaacatgattaaagatgtgacaccagttccacacaatggctgccgtccgccgaaacgtcgtagagtgtaa

SEQ ID NO: 540 - protein, 133 aa, Bacillus clausii
MKNMAKKTNTRPKRRQRKNIDSGVAHIRSTFNNTIVTITDPHGNAISWASAGALGFKGSRKSTPFAAQMAAESAAKTAMEHGMKTIEVSVKGPGAGREAAIRSLQAVGLEVNMIKDVTPVPHNGCRPPKRRRV

SEQ ID NO: 541 - DNA, 396 bp, Bacillus subtilis
  CDS (1)..(396): transl_table=11
atggctgctgctcgtaaatctaacacgcgtaaacgtcgcgtgaaaaagaatattgagtctggaattgctcatattcgttcaactttcaataacacgatcgttacgatcactgacactcatggtaatgctatttcttggtctagtgccggagctttaggattcagaggttctcgtaaatctactccttttgctgcgcaaatggctgcagaaacagctgctaaaggttcaatcgaacatggtcttaaaactctagaggttactgttaaaggacctggttcaggccgtgaagctgcaatccgtgcacttcaagctgctggactagaagtcactgctatcagagacgtaactcctgttcctcataacggatgccgtccaccaaaacgtcgccgcgtgtaa

SEQ ID NO: 542 - protein, 131 aa, Bacillus subtilis
MAAARKSNTRKRRVKKNIESGIAHIRSTFNNTIVTITDTHGNAISWSSAGALGFRGSRKSTPFAAQMAAETAAKGSIEHGLKTLEVTVKGPGSGREAAIRALQAAGLEVTAIRDVTPVPHNGCRPPKRRRV

SEQ ID NO: 543 - DNA, 390 bp, Bartonella henselae
  CDS (1)..(390): transl_table=11
atggccaaggaagccacacgtgttcgtcgccgcgagcgcaaaaatatttcatccggtgttgtgcatatcaattcaacatttaataatacaatgattaccattactgatgctcagggaaatgcaattgcctggtcttccgctggtgctcaggggtttaaaggttcacgtaaatctacgccttttgcagcgcaggtggctgcagaagattgtgctagaaaggcgcaggaacatggtatgcgttcattagaagttgaggtttgcggtcctggatcaggtcgtgaatcagctctgcgtgcattacaatctgtcggttttattattacttcaattcgtgatgtaacgccgattcctcataatggatgtcgtccacggaaaaggcggcgtgtttaa

SEQ ID NO: 544 - protein, 129 aa, Bartonella henselae
MAKEATRVRRRERKNISSGVVHINSTFNNTMITITDAQGNAIAWSSAGAQGFKGSRKSTPFAAQVAAEDCARKAQEHGMRSLEVEVCGPGSGRESALRALQSVGFIITSIRDVTPIPHNGCRPRKRRRV

SEQ ID NO: 545 - DNA, 390 bp, Bartonella quintana
  CDS (1)..(390): transl_table=11
atggccaagcaagccacacgtgtgcgtcgtcgcgagcgcaaaaatattttatccggtgttgtgcatatcaattcaacatttaacaatacaatggttactattactgatgctcagggaaatgcgattgcgtggtcgtctgctggtgctcagggttttaaaggatcacgtaaatctaccccttttgcagctcaggttgctgcggaagattgtgctagaaaagcgcaggaacatggtatgcgttcattagaagttgaggtttgtggtcctggggcaggtcgtgaatctgctctacgtgcgttacagtctgctggttttgttattacttctattcgtgatgtaacgccaattcctcataatggatgtcgtccacggaaaaggcgacgtgtttaa

SEQ ID NO: 546 - protein, 129 aa, Bartonella quintana
MAKQATRVRRRERKNILSGVVHINSTFNNTMVTITDAQGNAIAWSSAGAQGFKGSRKSTPFAAQVAAEDCARKAQEHGMRSLEVEVCGPGAGRESALRALQSAGFVITSIRDVTPIPHNGCRPRKRRRV

SEQ ID NO: 547 - DNA, 393 bp, Bdellovibrio bacteriovorus
  CDS (1)..(393): transl_table=11
atgaacactgataaaaaagctgttacaaagaaaaaagtaaaaagaaacgttcctcaagggaactgctatatccaagctgggttcggtaacgttatcgtaacgatgactgatccaaccggtgctaccgtgtcctggtcctctgcaggtcacctcggtttcaaaggaagccgtaaaggtactccatttgcagctcaagtcgcggcagaagacgctgcaaagaaagctatggaagcaggcatgaaatctgtggacgtttacttgaaaggaccaggcgctggtcgtgagcctgcaattcgtgcattggctgctactggaatgagaatcttgtctcttaaagacgtgactccagttcctcacaacggttgccgtccacctaagcgtagaagaatctaa

SEQ ID NO: 548 - protein, 130 aa, Bdellovibrio bacteriovorus
MNTDKKAVTKKKVKRNVPQGNCYIQAGFGNVIVTMTDPTGATVSWSSAGHLGFKGSRKGTPFAAQVAAEDAAKKAMEAGMKSVDVYLKGPGAGREPAIRALAATGMRILSLKDVTPVPHNGCRPPKRRRI

SEQ ID NO: 549 - DNA, 399 bp, Bifidobacterium longum
  CDS (1)..(399): transl_table=11
atggcagcgcctaagcaagccgctcgtaagccccgtcgtcgcgaccgcaagtcggtcccggtcggccaggctcacatcaagtccactttcaacaacacgatcatttcgatcaccgatccgtccggcgccgtggtgtcctgggcgtccggtggcgatgtcggcttcaagggctcccgtaagtccacgccgtacgccgctggtatggctgccgagtccgccgcccgcaaggcgatggaacacggcgtcaagaaggtcgacgtgttcgtcaagggcccgggttccggtcgtgaaaccgccatccgttccctgcagtctgcgggcctcgaggttggttccatcaccgacgtcaccccgcaagcccacaacggcgttcgtcctccgaagcgtcgtcgcgtctga

SEQ ID NO: 550 - protein, 132 aa, Bifidobacterium longum
MAAPKQAARKPRRRDRKSVPVGQAHIKSTFNNTIISITDPSGAVVSWASGGDVGFKGSRKSTPYAAGMAAESAARKAMEHGVKKVDVFVKGPGSGRETAIRSLQSAGLEVGSITDVTPQAHNGVRPPKRRRV

SEQ ID NO: 551 - DNA, 393 bp, Blochmannia floridanus
  CDS (1)..(393): transl_table=11
atgattaaatcatcttctcttagattacgtaagcggattaaaaaacaagttactgatggtattgctcatatacatgcttcttttaataatactattgtgactattagcgatcgtcaaggcaatactttgggatgggctacatctggtggatcaggttttcgaggttctagaaaatctactccatttgcggctcaaatagcagcggagcgttgtgcggaaatagtacaagaatatggagtgaaaaatttagaagttatggttaagggaccagggccaggtagggaatctgcggttcgagctttaaatgcagcaggttttcatattatcagtataatagatgtcactccaattcctcataatggttgccgtcctgctaaaaaacgtcgtgtctaa

SEQ ID NO: 552 - protein, 130 aa, Blochmannia floridanus
MIKSSSLRLRKRIKKQVTDGIAHIHASFNNTIVTISDRQGNTLGWATSGGSGFRGSRKSTPFAAQIAAERCAEIVQEYGVKNLEVMVKGPGPGRESAVRALNAAGFHIISIIDVTPIPHNGCRPAKKRRV

SEQ ID NO: 553 - DNA, 405 bp, Borrelia burgdorferi
  CDS (1)..(405): transl_table=11
ttggagggcaagttgagcgcaaaattatcaactaatagtaaaaaaaaaattaaaagaaatatcggagaaggaaacgtttatatacaagctacttttaataataccatagttactgtatctgatataaagggaaatgctttagcttgggcaagtgctggtggtatgggttttaaaggtgctaaaaagtcgaccccatatgctgctcaaataacagcagagtctgctttaaataaagtgagagattttggaattaattatgttcatgtgtatataaaagggccaggcattggcagagaatctgcaataagagctattggttcgattggtatgactgtaaaatcaatttcagatattactcccattcctcataatggatgcagaccgaaaaaaaccagacgagtttag

SEQ ID NO: 554 - protein, 134 aa, Borrelia burgdorferi
MEGKLSAKLSTNSKKKIKRNIGEGNVYIQATFNNTIVTVSDIKGNALAWASAGGMGFKGAKKSTPYAAQITAESALNKVRDFGINYVHVYIKGPGIGRESAIRAIGSIGMTVKSISDITPIPHNGCRPKKTRRV

SEQ ID NO: 555 - DNA, 390 bp, Bradyrhizobium japonicum
  CDS (1)..(390): transl_table=11
atgggcaaggaagccacccgcgttcgccgtcgtgaacgcaagaacatcgcctccggcgttgcgcacgtgaactcgtcgttcaacaacacgaccatcaccatcaccgacgcgcagggcaacacgattgcctggtcctccgccggcacgatgggcttcaagggctcgcgcaagtcgaccccgtacgcggcgcaggttgccgccgaggacgtgtcgaagaaggcgcaggagcacggcatgcgcacgctggaagtcgaagtcgccggtcccggttcgggccgcgaatcggcgctgcgcgcgctccaggccgccggcttcaccgtcacctcgatccgcgacgtgaccacgatcccgcacaacggttgccgtccccgcaagcgtcggcgcgtttga

SEQ ID NO: 556 - protein, 129 aa, Bradyrhizobium japonicum
MGKEATRVRRRERKNIASGVAHVNSSFNNTTITITDAQGNTIAWSSAGTMGFKGSRKSTPYAAQVAAEDVSKKAQEHGMRTLEVEVAGPGSGRESALRALQAAGFTVTSIRDVTTIPHNGCRPRKRRRV

SEQ ID NO: 557 - DNA, 390 bp, Bradyrhizobium sp
  CDS (1)..(390): transl_table=11
atggccaaggaagccgcacgtgtccgccgtcgtgagcgcaagaacatcgcctccggcgtcgcccatgtgaattcgtcgttcaacaacaccacgatcaccatcaccgacgcgcagggcaacaccattgcctggtcgtccgctgggacgatgggcttcaagggatcgcgcaagtcgaccccgtatgccgcccaggtcgcggcggaggatgtgtccaagaaggcccaggagcacggcatgcgcaccctcgaggtcgaggtggccggtccgggctccggacgtgagtcggccctgcgcgcgctgcaggccgcgggcttcaccgtcacctcgatccgcgatgtgacgacgatcccgcacaatggttgccgtccgcgcaagcgtcgtcgcgtctga

SEQ ID NO: 558 - protein, 129 aa, Bradyrhizobium sp
MAKEAARVRRRERKNIASGVAHVNSSFNNTTITITDAQGNTIAWSSAGTMGFKGSRKSTPYAAQVAAEDVSKKAQEHGMRTLEVEVAGPGSGRESALRALQAAGFTVTSIRDVTTIPHNGCRPRKRRRV

SEQ ID NO: 559 - DNA, 396 bp, Buchnera aphidicola subsp
  CDS (1)..(396): transl_table=11
atggtaaagaattcaacgtctattcgaacacgaaaacgtgtaaaaaaacaaattttagatggaattgctcatattcatgcatcttttaataatactattgttacaattacagatagacaagggaatgctttaggatgggctacttctggcggttctggttttagaggttctcgaaaatctactccttttgctgcacaagttgctgctgaacgttgtgcagaaatagtaaaagattatggtataaaaaatttagaagtaatggttaaaggccctggtccaggtagagagtctactattcgagctttaaatgctgctggatttcgtattacaaatattactgatgtgacaccaattcctcataatggttgccgtcctcctaaaaaacgtcgcgtgtga

SEQ ID NO: 560 - protein, 131 aa, Buchnera aphidicola subsp
MVKNSTSIRTRKRVKKQILDGIAHIHASFNNTIVTITDRQGNALGWATSGGSGFRGSRKSTPFAAQVAAERCAEIVKDYGIKNLEVMVKGPGPGRESTIRALNAAGFRITNITDVTPIPHNGCRPPKKRRV

SEQ ID NO: 561 - DNA, 393 bp, Buchnera aphidicola subsp
  CDS (1)..(393): transl_table=11
atggtaaaaaattcatctgttcgcacacgtaaacgtgtaaaaaaacaaattacagacggtatagctcatattcatgcttcatttaacaatactattgttactattactgacagacaaggaaatgctttaggttgggcaacttctggaggatcaggttttagaggttctcggaaatcgactccctttgccgcacagattgctgctgaacgatgtgctgaaatagttaaagattatggtataaaaaatttagaagttatggttaagggacctggacctggtagagaatctactattcgagctttgaatgctgctggctttcgtattacaaatattactgatgtaacacctattcctcataatggttgccgtcctcctaaaaaacgtcgtgtttaa

SEQ ID NO: 562 - protein, 130 aa, Buchnera aphidicola subsp
MVKNSSVRTRKRVKKQITDGIAHIHASFNNTIVTITDRQGNALGWATSGGSGFRGSRKSTPFAAQIAAERCAEIVKDYGIKNLEVMVKGPGPGRESTIRALNAAGFRITNITDVTPIPHNGCRPPKKRRV

SEQ ID NO: 563 - DNA, 390 bp, Buchnera aphidicola subsp
  CDS (1)..(390): transl_table=11
atggtaaaagaactaattcgtgtaaaaaaacgtgttaaaaaacaaattttagatggtattgcacatattcatgcatcatttaataatactataatttctattagtgataaaaaaggaaatgttttaggatgggctacttcaggaggatctggatttcgaggatctagaaaatctactccatttgctgctcaagttgctgttgagcgttgtgcagatattgtgaaaagttatggtataaaaaatttagaagtaatggttaaaggtccaggacctggtcgagaatctagtattagaactttaaacactattggatttcgtatcattaatattactgatgtgactcctattcctcataatggttgtcgttctcctaaaaagcgtagggtttag

SEQ ID NO: 564 - protein, 129 aa, Buchnera aphidicola subsp
MVKELIRVKKRVKKQILDGIAHIHASFNNTIISISDKKGNVLGWATSGGSGFRGSRKSTPFAAQVAVERCADIVKSYGIKNLEVMVKGPGPGRESSIRTLNTIGFRIINITDVTPIPHNGCRSPKKRRV

SEQ ID NO: 565 - DNA, 405 bp, Burkholderia xenovorans
  CDS (1)..(405): transl_table=11
atggctaaggcttcgaacaactccgcggcgcaacgcgttcgcaagaaggtcaagaagaacgtcgccgagggcgtggttcacgttcacgcgtcgttcaataacaccatcatcacgatcactgatcgtcaaggcaatgcacttgcttgggcaacgtcgggtggtcagggcttcaagggttcgcgtaaatcgaccccgtttgcagctcaggtggcagccgaatcggcaggccgcgtggcgatggaatacggcgtgaagaacctcgaagtgcggatcaagggccccggtccaggccgtgagtcggcggtgcgcgcgttgcatggtcttggtatcaagatcaccgcgatctccgacgtgactccggttccgcacaacggctgccgtccgccgaagcgtcgtcgtatctaa

SEQ ID NO: 566 - protein, 134 aa, Burkholderia xenovorans
MAKASNNSAAQRVRKKVKKNVAEGVVHVHASFNNTIITITDRQGNALAWATSGGQGFKGSRKSTPFAAQVAAESAGRVAMEYGVKNLEVRIKGPGPGRESAVRALHGLGIKITAISDVTPVPHNGCRPPKRRRI

SEQ ID NO: 567 - DNA, 393 bp, Campylobacter jejuni
  CDS (1)..(393): transl_table=11
atggcaaaaagaaaaatcgtaaagaaaaaagtagttaaaaaaaatatagcaaaaggtattgtttatatcagtgcgacttttaacaatactatggttacagtaactgatgaaatgggaaatgctatcgcttggagtagtgcaggtggtttaggatttaaaggttctaaaaaatcaactccttatgcagcacaacaagcagtagaagacgctttaaataaagcaaaagaacacggaattaaagaagtaggcattaaagtacaaggaccaggaagcggtagagaaactgctgttaagagtgtaggtgctatggaaggaatcaaagtaactttcttaaaagatatcactccattagctcacaatggttgcagaccgcctaagcgtcgtcgtgtctaa

SEQ ID NO: 568 - protein, 130 aa, Campylobacter jejuni
MAKRKIVKKKVVKKNIAKGIVYISATFNNTMVTVTDEMGNAIAWSSAGGLGFKGSKKSTPYAAQQAVEDALNKAKEHGIKEVGIKVQGPGSGRETAVKSVGAMEGIKVTFLKDITPLAHNGCRPPKRRRV

SEQ ID NO: 569 - DNA, 390 bp, Carboxydothermus hydrogenoformans
  CDS (1)..(390): transl_table=11
atgatggctcgccggacaaaagccagaaaaaaggaaaaaaagcatgttgagcaaggagtagcccatatcaagtctacttttaacaatacaattgttaccataaccgatccccaggggaacaccctttcctgggcaagtgcgggaaccgttggctttgaaggaaccaggaaaggcactccctttgccgcacagttagctgcggaaaaagctgctaaagaagcgatggaatttggcgtaaagactgttgaggtttatgtgaaaggaccaggcgcaggtcgggaagcggcaatccgctcgttgcaagctgctggcctggaagttagccttattaaggacgtaaccccgattcctcataacgggtgtcgtccaccgaaacgtaggagagtatag

SEQ ID NO: 570 - protein, 129 aa, Carboxydothermus hydrogenoformans
MMARRTKARKKEKKHVEQGVAHIKSTFNNTIVTITDPQGNTLSWASAGTVGFEGTRKGTPFAAQLAAEKAAKEAMEFGVKTVEVYVKGPGAGREAAIRSLQAAGLEVSLIKDVTPIPHNGCRPPKRRRV

SEQ ID NO: 571 - DNA, 390 bp, Caulobacter crescentus
  CDS (1)..(390): transl_table=11
atggccaaggaaccggctcgcgttaaacgtcgcgaacgcaagaacatcacctcgggcgtggcgcacgtgaacgcctcgttcaacaacaccatgatcaccatcaccgacgcccagggcaacacgatctcgtggtcctcggccggcatgatgggcttcaagggctcgcgcaagtcgaccccgtacgccgcgcagatggccgccgaagacgcgggcaagaaggctgccgagcacggcgtgaagacgctggaagtcaacgtttcgggtccgggttccggccgtgaatcggccctgcgcgctctgcaagccgcgggcatgaccatcacgaccatccgcgacgtcacgccgatcccgcacaacggctgccgtccgcccaagcgtcgtcgcgtctag

SEQ ID NO: 572 - protein, 129 aa, Caulobacter crescentus
MAKEPARVKRRERKNITSGVAHVNASFNNTMITITDAQGNTISWSSAGMMGFKGSRKSTPYAAQMAAEDAGKKAAEHGVKTLEVNVSGPGSGRESALRALQAAGMTITTIRDVTPIPHNGCRPPKRRRV

SEQ ID NO: 573 - DNA, 399 bp, Chlamydophila abortus
  CDS (1)..(399): transl_table=11
ttggttaaacatcaagcgcagaaaaaaggcgtaaaaagaaaacagttaaagaatattccttcaggcattgttcatgttaaggctaccttcaacaatacgattgtgtctataacagaccctgcagggaatactatctcttgggcttcagctggaaaagttggatattccggatctcgtaagtcgtctgcttttgctgcaacggtggccgcacaagacgctgcaaaaattgctatgaattctggccttaaggaagtcgaagtgtgtttaaaaggcaccggagctggtagagaatctgcagtccgcgctctcatagccgctggtttagttgtttctgtcatccgtgacgaaactcctgttcctcacaatggttgtcggccaagaaaaaggcgcagagtgtag

SEQ ID NO: 574 - protein, 132 aa, Chlamydophila abortus
MVKHQAQKKGVKRKQLKNIPSGIVHVKATFNNTIVSITDPAGNTISWASAGKVGYSGSRKSSAFAATVAAQDAAKIAMNSGLKEVEVCLKGTGAGRESAVRALIAAGLVVSVIRDETPVPHNGCRPRKRRRV

SEQ ID NO: 575 - DNA, 399 bp, Chlamydophila caviae
  CDS (1)..(399): transl_table=11
ttggttaaacatcaaacgcagaaaaaaggcgtaaaaagaaaacagttaaaaaatattccttcaggcgttgttcatgttaaggctaccttcaacaatacgattgtatccataacagatcctgcaggaaatactatctcttgggcttcagctggaaaagttggatattctggatctcgtaagtcatctgcttttgctgcaacgatggctgcacaagacgctgcaaaaaatgctatgaattctggccttaaagaagtcgaagtatgtttaaaaggtactggagctggcagagaatctgcggttcgcgctctcatagcctctggtttagttgtttctgtcatccgtgacgaaactcctgttcctcataatggttgtcgaccaagaaaaaggcgcagagtgtag

SEQ ID NO: 576 - protein, 132 aa, Chlamydophila caviae
MVKHQTQKKGVKRKQLKNIPSGVVHVKATFNNTIVSITDPAGNTISWASAGKVGYSGSRKSSAFAATMAAQDAAKNAMNSGLKEVEVCLKGTGAGRESAVRALIASGLVVSVIRDETPVPHNGCRPRKRRRV

SEQ ID NO: 577 - DNA, 399 bp, Chlamydia muridarum
  CDS (1)..(399): transl_table=11
ttggttaaaaatcagacgcaaaaaaaaggcgtaaaaagaaaacaagtaaaaaacattccttcgggcgttgtccatgttaaggctacttttaataatacaattgtaaccataacagaccctgctggtaatgtgatttcgtgggcttctgctgggaaagttggttattcaggctctcgtaaatcttcagcatttgcagcgacggttgctgcccaagatgctgctaagactgctatgagttctgggttaaaagaggttgaagtaagtttgaaaggaactggtgctgggcgggaatctgccgtacgagcgcttatttcttctggacttattgtttctgttatccgagatgaaactcccgttcctcataacgggtgtcgaccaagaaaacgacgaagagtgtag

SEQ ID NO: 578 - protein, 132 aa, Chlamydia muridarum
MVKNQTQKKGVKRKQVKNIPSGVVHVKATFNNTIVTITDPAGNVISWASAGKVGYSGSRKSSAFAATVAAQDAAKTAMSSGLKEVEVSLKGTGAGRESAVRALISSGLIVSVIRDETPVPHNGCRPRKRRRV

SEQ ID NO: 579 - DNA, 402 bp, Chlamydia pneumoniae
  CDS (1)..(402): transl_table=11
ttggttaaaaatcaagcgcaggcaaaaaagagcgtaaaaagaaaacaactaaaaaatattccttcaggtgttgtgcatgttaaagcaacctttaacaatacaatagtatctataacagatcctgctggtaatgtgatttcttgggcatcagcaggtaaagtaggatattctggttcaagaaaatcttcagcctttgctgccactgtagcagctcaagacgctgctaaaactgccatgaactctggtttaaaggaagtagaggtttgtttgaagggtactggagctgggagagagtctgctgttcgtgctttgatatctgctggtttggtagtttctgtaatccgtgatgaaactcctgttcctcataatggttgccggccaagaaaaaggcgcagagtgtag

SEQ ID NO: 580 - protein, 133 aa, Chlamydia pneumoniae
MVKNQAQAKKSVKRKQLKNIPSGVVHVKATFNNTIVSITDPAGNVISWASAGKVGYSGSRKSSAFAATVAAQDAAKTAMNSGLKEVEVCLKGTGAGRESAVRALISAGLVVSVIRDETPVPHNGCRPRKRRRV

SEQ ID NO: 581 - DNA, 384 bp, Chlorobium tepidum
  CDS (1)..(384): transl_table=11
atggcaacagcgagcaggaaaaaaaagaaagtcaaggttaccccggaaggtaccgtccatatcaaggcttcgtttaacaacgtcatggtgaccattaccgatacgctcggcaatacggtttcatggtcgagcgctggcaagaacggcttcaagggctccaagaaaaataccccttatgcatcgcaggtgacttccgaggcggcagccaaagaggcctacgatcttggtatgcgttatgtcgacgtgcttatcaaaggacctggttccggtcgtgatgctgccatcagggcgcttcagggagttggtctggaggtgcgttccattcgcgatattacgccgcttccgcataacggttgcaggcctcccaagcgcagaagggtctga

SEQ ID NO: 582 - protein, 127 aa, Chlorobium tepidum
MATASRKKKKVKVTPEGTVHIKASFNNVMVTITDTLGNTVSWSSAGKNGFKGSKKNTPYASQVTSEAAAKEAYDLGMRYVDVLIKGPGSGRDAAIRALQGVGLEVRSIRDITPLPHNGCRPPKRRRV

SEQ ID NO: 583 - DNA, 396 bp, Chromobacterium violaceum
  CDS (1)..(396): transl_table=11
atggctaaagcaaacacagctgtccgtgtacgtaaaaaagtgcgcaagtctgttagcgaaggcatcgtgcacgtgcacgcttcgttcaacaacaccatcatcactatcaccgaccgtcaaggcaatgcactgtcttgggctacctctggcggcgctggttttaagggctcgcgcaagagtacaccctttgccgctcaggtagctgcagagcacgctggtaaagttgcccaagaatatggtgtgaagaacctcgaagttcgtatcaaaggcccgggcccgggtcgtgaatccgctgttcgcgcactcaactcgctgggtttcaagatcaccagcatctccgacgtgacgccggtaccgcacaacggttgccgtccgcccaaaaaacgtcgtatctaa

SEQ ID NO: 584 - protein, 131 aa, Chromobacterium violaceum
MAKANTAVRVRKKVRKSVSEGIVHVHASFNNTIITITDRQGNALSWATSGGAGFKGSRKSTPFAAQVAAEHAGKVAQEYGVKNLEVRIKGPGPGRESAVRALNSLGFKITSISDVTPVPHNGCRPPKKRRI

SEQ ID NO: 585 - DNA, 396 bp, Clostridium acetobutylicum
  CDS (1)..(396): transl_table=11
atggctgtacagaaaaataagaaaactagaagaagaaaagagaaaaaaaatatagagcacggttgtgcacatattaaatcaacttttaacaattctatagttactataactgatgttaatggaaatgctttatcatggtcaagtgcaggtggattaggatttaaaggatcaagaaaaagcactccttttgctgctcaaatggctgctgaaacagctgctaaaacagcaatggaacacggacttaagagtgttgatgtgtttgtaaaaggaccaggatcaggaagagaagctgcaataagatcattacaggctgcaggattagaggttacattaataaaagatgttactccaataccacacaatggctgcagaccaccaaaaagaagaagagtttaa

SEQ ID NO: 586 - protein, 131 aa, Clostridium acetobutylicum
MAVQKNKKTRRRKEKKNIEHGCAHIKSTFNNSIVTITDVNGNALSWSSAGGLGFKGSRKSTPFAAQMAAETAAKTAMEHGLKSVDVFVKGPGSGREAAIRSLQAAGLEVTLIKDVTPIPHNGCRPPKRRRV

SEQ ID NO: 587 - DNA, 399 bp, Clostridium difficile
  CDS (1)..(399): transl_table=11
atggctaaaccaaaaaagaaagttacacgtattagaagaagagaacgtaaaaatatagaacgtggtcatgctcatatacaatcaactttcaataatacaataataactttaactgacgttcacggaaatgctatatcttgggcaagttctggacaattaggattcaaaggatcaagaaaatcaactccatttgcatctcaaatggctgctgaaacagctgcaaaagctgcgatggaacacggactaaaaagtgttgaggtattcgtaaaggggccaggttcaggaagagaagctgcaataagagctttacaagcaactggactagaagtaactatgataaaagacgttactccaatcccacataacggatgcagaccaccaaagagaagaagagtgtaa

SEQ ID NO: 588 - protein, 132 aa, Clostridium difficile
MAKPKKKVTRIRRRERKNIERGHAHIQSTFNNTIITLTDVHGNAISWASSGQLGFKGSRKSTPFASQMAAETAAKAAMEHGLKSVEVFVKGPGSGREAAIRALQATGLEVTMIKDVTPIPHNGCRPPKRRRV

SEQ ID NO: 589 - DNA, 396 bp, Clostridium perfringens
  CDS (1)..(396): transl_table=11
atggcagctcaaaaagttaaaaaaactagaagaagaaaagaaagaaaaaatgttgagcatggtgcagcacacatccaatcaacattcaataactcaatagttactttaactgatgcaaaaggaaatgcattagcatgggcaagtgctggtggccttggattcaaaggttcaagaaagagcacaccatttgcagctcaaatggcagctgaaacagcagctaaagcagctatggaacacggattaaaaagcgttgaggtttacgtaaaaggaccaggtgctggaagagaagcagctataagaagcttacaagcagctggattagaagttactttaataaaagatgtaactccaatcccacacaatggatgtagaccaccaaaaagaagaagagtttag

SEQ ID NO: 590 - protein, 131 aa, Clostridium perfringens
MAAQKVKKTRRRKERKNVEHGAAHIQSTFNNSIVTLTDAKGNALAWASAGGLGFKGSRKSTPFAAQMAAETAAKAAMEHGLKSVEVYVKGPGAGREAAIRSLQAAGLEVTLIKDVTPIPHNGCRPPKRRRV

SEQ ID NO: 591 - DNA, 399 bp, Clostridium tetani
  CDS (1)..(399): transl_table=11
atggcagctgtatcaaaaactaaaagaacaagaagaagaaaagaaagaaagaatattgaacgcggttgtgcacatataaaatcaacatttaacaattccattgttacattaactgatactgctgggaatgctctttcatgggccagtgcaggtggattaggatttagaggttcaagaaagagtactccattcgcagctcaaatggcagcagaaactgcagcaaaagcagctatggaacatggcttaaagagtgtagaggtttatgtaaagggacctggatcaggtagagaagcagctataagatctctacaggcagcagggctagaagtaactttaataaaagacgttactccaatccctcataatggatgtagaccaccaaaaagaagaagagtttaa

SEQ ID NO: 592 - protein, 132 aa, Clostridium tetani
MAAVSKTKRTRRRKERKNIERGCAHIKSTFNNSIVTLTDTAGNALSWASAGGLGFRGSRKSTPFAAQMAAETAAKAAMEHGLKSVEVYVKGPGSGREAAIRSLQAAGLEVTLIKDVTPIPHNGCRPPKRRRV

SEQ ID NO: 593 - DNA, 405 bp, Clostridium thermocellum
  CDS (1)..(405): transl_table=11
atggctactaaaatggctggtgtcaaaagggctggtagaaaaagaaaagagcgcaaaaatattgaacgtggagcggcacacatacgttcaacatttaataatacaatagttacaataactgacgtagaagggaacaccatttcctggtcaagtgccggaactttgggattcagaggttcgagaaagagtacaccttttgcggctcagatggcagccgaagctgcagctaaagcggcaatggaacatggacttaagactgttgaagtttatgttaaaggtccgggttcaggaagagaagcagcaataagagcactgcaggctgcaggacttgaagtgagccttattaaagatgtgactccaattcctcacaacggctgcagaccgccaaagagaagaagagtataa

SEQ ID NO: 594 - protein, 134 aa, Clostridium thermocellum
MATKMAGVKRAGRKRKERKNIERGAAHIRSTFNNTIVTITDVEGNTISWSSAGTLGFRGSRKSTPFAAQMAAEAAAKAAMEHGLKTVEVYVKGPGSGREAAIRALQAAGLEVSLIKDVTPIPHNGCRPPKRRRV

SEQ ID NO: 595 - DNA, 390 bp, Colwellia psychrerythraea
  CDS (1)..(390): transl_table=11
atggctaaaacaccagttcgtacgcgtaaacgcgtaaaaaaacaagttgctgatggcatggctcatatccatgcttctttcaacaacacaatcgtgactcttacagaccgtcaaggtaatgcgttatcttgggcgactgccggtggttcaggtttccgtggttcacgtaaatcaactccgttcgctgcgcaagtagctgcagaccgcgcaggcgctgttgcaaaagagtttggcttgaagaatattgaagtgttcgtaaaaggtccaggtccaggtcgtgaatctgctatccgtgccttaaatgctgctggttttaaaatcaccaacattactgacgtaacacctattcctcataatggttgtcgtcctccgaagaaacgtcgcgtttaa

SEQ ID NO: 596 - protein, 129 aa, Colwellia psychrerythraea
MAKTPVRTRKRVKKQVADGMAHIHASFNNTIVTLTDRQGNALSWATAGGSGFRGSRKSTPFAAQVAADRAGAVAKEFGLKNIEVFVKGPGPGRESAIRALNAAGFKITNITDVTPIPHNGCRPPKKRRV

SEQ ID NO: 597 - DNA, 405 bp, Corynebacterium diphtheriae
  CDS (1)..(405): transl_table=11
atgcctccaaagactcgcagcactgcacgtcgctctggtcgtcgtgtagttaagaagaacgtggctcagggccacgcttacatcaagtccaccttcaacaacaccatcgtttccatcacggatccttccggtgctgttatcgcatgggcatcctccggccacgttggcttcaagggttcccgtaagtccaccccattcgctgcacagcttgctgctgagaacgctgctcgcaaggcaatggatcacggcatgaagaaggtcgacgtattcgttaagggcccaggctctggacgtgagaccgctattcgttccctccaggctgctggcctcgaggtcacctcgatctccgatgtcactcctcagccattcaacggctgccgcccaccaaagcgtcgtcgcgtttaa

SEQ ID NO: 598 - protein, 134 aa, Corynebacterium diphtheriae
MPPKTRSTARRSGRRVVKKNVAQGHAYIKSTFNNTIVSITDPSGAVIAWASSGHVGFKGSRKSTPFAAQLAAENAARKAMDHGMKKVDVFVKGPGSGRETAIRSLQAAGLEVTSISDVTPQPFNGCRPPKRRRV

SEQ ID NO: 599 - DNA, 405 bp, Corynebacterium efficiens
  CDS (1)..(405): transl_table=11
atgcctcctaaagcacgctccggcgcgcgccgtaccggccgtcgcgtcgtaaagaagaatgtggcccagggccacgcatacatcaagtccacctttaacaacaccatcgtgtcgatcactgacccgaacggcgccgttatctcctgggcttcctctggtcacgtcggattcaagggctctcgtaagtccactccgtttgctgctcagatggccgctgaaaacgctgcccgcaaggcaatggatcacggcatgaagaaggttgacgttttcgtcaagggcccgggctcgggccgagagaccgctatccgttccctccaggccgccggcctcgaggtcagctcgatctccgacgtgaccccacagccgcacaacggctgccgtccgccgaagcgtcgtcgcgtttaa

SEQ ID NO: 600 - protein, 134 aa, Corynebacterium efficiens
MPPKARSGARRTGRRVVKKNVAQGHAYIKSTFNNTIVSITDPNGAVISWASSGHVGFKGSRKSTPFAAQMAAENAARKAMDHGMKKVDVFVKGPGSGRETAIRSLQAAGLEVSSISDVTPQPHNGCRPPKRRRV

SEQ ID NO: 601 - DNA, 372 bp, Coxiella burnetii
  CDS (1)..(372): transl_table=11
atggcaaagaaacgttatcgcaaagtgactgaagggattgctcacattaaggcaacttttaataatacgatgatcagtgtttctgatcctcaaggaaatgtcttatgttttcgttccgcgggcggatcgggtttcaaaggttcgcgtaaagggaccccttacggagcacaaatggcttccgaagaagtgggcaggttagcacgggataatttcgacatgcggcgaattgccgtgcgagtaaagggcccaggcgctggtcgggattctgccattcgaggattgcgttcggctggtctggaagttatccatttagaagatcgtacaccgttacctcataacggctgtcgaccgcgcaaaaaacgacgagtttag

SEQ ID NO: 602 - protein, 123 aa, Coxiella burnetii
MAKKRYRKVTEGIAHIKATFNNTMISVSDPQGNVLCFRSAGGSGFKGSRKGTPYGAQMASEEVGRLARDNFDMRRIAVRVKGPGAGRDSAIRGLRSAGLEVIHLEDRTPLPHNGCRPRKKRRV

SEQ ID NO: 603 - DNA, 408 bp, Cytophaga hutchinsonii
  CDS (1)..(408): transl_table=11
atggctcaacaatcaactgccgcgaaaagaaaagataaagctaaaaaaagaatcgtagttatcgaacctacaggtcaggttcatatcagagcttcttttaacaacattatcatttctgttaccaatagtacaggtcaagtaatatcttgggcttctgctggtaaaatgggattccgcggatctaaaaagaatactccttacgctgctcaggttgcagcgcaaaactgtgctcaggttgcctttgaaggcggaatgagaaagtgtgaagtttttgtaaaaggaccaggctcaggtagagagtctgcaattcgcaccatccaaaatgcaggtatcgaagtgttaacgattaaagacgttacgcctatgccacataacggatgcagacctcctaaaaagagaagagtctaa

SEQ ID NO: 604 - protein, 135 aa, Cytophaga hutchinsonii
MAQQSTAAKRKDKAKKRIVVIEPTGQVHIRASFNNIIISVTNSTGQVISWASAGKMGFRGSKKNTPYAAQVAAQNCAQVAFEGGMRKCEVFVKGPGSGRESAIRTIQNAGIEVLTIKDVTPMPHNGCRPPKKRRV

SEQ ID NO: 605 - DNA, 390 bp, Dechloromonas aromatica
  CDS (1)..(390): transl_table=11
atggcaaagactgctacgaaagttcgcaaaaaggtcaagaagaacgttgctgagggcattgcccacatccacgcatcgttcaacaataccatcatcaccattaccgaccgtcagggcaacgctctgtcgtgggctacctccggtggtgccggcttccgcggttcgcgtaagtccaccccgttcgctgcccaggttgccgccgaagccgccggcaaggctgctcaggaatgtggcgtcaagaatgtcgaagtccgtatcaagggccctggtcctggtcgtgaatcctctgtccgtgcgctcaatgcgctgggcatgaagatcacttccatttcggacgtgacgccggtaccgcacaacggttgccgtccgcctaaaaagcgccgcatctaa

SEQ ID NO: 606 - protein, 129 aa, Dechloromonas aromatica
MAKTATKVRKKVKKNVAEGIAHIHASFNNTIITITDRQGNALSWATSGGAGFRGSRKSTPFAAQVAAEAAGKAAQECGVKNVEVRIKGPGPGRESSVRALNALGMKITSISDVTPVPHNGCRPPKKRRI

SEQ ID NO: 607 - DNA, 393 bp, Dehalococcoides ethenogenes
  CDS (1)..(393): transl_table=11
atggcagttaaaaaacgtgccggtgccaagaaaaaagagaagaaagttatacctgtaggtaaagccttcgtacaggctacctttaataatactatcgtaactctgactgacctgcagggcaatgtaattgcctgggccagctgcggtactgccggtttcaagggctcacgcaaaggtactccctatgccgcccagatggctgctcaggctgccgcccgcaaggctgctgaaagcggcctcaggcaggtggaggtattggtaaaggggccgggcagtggccgtgaagctgctatccgctctcttcaggcgtcaggtatcaatgtgaccgcaatcagggacgtaactcccattccgcataatggttgccgtcctcccaagagaaggagggtatag

SEQ ID NO: 608 - protein, 130 aa, Dehalococcoides ethenogenes
MAVKKRAGAKKKEKKVIPVGKAFVQATFNNTIVTLTDLQGNVIAWASCGTAGFKGSRKGTPYAAQMAAQAAARKAAESGLRQVEVLVKGPGSGREAAIRSLQASGINVTAIRDVTPIPHNGCRPPKRRRV

SEQ ID NO: 609 - DNA, 393 bp, Dehalococcoides sp
  CDS (1)..(393): transl_table=11
atggcagttaaaaagcgtgccggtgccaagaaaaaagagaagaaagtaatacctgtaggtaaggcctatgtacaggctacctttaataatactatcgtaactctgactgaccttcagggcaatgttattgcctgggccagctgtggtactgccggtttcaagggctcgcgcaagggtactccctatgccgcccagatggccgcccagaccgctgcccgcaaggctgctgaaagcggtctgcgtcaggtagaggtactggtaaagggaccgggcagcggccgtgaagctgctatccgttctcttcaggcttcaggtataaatgtgaccgcaataagggacgtcacacccattcctcataatggttgccgtcctcccaagagaaggagggtatag

SEQ ID NO: 610 - protein, 130 aa, Dehalococcoides sp
MAVKKRAGAKKKEKKVIPVGKAYVQATFNNTIVTLTDLQGNVIAWASCGTAGFKGSRKGTPYAAQMAAQTAARKAAESGLRQVEVLVKGPGSGREAAIRSLQASGINVTAIRDVTPIPHNGCRPPKRRRV

SEQ ID NO: 611 - DNA, 396 bp, Deinococcus radiodurans
  CDS (1)..(396): transl_table=11
atggcgaaacccaccaaaggcaaggctccgcgccgctcccggcgcaacatcagcgctggtcgcgcctacgtgcacgccagctacaacaacactatcgtcaccatcaccgacctcgacggcaactcggtggcgtggtcttcgggcggcaccatcggctacaagggcagcaagaagggcaccccctacgctgctcagctcgccgccgccgacgccgtgaagaaggcccagacctccttcggcatggccgccgtggacgtgatcgtgcgtgggagcggctcgggccgtgaacaggcgatccgcgccatccaggcttcgggcatcgaagtccgcagcatcatggacgacagccccgtgcctcacaacggctgccgccccaagaagaagttccgcgcctaa

SEQ ID NO: 612 - protein, 131 aa, Deinococcus radiodurans
MAKPTKGKAPRRSRRNISAGRAYVHASYNNTIVTITDLDGNSVAWSSGGTIGYKGSKKGTPYAAQLAAADAVKKAQTSFGMAAVDVIVRGSGSGREQAIRAIQASGIEVRSIMDDSPVPHNGCRPKKKFRA

SEQ ID NO: 613 - DNA, 390 bp, Desulfovibrio desulfuricans
  CDS (1)..(390): transl_table=11
atggcaagacctaagcgcgtgggcaagaagaaagagaaaaagtccatccccgtcggggttgcccatattcaggcgacgttcaataacaccatcattaccttcactgataccaggggtaacacggtgagttgggccagtgcaggacagagcggcttcaagggatcgcgtaagagcactccctttgccgcacagatagctgccgatcaggcagcccgtcgtgcacaggaaaacggaatgcgcacagtgggtatctttgttaagggccccggttccggacgtgagtccgctatgcgcgctatcaatgccgccggtttcaaggtggcattcatccgtgatatcacccccattccccacaacggctgccgtcctcccaaacggcgccgcgtttag

SEQ ID NO: 614 - protein, 129 aa, Desulfovibrio desulfuricans
MARPKRVGKKKEKKSIPVGVAHIQATFNNTIITFTDTRGNTVSWASAGQSGFKGSRKSTPFAAQIAADQAARRAQENGMRTVGIFVKGPGSGRESAMRAINAAGFKVAFIRDITPIPHNGCRPPKRRRV

SEQ ID NO: 615 - DNA, 390 bp, Desulfitobacterium hafniense
  CDS (1)..(390): transl_table=11
atggcgcgtaaagttgtacgcacaaaacgccgtgagcgtaaaaacatcgctactggcgttgcccatattaagtccacatttaacaatagtatggtcaccattaccgatccaaaaggtaatgtgatctcttggtccagtgcgggagcccttggcttcaaaggatctcgtaagagcactccttatgctgcccaaatggctgccgaaactgctgccaaagctgccatggaacatggcctgaaagaagttgaatgctttgtcaagggaccgggtgccggccgtgaggctgcgatccgtgctctgcaagctgccggcttggaagtcaatatgattaaagacgtgacgccgattccccataatggttgtcggcctccgaaacgtagaagggtataa

SEQ ID NO: 616 - protein, 129 aa, Desulfitobacterium hafniense
MARKVVRTKRRERKNIATGVAHIKSTFNNSMVTITDPKGNVISWSSAGALGFKGSRKSTPYAAQMAAETAAKAAMEHGLKEVECFVKGPGAGREAAIRALQAAGLEVNMIKDVTPIPHNGCRPPKRRRV

SEQ ID NO: 617 - DNA, 381 bp, Desulfotalea psychrophila
  CDS (1)..(381): transl_table=11
atggcagttgcaaaaaagagaaaggtaaaaaagaatatcccagaagggattgtttatatttattctaccttcaataataccattgttaccatctcagacaagcagggaaacgtggtttcttggtgtagcgctggtgttcttggctttaaaggttctcgtaagagtactccttttgcagcccagaatgcgcttgctgatgcagcgaagaaagctgctgattgtggtatgagaaaagtagaagttaaagtgaaaggaccaggacctggtcgtgaagctgctctacgtgctttggtaagtaccggttttgaggtaagtcgcatttatgatgttaccccagttcctcacaatggatgtaaaccacctaaacgtcgccgcgtataa

SEQ ID NO: 618 - protein, 126 aa, Desulfotalea psychrophila
MAVAKKRKVKKNIPEGIVYIYSTFNNTIVTISDKQGNVVSWCSAGVLGFKGSRKSTPFAAQNALADAAKKAADCGMRKVEVKVKGPGPGREAALRALVSTGFEVSRIYDVTPVPHNGCKPPKRRRV

SEQ ID NO: 619 - DNA, 390 bp, Desulfovibrio vulgaris
  CDS (1)..(390): transl_table=11
atggcaagacccaagcgtacggtcaaaaagagagagaagaagaacgtccctgtcgggctcgcccacatccaggcgacgttcaacaacaccatcgtgaccttcacggacaccaggggtaacaccatcagctgggccagcgccgggcagagcggtttcaaggggtctcgcaagagcactcctttcgccgcccagatggccgccgagcaggctgccaagaaggctcaggaaaacggcatgaggaccgtgggcatctacgtgaagggccccggttccggtcgtgaagccgccatgcgtgctatcaatgccgccggtttcaaggtcgcgttcattcgcgacatcacccccattccgcacaacggttgccgtccgcccaagcggcgccgcgtctaa

SEQ ID NO: 620 - protein, 129 aa, Desulfovibrio vulgaris
MARPKRTVKKREKKNVPVGLAHIQATFNNTIVTFTDTRGNTISWASAGQSGFKGSRKSTPFAAQMAAEQAAKKAQENGMRTVGIYVKGPGSGREAAMRAINAAGFKVAFIRDITPIPHNGCRPPKRRRV

SEQ ID NO: 621 - DNA, 390 bp, Escherichia coli O157
  CDS (1)..(390): transl_table=11
atggcaaaggcaccaattcgtgcacgtaaacgtgtaagaaaacaagtctctgacggcgtggctcatatccatgcttctttcaacaacaccatcgtgactatcactgatcgtcagggtaacgcgttgggttgggcaacagccggtggttccggtttccgtggttctcgcaaatccactccgtttgcagctcaggttgcagcagagcgttgcgctgacgccgtgaaagaatacggcatcaagaatctggaagttatggttaaaggtccgggtccaggccgcgaatctactattcgtgctctgaacgccgcaggtttccgcatcactaacattactgatgtgactccgatccctcataacggttgtcgtccgccgaaaaaacgccgcgtataa

SEQ ID NO: 622 - protein, 129 aa, Escherichia coli O157
MAKAPIRARKRVRKQVSDGVAHIHASFNNTIVTITDRQGNALGWATAGGSGFRGSRKSTPFAAQVAAERCADAVKEYGIKNLEVMVKGPGPGRESTIRALNAAGFRITNITDVTPIPHNGCRPPKKRRV

SEQ ID NO: 623 - DNA, 381 bp, Ehrlichia canis
  CDS (1)..(381): transl_table=11
atgagtgtagtgtataaaaagaaaaagagaaatgttgtagttggggtggtgtacattcatgctacctataataatattattgtaacagttacagatcagcaaggccattcgttaatatgtacttctgctggagcatgtagctttaaaggatctaaaaaagcgactccttatgcagcgcaggaaacagccagtcatgctgttaagacagttgttgagcaaaatgggatgaaaacagtatctattaaggtttctggtcctggtgcaggtagagaagcagctataagagctgttcaagcttgtaatttaaatgttacttctattaaagatactacaaagcttccgcataatggatgtaagcttccaggaagacgtagagtttaa

SEQ ID NO: 624 - protein, 126 aa, Ehrlichia canis
MSVVYKKKKRNVVVGVVYIHATYNNIIVTVTDQQGHSLICTSAGACSFKGSKKATPYAAQETASHAVKTVVEQNGMKTVSIKVSGPGAGREAAIRAVQACNLNVTSIKDTTKLPHNGCKLPGRRRV

SEQ ID NO: 625 - DNA, 381 bp, Ehrlichia chaffeensis
  CDS (1)..(381): transl_table=11
atgagtgtagtttataaaaagaaaaagagaaatgttgtagttggggtagtttatattcatgctacctataataatatcattgtaacagttacagaccagcaaggacattcgttaatatgtacttctgctggagcatgtggttttaaaggatctaagaaagctactccttatgcagcacaagagactgcaagtcatgctgttaaaacagttgttgaacaaaatgggatgaagacagtatctattaaagtttctggtcctggtgcaggtagggaatcagctataagagctgtgcaagcttgcaatttaaatgttacttctattaaagatactacaaagcttccacataatgggtgtaaacttccaggaagacgtagagtttaa

SEQ ID NO: 626 - protein, 126 aa, Ehrlichia chaffeensis
MSVVYKKKKRNVVVGVVYIHATYNNIIVTVTDQQGHSLICTSAGACGFKGSKKATPYAAQETASHAVKTVVEQNGMKTVSIKVSGPGAGRESAIRAVQACNLNVTSIKDTTKLPHNGCKLPGRRRV

SEQ ID NO: 627 - DNA, 390 bp, Enterococcus faecalis
  CDS (1)..(390): transl_table=11
atggcagcaaaaaaagttagtcgtaaacgccgtgtcaaaaagaatatagaatcaggtgtagcacatatccattctacattcaacaatacaatcgtaatgattactgatacacatggtaatgcattagcatggtcatcagcaggatcattaggctttaaaggaagcaaaaaatcaactccttttgccgctcaaatggctgcagaagccgcaactaaagtggcaatggaacatggacttaaaactgtagacgtaacagttaaaggacctggttctggacgtgaagcagcaattcgttcattacaagcaacaggtttagaagtgactgcaattcgtgacgtgactccagttcctcataatggatgccgccctccaaaacgccgtcgtgtttaa

SEQ ID NO: 628 - protein, 129 aa, Enterococcus faecalis
MAAKKVSRKRRVKKNIESGVAHIHSTFNNTIVMITDTHGNALAWSSAGSLGFKGSKKSTPFAAQMAAEAATKVAMEHGLKTVDVTVKGPGSGREAAIRSLQATGLEVTAIRDVTPVPHNGCRPPKRRRV

SEQ ID NO: 629 - DNA, 390 bp, Erwinia carotovora subsp
  CDS (1)..(390): transl_table=11
atggcaaaggcacctattcgtgcacgtaagcgtgtaagaaagcaagtctctgacggtgtggctcatatccatgcttctttcaacaacaccatcgtaaccattactgatcgtcagggtaatgcgctgggttgggcaactgccggtggttccggcttccgtggttctcgtaaatctacgccgttcgctgctcaagtagctgcagaacgttgcgcagaggccgtgaaagaatacggtattaagaacctggaagttatggttaaaggacctggtccgggccgtgagtctactatccgcgcattaaacgcggctggtttccgcatcactaatattactgatgtgactccgatccctcataacggttgtcgtccgccgaaaaagcgccgcgtataa

SEQ ID NO: 630 - protein, 129 aa, Erwinia carotovora subsp
MAKAPIRARKRVRKQVSDGVAHIHASFNNTIVTITDRQGNALGWATAGGSGFRGSRKSTPFAAQVAAERCAEAVKEYGIKNLEVMVKGPGPGRESTIRALNAAGFRITNITDVTPIPHNGCRPPKKRRV

SEQ ID NO: 631 - DNA, 405 bp, Frankia sp
  CDS (1)..(405): transl_table=11
atgcctcccaagacgcgcgcagccggcgccaagaaggtccggcgcaaggaaaagaagaacgtcgcccacggacacgctcacatcaagagcacgttcaacaacacgatcgtctccatcaccgacccgtccgggaacgtgatctcctgggcttcggcgggtcatgtcggcttcaagggctcccgcaagtccacgcccttcgccgcccagatggcggccgagaacgcggcccgcaaggcgcaggagcacgggatgcgcaaggtcgacgtcttcgtgaagggcccgggttccggccgggagaccgcgatccgttccctgcaggccgcggggctcgaggtcggtgcgatccaggacgtcaccccgaccccgcacaacggttgccgcccgcccaagcggcgcagggtgtga

SEQ ID NO: 632 - protein, 134 aa, Frankia sp
MPPKTRAAGAKKVRRKEKKNVAHGHAHIKSTFNNTIVSITDPSGNVISWASAGHVGFKGSRKSTPFAAQMAAENAARKAQEHGMRKVDVFVKGPGSGRETAIRSLQAAGLEVGAIQDVTPTPHNGCRPPKRRRV

SEQ ID NO: 633 - DNA, 390 bp, Fusobacterium nucleatum subsp
  CDS (1)..(390): transl_table=11
ttggctaaaaaaacagtagctaagataaaaaagaaaagtaaaaatattcctaatggagtagctcatatacattcaacttttaataacacaatagttgcaataactgatgtagatggtaaggttgtaagctggaaatctggtggaacttctgggttcaaaggaactaagaaaggaactccgtttgcagctcaaatagcagctgaacaagcagcacaaatcgctatggaaaacggaatgagaaaggttgaagttaaagtaaaaggacctggttctggaagagaagcttgtatcagatcacttcaagcagcaggattagaagttacaaaaataactgatgtaactcctgtacctcataatggttgtagaccaccaaaaagaagaagagtgtaa

SEQ ID NO: 634 - protein, 129 aa, Fusobacterium nucleatum subsp
MAKKTVAKIKKKSKNIPNGVAHIHSTFNNTIVAITDVDGKVVSWKSGGTSGFKGTKKGTPFAAQIAAEQAAQIAMENGMRKVEVKVKGPGSGREACIRSLQAAGLEVTKITDVTPVPHNGCRPPKRRRV

SEQ ID NO: 635 - DNA, 390 bp, Geobacillus kaustophilus
  CDS (1)..(390): transl_table=11
atggcacgcagaacaaacactcgtaaacgccgggtaagaaaaaatattgatacaggcatcgcccatatccgttcaacgttcaacaacacgatcgtgacgattacggatgttcatggcaacgccattgcttgggcgagcgctggttcgctggggttcaaaggttcgcgcaaatcaacgccgtttgcggcgcaaatggcggctgaagcagcagcgaaagcgtcgatggagcatggcatgaaaacggtcgaagtgaacgtcaaaggtccgggggctggccgcgaggcagcgatccgtgcattgcaagcagccgggttggaaattacggcgatcaaagacgtcactccaatcccgcacaatggatgccgtccgccaaaacgtcgccgtgtgtaa

SEQ ID NO: 636 - protein, 129 aa, Geobacillus kaustophilus
MARRTNTRKRRVRKNIDTGIAHIRSTFNNTIVTITDVHGNAIAWASAGSLGFKGSRKSTPFAAQMAAEAAAKASMEHGMKTVEVNVKGPGAGREAAIRALQAAGLEITAIKDVTPIPHNGCRPPKRRRV

SEQ ID NO: 637 - DNA, 396 bp, Geobacter metallireducens
  CDS (1)..(396): transl_table=11
atggcaagcccggctaaaaaagttgtcaagaagaagaaggaaaaaaagaatattcctaatggagtggcccacattcaggctacgttcaataatactatcatcaccataactgatcctgctggtaatgtggttgcttggtcttctgctggcggcaaaggctttaagggctctcgtaagagtacgccgttcgctgctcaggttgcagcagaggactgcgcgaaaaaggctcaggatcatggcatgcgtagtgtcgaagtgtatgtgaaaggtcctggatctggtcgtgagtctgctttgcgtgctcttcaggctgctggttttcatgtcaacttcatccgtgacgtcacgccgattccccataacggctgtcgtccgccgaagcgcagaagggtctaa

SEQ ID NO: 638 - protein, 131 aa, Geobacter metallireducens
MASPAKKVVKKKKEKKNIPNGVAHIQATFNNTIITITDPAGNVVAWSSAGGKGFKGSRKSTPFAAQVAAEDCAKKAQDHGMRSVEVYVKGPGSGRESALRALQAAGFHVNFIRDVTPIPHNGCRPPKRRRV

SEQ ID NO: 639 - DNA, 396 bp, Geobacter sulfurreducens
  CDS (1)..(396): transl_table=11
atggctagcccttctaaaaaagtcgttaggaaaaaaaaggaaaagaagaatatccccaacggcgttgcacatatccaggcaacgtttaacaatacgatcataaccatcaccgatcccgtggggaacgtcgtggcatggtcttcagccggctccaagggcttcaaggggtcgcgcaagagcactcccttcgccgctcagatcgcggctgaggagtgtgcacgcaaggctcaggagcatggcatgcggagcgtggaggttttcgtaaagggaccggggtccggacgcgagtcggcccttcgcgcactccaggctgccggcttccacgtcaatttcatacgggacgtgacgccgattcctcataacggctgccgtcctcccaagcgcagaagagtctaa

SEQ ID NO: 640 - protein, 131 aa, Geobacter sulfurreducens
MASPSKKVVRKKKEKKNIPNGVAHIQATFNNTIITITDPVGNVVAWSSAGSKGFKGSRKSTPFAAQIAAEECARKAQEHGMRSVEVFVKGPGSGRESALRALQAAGFHVNFIRDVTPIPHNGCRPPKRRRV

SEQ ID NO: 641 - DNA, 393 bp, Gloeobacter violaceus
  CDS (1)..(393): transl_table=11
atggcgaaaccaacccgtggcgggcagaaaaagaaagttcggcgcaatgtgccgagtggtgtggcccacattcaatccacgttcaacaacacgatcgtcactattgccgataccgtcggcgatgtgatttcctgggcgtctgccggctccagcggcttcaaaggcgccaaaaaaggcacccccttcgccgctcagcaggcggccgaatcggccggccgccgggccatcgactcgggcatgcgccagtgcgaggtgatggtcagcggccccggcgccggccgggagacggccatccgggctttgcaggcggtggggcttgagattaccctcatccgcgacgtcactccgattccccacaacggctgccgcccgcccaagcgccgccgcgtctaa

SEQ ID NO: 642 - protein, 130 aa, Gloeobacter violaceus
MAKPTRGGQKKKVRRNVPSGVAHIQSTFNNTIVTIADTVGDVISWASAGSSGFKGAKKGTPFAAQQAAESAGRRAIDSGMRQCEVMVSGPGAGRETAIRALQAVGLEITLIRDVTPIPHNGCRPPKRRRV

SEQ ID NO: 643 - DNA, 393 bp, Gluconobacter oxydans
  CDS (1)..(393): transl_table=11
atggccaaggccgctgctccgcgtatccgtaaaaaggaacgcaagaatatcatttccggtgttgctcacgtgctttccacgttcaacaacaccatgatcaccatttctgacgcacagggcaacgcgattgcctggtcgtcgtcgggtgcgcagggcttcaaaggctcccgtaagtccacgccgtatgctgctcaggtcgctgcagaagatgccggccgcaaggcacgcgagcatggcatggaaacgcttgagatcgaggtctccggtccgggttcggggcgtgaaagcgctctccgtgcccttcaggccgtagggttcaacattacgtccatccgcgacatgacgcccgtgccgcacaatggttgccgtccccggaagcgtcgtcgcgtctga

SEQ ID NO: 644 - protein, 130 aa, Gluconobacter oxydans
MAKAAAPRIRKKERKNIISGVAHVLSTFNNTMITISDAQGNAIAWSSSGAQGFKGSRKSTPYAAQVAAEDAGRKAREHGMETLEIEVSGPGSGRESALRALQAVGFNITSIRDMTPVPHNGCRPRKRRRV

SEQ ID NO: 645 - DNA, 390 bp, Haemophilus influenzae
  CDS (1)..(390): transl_table=11
atggctaaaacaccagttcgtgcacgtaaacgtgtaaaaaaacaagttgtagatggcgtagcacatattcacgcatctttcaataatacaatcgttactattactgaccgtcaaggtaatgctctagcttgggcaactgcaggtggttcaggtttccgtggttctcgtaaatcaactccgttcgcagcgcaagttgcggcagagcgttgtgctgaaatcgttaaagaatttggcttaaagaacttggaagttatggttaaaggtccgggtccaggtcgtgaatctacaattcgtgcgttaaacgcagcgggtttccgtatcacgaatattactgatgtgactccgattcctcataacggttgtcgtccaccgaaaaaacgtcgtgtttaa

SEQ ID NO: 646 - protein, 129 aa, Haemophilus influenzae
MAKTPVRARKRVKKQVVDGVAHIHASFNNTIVTITDRQGNALAWATAGGSGFRGSRKSTPFAAQVAAERCAEIVKEFGLKNLEVMVKGPGPGRESTIRALNAAGFRITNITDVTPIPHNGCRPPKKRRV

SEQ ID NO: 647 - DNA, 390 bp, Haemophilus influenzae
  CDS (1)..(390): transl_table=11
atggctaaaacaccagttcgtgcacgtaaacgtgtaaaaaaacaagttgtagatggcgtacgacatattcacgcatctttcaataatacaatcgttactattactgaccgtcaaggtaatgctctagcttgggcaactgcaggtggttcaggtttccgtggttctcgtaaatcaactccgttcgcagcgcaagttgcggcagagcgttgtgctgaaatcgttaaagaatttggcttaaagaacttggaagttatggttaaaggtccgggtccaggtcgtgaatctacaattcgtgcgttaaacgcagcgggtttccgtatcacgaatattactgatgtgactccgattcctcataacggttgtcgtccaccgaaaaaacgtcgtgtttaa

SEQ ID NO: 648 - protein, 129 aa, Haemophilus influenzae
MAKTPVRARKRVKKQVVDGVRHIHASFNNTIVTITDRQGNALAWATAGGSGFRGSRKSTPFAAQVAAERCAEIVKEFGLKNLEVMVKGPGPGRESTIRALNAAGFRITNITDVTPIPHNGCRPPKKRRV

SEQ ID NO: 649 - DNA, 390 bp, Haemophilus somnus
  CDS (1)..(390): transl_table=11
atggctaaaacaccagttcgtacacgtaaacgtgtaaaaaaacaagttgtagatggcgttgctcatattcacgcatctttcaataatacaatcgttacaattactgaccgtcaagggaatgctctagcatgggcaactgcaggtggttcaggtttccgtggttctcgtaaatctaccccttttgctgcacaagttgcagcagaacgttgtgccgaagttgtaaaagaattcggtttaaagaacttggaagttatggttaaggggccgggtcctggtcgtgaatcaacaatccgtgctttaaatgcagcgggatttcgtatcacgaatattacagatgtgactccgattccacataacggttgtcgtccaccgaagaaacgtcgtgtttaa

SEQ ID NO: 650 - protein, 129 aa, Haemophilus somnus
MAKTPVRTRKRVKKQVVDGVAHIHASFNNTIVTITDRQGNALAWATAGGSGFRGSRKSTPFAAQVAAERCAEVVKEFGLKNLEVMVKGPGPGRESTIRALNAAGFRITNITDVTPIPHNGCRPPKKRRV

SEQ ID NO: 651 - DNA, 390 bp, Haloarcula marismortui
  CDS (1)..(390): transl_table=11
atgagcgaagaaaccgaagacatctggggcatcgcccacgtgcacgcatcgttcaacaacacgatcatcaccatcaccgaccagaccggcgcggaaacgctcgcaaagagctccggcgggacggttgtcaagcagaaccgcgacgaagcgtcgccgtacgcggcgatgcagatggccgaggtcgttgccgaaaaggccctcgaccgtggcgtcgaaggcgtcgatgttcgggtccgtggtcccggcggcaacctccagacctcgcccggtccgggtgcgcaggcgacgattcgcgcactcgcccgagcgggtctggagatcggtcgcatcgaggacgtcacgccgaccccgcacgacggcactcgtgcacccaagaactccggattctaa

SEQ ID NO: 652 - protein, 129 aa, Haloarcula marismortui
MSEETEDIWGIAHVHASFNNTIITITDQTGAETLAKSSGGTVVKQNRDEASPYAAMQMAEVVAEKALDRGVEGVDVRVRGPGGNLQTSPGPGAQATIRALARAGLEIGRIEDVTPTPHDGTRAPKNSGF

SEQ ID NO: 653 - DNA, 384 bp, Halobacterium salinarium
  CDS (1)..(384): transl_table=11
atggctgacgacaccaaatggggcatcgcgcacgttcacgcctcgttcaacaacaccatcatgaccgtcacggaccagacgggcgccgaaacgctcgcgaagtccagtggcggctcggtggtcaagcagaaccgggacgaggcgtcgccgtacgccgcgatgcagatggcagaacagctcgccgaggaagtactcgatcagggcatcgagaaggtccacgtccgggtccgcggtccgggcgggaacctccagcgaagcccgggtccgggcgcgcaggcagcgatccgcgcgctcgcccgcgccggcctcgaaatcggtcgcatcgaggacgtcacgcccatcccccacgacgggacgcgaccgccgaagaacagcgggtactag

SEQ ID NO: 654 - protein, 127 aa, Halobacterium salinarium
MADDTKWGIAHVHASFNNTIMTVTDQTGAETLAKSSGGSVVKQNRDEASPYAAMQMAEQLAEEVLDQGIEKVHVRVRGPGGNLQRSPGPGAQAAIRALARAGLEIGRIEDVTPIPHDGTRPPKNSGY

SEQ ID NO: 655 - DNA, 393 bp, Helicobacter hepaticus
  CDS (1)..(393): transl_table=11
atggcaaaaaaaagtgtaacaaagaaaaaaaatgttaaaaagaatattgcacggggtatagtgtgtatttctgcatcatttaacaatacaaatgtaacaattaccgatgaaatgggaaatgtattgtgttgggctactgcgggtggtttaggattcaaaggaagtaagaaatctacaccttatgccgcacaacaagcagtagaatctgcaatggaaaaagctaaagagcacggcattaaggaagtaggtattaaggttcaaggaccaggcagcggacgcgaaacagctgtaaaaagtgtgggagcggttgaaggtattaaggtgctatggcttaaagatattacaccattgccgcacaatgggtgcagaccgccaaaaagacgaagagtgtaa

SEQ ID NO: 656 - protein, 130 aa, Helicobacter hepaticus
MAKKSVTKKKNVKKNIARGIVCISASFNNTNVTITDEMGNVLCWATAGGLGFKGSKKSTPYAAQQAVESAMEKAKEHGIKEVGIKVQGPGSGRETAVKSVGAVEGIKVLWLKDITPLPHNGCRPPKRRRV

SEQ ID NO: 657 - DNA, 396 bp, Helicobacter pylori J99
  CDS (1)..(396): transl_table=11
atggctaagagaaatgtaacggctaaaaagaaagtagtcaaaaagaatattgcgagaggggttgtttatatttcagcgacctttaacaacaccaacatcactatcactgatgaaatgggcaatgtgatttgttggagcacggcgggcggtttagggtttaaaggctctaaaaaatccaccccttatgcggcccaacaagctgtagaaagcgctctaagcaaggctaaagagcatggcgttaaagaagtgggcattaaggttcaagggccaggcagtgggcgtgagaccgctattaagagcgtgggcgcgacagagggcgttaaagtgctttggattaaagacatcaccccgctccctcataatggttgcagaccccctaaaagaagaagagtgtaa

SEQ ID NO: 658 - protein, 131 aa, Helicobacter pylori J99
MAKRNVTAKKKVVKKNIARGVVYISATFNNTNITITDEMGNVICWSTAGGLGFKGSKKSTPYAAQQAVESALSKAKEHGVKEVGIKVQGPGSGRETAIKSVGATEGVKVLWIKDITPLPHNGCRPPKRRRV

SEQ ID NO: 659 - DNA, 396 bp, Helicobacter pylori
  CDS (1)..(396): transl_table=11
atggctaagagaaatgtaacggctaaaaagaaagtagtcaaaaagaatattgcgagaggggttgtttatatttcagcgacctttaacaacaccaacatcactatcactgatgaaatgggcaatgtgatttgctggagcacggcgggcggtttagggtttaaaggctctaaaaaatccaccccttatgcggcccaacaggctgtagaaagcgctctaagcaaggctaaagagcatggcgttaaagaagtgggcattaaggttcaagggccaggcagtgggcgtgagaccgccattaagagcgtgggcgcgacagagggcattaaagtgctttggattaaagacatcaccccgctccctcataatggttgcagaccccctaaaagaagaagagtgtaa

SEQ ID NO: 660 - protein, 131 aa, Helicobacter pylori
MAKRNVTAKKKVVKKNIARGVVYISATFNNTNITITDEMGNVICWSTAGGLGFKGSKKSTPYAAQQAVESALSKAKEHGVKEVGIKVQGPGSGRETAIKSVGATEGIKVLWIKDITPLPHNGCRPPKRRRV

SEQ ID NO: 661 - DNA, 390 bp, Hyphomonas neptunium
  CDS (1)..(390): transl_table=11
atggcccgcgaagctacccgtatccgccgccgcgaacgcaagaacattacctctggtattgttcatgtgaactcgagcttcaacaacacgatggtcaccatcaccgacgcacagggcaacaccatttcctggtcgtcgtcgggcgtgatgaacttcaaaggctcgcgcaagtcgacgccttacgccgctcagatggctgctgaagacgctgccaagaaggcgaaagagcacggcctgcagacggttgaagtgcgtgttcgcggtcccggttcgggccgtgagagtgccctgcgcgccctccaggccgctggccttaccgtgacggcgatcaacgacacgacgccgatcccgcataacggatgccgtccgcccaagcgccgccgcgtctaa

SEQ ID NO: 662 - protein, 129 aa, Hyphomonas neptunium
MAREATRIRRRERKNITSGIVHVNSSFNNTMVTITDAQGNTISWSSSGVMNFKGSRKSTPYAAQMAAEDAAKKAKEHGLQTVEVRVRGPGSGRESALRALQAAGLTVTAINDTTPIPHNGCRPPKRRRV

SEQ ID NO: 663 - DNA, 390 bp, Idiomarina loihiensis
  CDS (1)..(390): transl_table=11
atggctaaaacaccaactcgctctcgaaagcgcgttaaaaagcaggtcgccgatggcatggctcatgtgcatgcatctttcaacaacaccattattaccattactgatcgccagggtaacgcactagcgtgggctactgcaggtggatcagggttccgtggttcacggaaatcaacgccgttcgcagcacaggttgcagcagaacgcgcaggtgaaatggcgaaggaatacggactgaaaaacctggaagtatttgtgaatggtccaggcccaggtcgtgaatcatcgattcgtgccctgaacgccgttggttacaaaatcacaaatattaccgatgtgacaccgattcctcacaacggttgtcgtccgcctaagaaacgtcgcgtttaa

SEQ ID NO: 664 - protein, 129 aa, Idiomarina loihiensis
MAKTPTRSRKRVKKQVADGMAHVHASFNNTIITITDRQGNALAWATAGGSGFRGSRKSTPFAAQVAAERAGEMAKEYGLKNLEVFVNGPGPGRESSIRALNAVGYKITNITDVTPIPHNGCRPPKKRRV

SEQ ID NO: 665 - DNA, 393 bp, Lactobacillus acidophilus
  CDS (1)..(393): transl_table=11
ttgatgcctgcaaagaaaacagcacgtaagcgtcgtgtgaagaagcatgttgaaagcggtgtggcacacattcactcaacgtttaataatactttagtcatgattactgacgttcaaggtaatgcagttgcttggtcttcagctggtgcattgggtttcaagggtagtcgtaagtctactccatttgcagctcaaatggcagctgaagcagcagctaagagtgcaatggaccaaggtatgaaacatgtagaagtttctgttaaaggtcctggtgctggtcgtgaatctgctattagatcacttcaagcaactggtcttgaaattactgcaattcgtgacgttacgccagttccccacaatggttccagaccaccaaaacgtcgtcgtgcttaa

SEQ ID NO: 666 - protein, 130 aa, Lactobacillus acidophilus
MMPAKKTARKRRVKKHVESGVAHIHSTFNNTLVMITDVQGNAVAWSSAGALGFKGSRKSTPFAAQMAAEAAAKSAMDQGMKHVEVSVKGPGAGRESAIRSLQATGLEITAIRDVTPVPHNGSRPPKRRRA

SEQ ID NO: 667 - DNA, 384 bp, Lactococcus lactis subsp
  CDS (1)..(384): transl_table=11
atggcaaaaattacacgtaaacgtcgtgttaaaaagaatattgaatctggaattgttcatatccaatcaacattcaacaacacaatcgttatgatcacagacgttcatggtaacgcccttgcttggtcatcagctggtgcacttggatttaaaggttctaaaaaatctacacctttcgccgctcaaatggcttcagaagctgctgctaaagctgctcaagagcaaggtttgaaaactgtatctgttacagttaaaggtcctggttcaggtcgcgaatcagctatccgcgcactcgctgcagctggtcttaatgtaacatctatcagtgatgtgactcctgtacctcacaatggtgcacgtcctccaaaacgtcgtcgtgtataa

SEQ ID NO: 668 - protein, 127 aa, Lactococcus lactis subsp
MAKITRKRRVKKNIESGIVHIQSTFNNTIVMITDVHGNALAWSSAGALGFKGSKKSTPFAAQMASEAAAKAAQEQGLKTVSVTVKGPGSGRESAIRALAAAGLNVTSISDVTPVPHNGARPPKRRRV

SEQ ID NO: 669 - DNA, 390 bp, Lactobacillus plantarum
  CDS (1)..(390): transl_table=11
atggcaactagaaagacaacccgtcgtcgtcgggtaaagaagaacattgaatctggtgtggctcacatccattcaacgttcaacaacacacttgttatgatcactgatatgcaagggaacgccattgcatggtcatcagctggttcattaggtttcaaaggtagtcgtaagtcaacaccttttgctgctcaaatggctgcagaagctgctgctaaggcatcaatggaacatggtatgaagactgttgaagtcgctgttaagggtcctggttcaggccgtgaagccgctatccgtgctttacaagctactggtttggaagttagcgcaattcgcgatgttacgccagtgcctcacaatggttctcgtcctccaaagcgtcgtcgtgtttaa

SEQ ID NO: 670 - protein, 129 aa, Lactobacillus plantarum
MATRKTTRRRRVKKNIESGVAHIHSTFNNTLVMITDMQGNAIAWSSAGSLGFKGSRKSTPFAAQMAAEAAAKASMEHGMKTVEVAVKGPGSGREAAIRALQATGLEVSAIRDVTPVPHNGSRPPKRRRV

SEQ ID NO: 671 - DNA, 399 bp, Leifsonia xyli subsp
  CDS (1)..(399): transl_table=11
atggcagcacccaagtcggccgctcgcaagccgcgcaagaaagaaaagaagaacatcgctgtgggccaggcccacatcaagagcacgttcaacaacacgatcgtctcgatcaccgacaccactggtgcggtcctcagctgggcctcctccggcggcgtcgggttcaagggctctcgcaagtcgactccgtacgccgcgcagctggcggccgagtcggccgcccgccaggcgcaggagcacggcatgaaaaaggtcgacgtcttcgtgaagggcccgggctcgggtcgtgagacggcgatccgctccctccaggccgccggcctcgaggtgggctcgatcaacgacgtcactccgcaggcgcacaacggctgtcgcccgccgaagcgtcgccgcgtctaa

SEQ ID NO: 672 - protein, 132 aa, Leifsonia xyli subsp
MAAPKSAARKPRKKEKKNIAVGQAHIKSTFNNTIVSITDTTGAVLSWASSGGVGFKGSRKSTPYAAQLAAESAARQAQEHGMKKVDVFVKGPGSGRETAIRSLQAAGLEVGSINDVTPQAHNGCRPPKRRRV

SEQ ID NO: 673 - DNA, 387 bp, Leuconostoc mesenteroides subsp
  CDS (1)..(387): transl_table=11
atggcaggtcgtacaacgcgtaagcgtcgtgtgaagaagaatattgaatctggtgtggctcacatccattcaacattcaacaacactattgtaatgattactgatgcacaaggtaacgcagttgcttggtcatcagctggtgcacttggcttcaaaggaagtcgtaagtcaacaccattcgctgctcaaatggcggcggaagctgcagcaaaaagtgccatggaaattaacatgcgtacagttgcagtaactgttaagggtcctggttcaggtcgtgaatcagctatccgtgctttggcagcagctggcttggaagtaacatcaattaaggatgttacaccagttccccataacggatcacgcccaccaaagcgtcgtcgtgtttaa

SEQ ID NO: 674 - protein, 128 aa, Leuconostoc mesenteroides subsp
MAGRTTRKRRVKKNIESGVAHIHSTFNNTIVMITDAQGNAVAWSSAGALGFKGSRKSTPFAAQMAAEAAAKSAMEINMRTVAVTVKGPGSGRESAIRALAAAGLEVTSIKDVTPVPHNGSRPPKRRRV

SEQ ID NO: 675 - DNA, 390 bp, Listeria innocua
  CDS (1)..(390): transl_table=11
atggctcgtaaaacaaatactcgtaaacgtcgtgtgaaaaagaatatcgaatctggtattgcacacattcgttctacatttaataatacgatcgtaatgattactgacacacatggtaatgctttagcttggtcaagtgcaggttctctaggatttaaaggttctcgtaaatctactcctttcgcagcgcaaatggcagctgaaagtgcagcaaaatcagcacaagaacatggtttaaaaacattagaagtaactgttaaaggtcctggttcaggtcgtgaagcggctatccgtgcactacaagcagctggtcttgaagtaacagctattaaagatgtaactccagttccacataacggatgtcgtcctccaaaacgtcgtcgcgtataa

SEQ ID NO: 676 - protein, 129 aa, Listeria innocua
MARKTNTRKRRVKKNIESGIAHIRSTFNNTIVMITDTHGNALAWSSAGSLGFKGSRKSTPFAAQMAAESAAKSAQEHGLKTLEVTVKGPGSGREAAIRALQAAGLEVTAIKDVTPVPHNGCRPPKRRRV

SEQ ID NO: 677 - DNA, 396 bp, Magnetococcus sp
  CDS (1)..(396): transl_table=11
atggccaaggcccaaaaaggtgcccgtactaagaaaaaagagcgtaagaatattgcgagcggtattgctcacattcattctacgttcaacaacacgttgatcactattaccgacacccatggtaactcgatttcctggggcagtgctggtgcacaagggtttaagggctcgcgtaagtccactccctttgccgcacagatggctgctgagaatgccggtaaaaaagccatggatcatgggatgcgtaacctggaagtgcgtctgaagggtcccggcagcggccgtgaatcggctctgcgcgccctggccgcaattggttttaacatttcccatgtacaggatgtgacacccatcccgcataacggttgccgccctcccaagcggcgtcgtgtgtga

SEQ ID NO: 678 - protein, 131 aa, Magnetococcus sp
MAKAQKGARTKKKERKNIASGIAHIHSTFNNTLITITDTHGNSISWGSAGAQGFKGSRKSTPFAAQMAAENAGKKAMDHGMRNLEVRLKGPGSGRESALRALAAIGFNISHVQDVTPIPHNGCRPPKRRRV

SEQ ID NO: 679 - DNA, 390 bp, Mannheimia succiniciproducens
  CDS (1)..(390): transl_table=11
atggctaaaacaccagttcgtgcacgtaaacgtgtaaaaaaacaagttgtagatggcgtagcgcatattcacgcatctttcaataatacaatcgtgactattactgaccgtcagggtaacgctcttgcatgggcaaccgcaggtggttcaggtttccgtggttctcgtaaatcaactccgttcgcagctcaagtagcagcagaacgttgtgctgaagctgtaaaagaattcggcttaaagaacttggaagttatggttaaaggtccgggtccgggtcgtgaatcaacaattcgcgcattaaatgctgcgggtttccgaatcacgaatattactgatgtgactccgattcctcataacggttgtcgtccaccgaaaaaacgtcgtgtttaa

SEQ ID NO: 680 - protein, 129 aa, Mannheimia succiniciproducens
MAKTPVRARKRVKKQVVDGVAHIHASFNNTIVTITDRQGNALAWATAGGSGFRGSRKSTPFAAQVAAERCAEAVKEFGLKNLEVMVKGPGPGRESTIRALNAAGFRITNITDVTPIPHNGCRPPKKRRV

SEQ ID NO: 681 - DNA, 393 bp, Mesoplasma florum
  CDS (1)..(393): transl_table=4
atggcaaaaccaaaaacaaataatacaaaaaaacgtattaagaaaaatatcccaaaaggtatcgctcatattcactctacttttaacaatacaattgttactattagtgatgaaaaaggaaacgtactttcttgatcaagtgctggagcaatcgggttcaaaggttctaaaaaatctacaccttatgctgcgcaaatgatttcagaagcagctgctaaaggtgcaatggatcaaggtgttaaatcagttcaagttgaagtaaaaggtccaggtccaggtcgtgatgctgctgttagagcattaacaatcgttggaatggaagtaacttcaattaaggattgtacaccaatccctcataatggagttcgtcctaaaaaacgtccaagaaaataa

SEQ ID NO: 682 - protein, 130 aa, Mesoplasma florum
MAKPKTNNTKKRIKKNIPKGIAHIHSTFNNTIVTISDEKGNVLSWSSAGAIGFKGSKKSTPYAAQMISEAAAKGAMDQGVKSVQVEVKGPGPGRDAAVRALTIVGMEVTSIKDCTPIPHNGVRPKKRPRK

SEQ ID NO: 683 - DNA, 390 bp, Mesorhizobium sp
  CDS (1)..(390): transl_table=11
atggccaaggaagccgcacgcgttcgccgtcgtgaacgtaagaacatctcgtcgggtgttgcgcatgtcaactcgaccttcaacaacaccatgatcaccatcaccgatgcccagggcaatgcgatcgcctggtcgtctgccggtgcccagggcttcaaaggctcgcgtaagtccacccccttcgccgctcaggtagcggcagaggattgcgcccgcaaggcgcaggagcatggcatgcgcaccctcgaggttgaggtttccggaccgggctccggtcgtgaatcggcgctgcgcgccttgcaggcggccggtttcaccattacatccatccgcgatgtgaccccaatcccgcacaacggatgccgcccgcgcaagaagcgccgggtttaa

SEQ ID NO: 684 - protein, 129 aa, Mesorhizobium sp
MAKEAARVRRRERKNISSGVAHVNSTFNNTMITITDAQGNAIAWSSAGAQGFKGSRKSTPFAAQVAAEDCARKAQEHGMRTLEVEVSGPGSGRESALRALQAAGFTITSIRDVTPIPHNGCRPRKKRRV

SEQ ID NO: 685 - DNA, 381 bp, Methanosarcina acetivorans
  CDS (1)..(381): transl_table=11
atggcagatatgaaatgggctgtagctcacatcaaatcctcatttaacaacacaattatcacagttactgatattaccggggctgaaaccattgcaaagtcttccggtggtatggttgtaaaggctgcaagggacgaaagttctccatacactgccatgcagatggcaggccagcttgctgaccagctcaaggacaagggtattaatggaatccatatccgggtaagagctcccggaggaaacaagcagagaagtcccgggcccggtgcacaggctgcaatcagggcttttgcaagagcaggaatccgcattggcagaatcgaggatgtcactcctgtcccgcacgacggcactcgtccgaaaggcggaaggcgtgtataa

SEQ ID NO: 686 - protein, 126 aa, Methanosarcina acetivorans
MADMKWAVAHIKSSFNNTIITVTDITGAETIAKSSGGMVVKAARDESSPYTAMQMAGQLADQLKDKGINGIHIRVRAPGGNKQRSPGPGAQAAIRAFARAGIRIGRIEDVTPVPHDGTRPKGGRRV

SEQ ID NO: 687 - DNA, 381 bp, Methanosarcina barkeri
  CDS (1)..(381): transl_table=11
atggcagacatgaaatgggccgtagctcacattaaatcttcatttaacaacacaattattactgtaaccgatatcacaggggctgaaaccattgcaaagtcttccggtggtatggttgtaaaagctgcaagagacgagagctctccttatactgccatgcagatggcaggccagcttgctgaccagctcagggataagggtatccatggcatccatataagggtaagagcgcctggtggaaacaagcagagaagcccgggccccggcgctcaggctgcaatcagggcttttgcaagagcaggaatccggattggcaggattgaagatgttactcctgtcccgcacgacggcactcgtcccaaaggcggaagacgtgtataa

SEQ ID NO: 688 - protein, 126 aa, Methanosarcina barkeri
MADMKWAVAHIKSSFNNTIITVTDITGAETIAKSSGGMVVKAARDESSPYTAMQMAGQLADQLRDKGIHGIHIRVRAPGGNKQRSPGPGAQAAIRAFARAGIRIGRIEDVTPVPHDGTRPKGGRRV

SEQ ID NO: 689 - DNA, 381 bp, Methanococcoides burtonii
  CDS (1)..(381): transl_table=11
atggctaacggaatctggggtgttgcacacatcaagtgctcattcaataacactatcatcactgtgactgacctcacaggcgcagagaccatcgcaaaatcctctggtggaatggttgtaaaggcagcaagggatgaaagctccccatatactgctatgcagatggctactcagcttgcagacattcttagggacaagggtctcgagggtgtccacatcaaggtaagagcaccgggtggaaacaagcagaggagtcctggaccaggggcacaggctgctatcagggcatttgcaagagctggcgtcaggatcggaaggatcgaagacgtaacaccagttccacatgatggaactcgtccaaaaggcggaaggcgtgtataa

SEQ ID NO: 690 - protein, 126 aa, Methanococcoides burtonii
MANGIWGVAHIKCSFNNTIITVTDLTGAETIAKSSGGMVVKAARDESSPYTAMQMATQLADILRDKGLEGVHIKVRAPGGNKQRSPGPGAQAAIRAFARAGVRIGRIEDVTPVPHDGTRPKGGRRV

SEQ ID NO: 691 - DNA, 387 bp, Methylococcus capsulatus
  CDS (1)..(387): transl_table=11
atggccacgacaggtcgccccgtaaaaagagtcaaaagagatatctcggacgggatcgcgcatatcagcgcgtctttcaacaacaccataatcaccatcaccgatagaaagggtaacgcgctttcgtgggccagcgccggtgcttcgggctttcgcgggtcgcgcaagagtacaccgttcgccgctcaagtggccgccgagaaggcgggtgcggtggcgaaggagtacggaatcaagaatctggacgtccacgttaccggtccaggccctggaagggagtctgccgtgcgttctctgaacgctttgggctttaagattgttaacgtagtggatactacgccgctgccccataacgggtgtcgtcccccaaagaagcggcgcgtttga

SEQ ID NO: 692 - protein, 128 aa, Methylococcus capsulatus
MATTGRPVKRVKRDISDGIAHISASFNNTIITITDRKGNALSWASAGASGFRGSRKSTPFAAQVAAEKAGAVAKEYGIKNLDVHVTGPGPGRESAVRSLNALGFKIVNVVDTTPLPHNGCRPPKKRRV

SEQ ID NO: 693 - DNA, 390 bp, Methylobacillus flagellatus
  CDS (1)..(390): transl_table=11
atggctaaagctaacgtacgcgtacgcaagaaagtcaaaaagaatattgccgagggcattgctcacgtgcacgcttcttttaacaataccatcatcacgatcactgaccgccagggtaatgcgctgtcttgggcaacttctggtggcgcagggttcaagggctctcgtaaaagtaccccttttgctgctcaagtagccgctgaggctgctggcaaggctgctcaggaatgtggtgtgaagaatcttgaagtgcgcatcaaggggccaggcccaggtcgtgaatctgctgtgcgtgcattgaatgcggttggtttcaagattaccagcatttcagatgtgactcccgtgccacacaatggttgccgtccgccgaagaagcgtcgtatctaa

SEQ ID NO: 694 - protein, 129 aa, Methylobacillus flagellatus
MAKANVRVRKKVKKNIAEGIAHVHASFNNTIITITDRQGNALSWATSGGAGFKGSRKSTPFAAQVAAEAAGKAAQECGVKNLEVRIKGPGPGRESAVRALNAVGFKITSISDVTPVPHNGCRPPKKRRI

SEQ ID NO: 695 - DNA, 390 bp, Methanococcus jannaschii
  CDS (1)..(390): transl_table=11
atggcagaacagaaaaaagaaaaatggggaatagttcatatctactcatcttacaacaacacaataatccatgcaacagacattacaggagcagagacaattgcaagagtttcaggtgggagggttacaagaaaccagagagatgagggttctccttacgcagcaatgcaggcagcatttaaattggcagaggtattaaaagagagaggaattgaaaacatccatatcaaagttagagctccaggaggtagtgggcagaaaaacccaggacctggagctcaggctgctattagagctttagcaagagctggattaagaattggaagaattgaagatgttacaccagttccacatgatggaacaacacctaagaagaggttcaaaaagtaa

SEQ ID NO: 696 - protein, 129 aa, Methanococcus jannaschii
MAEQKKEKWGIVHIYSSYNNTIIHATDITGAETIARVSGGRVTRNQRDEGSPYAAMQAAFKLAEVLKERGIENIHIKVRAPGGSGQKNPGPGAQAAIRALARAGLRIGRIEDVTPVPHDGTTPKKRFKK

SEQ ID NO: 697 - DNA, 414 bp, Methanopyrus kandleri
  CDS (1)..(414): transl_table=11
atggccgagaaggagggtaagaaggagaagaaagagcggtggggaatcgcccacatctacgcctccttcaacaacacgatcatcacgatcaccgaccttacgggtgccgagacgttcgcccgctggtccggaggtatggtcgtcgacgcggaccgagaggagagctcaccgtacgccgccatgaaggccgccaggcgcgccgccgaggaagccatggagaagggtatcaccgcggtccacgtgaaggtgcgcgcacccggtggtcacggtcctaagacgcccggaccgggcgcccaggctgccatccgagctctagcccgtgcaggcctgaagatcggacggatcgaggacgtcacgccgatcccgcacgacggtaccaggaggcccggaggtaagagaggacgcagggtatga

SEQ ID NO: 698 - protein, 137 aa, Methanopyrus kandleri
MAEKEGKKEKKERWGIAHIYASFNNTIITITDLTGAETFARWSGGMVVDADREESSPYAAMKAARRAAEEAMEKGITAVHVKVRAPGGHGPKTPGPGAQAAIRALARAGLKIGRIEDVTPIPHDGTRRPGGKRGRRV

SEQ ID NO: 699 - DNA, 381 bp, Methanosarcina mazei
  CDS (1)..(381): transl_table=11
atggcagatatgaaatgggctgtagctcacatcaaatcctcatttaataacacaattattacagtaacagatatcaccggggctgaaactattgccaagtcctctggtggtatggtggtaaaggctgccagggatgaaagctctccttacactgccatgcagatggcaggccagcttgctgaccagctcagggacaagggcattaacgggatccacatccgtgtgagagctcccggaggaaacaagcagagaagccctggacccggcgcacaggctgcaatcagagcttttgcaagagcaggaatccgtattggcaggatcgaggacgtgactcctgtcccgcacgacggaacccgtccaaaaggcggaaggcgtgtataa

SEQ ID NO: 700 - protein, 126 aa, Methanosarcina mazei
MADMKWAVAHIKSSFNNTIITVTDITGAETIAKSSGGMVVKAARDESSPYTAMQMAGQLADQLRDKGINGIHIRVRAPGGNKQRSPGPGAQAAIRAFARAGIRIGRIEDVTPVPHDGTRPKGGRRV

SEQ ID NO: 701 - DNA, 375 bp, Methanococcus maripaludis
  CDS (1)..(375): transl_table=11
atgagtcaaaaatggggattagtacacatttatgcatcatacaacaatacaattctccacgttactgatttaactggagcagaaacaatcgctaaagtttcaggcggtatgattgtaagaaaccagagagatgaatcatctccatacgctgcaatgcaagctgcattcaaaatagcagacttgatgagagataaaggaattgatcaggtacacgtaaaggtcagagctacaggcggccagaaatccaaaaacccaggacctggtgcacaagctgctatcagagcattatcaagagcaggaatcagaatcggaagaattgaagatgctacaccaattccacacgatggtactacaccaaaaagaaagaacagataa

SEQ ID NO: 702 - protein, 124 aa, Methanococcus maripaludis
MSQKWGLVHIYASYNNTILHVTDLTGAETIAKVSGGMIVRNQRDESSPYAAMQAAFKIADLMRDKGIDQVHVKVRATGGQKSKNPGPGAQAAIRALSRAGIRIGRIEDATPIPHDGTTPKRKNR

SEQ ID NO: 703 - DNA, 393 bp, Methanobacterium thermoautotrophicum
  CDS (1)..(393): transl_table=11
atggctgagaaggaaaaatggggaattgcaaatatttactcatcattcaacaacacaataatcaccatcacagacataaccggtgcagagaccataacacagtggtccggtggtaaggttgtgagggcggaccgtcaggagtcctcacccttcgctgcaatggaggccgcaacaagggcagctgatgatgcaaaggagaagggcatcgtcggcctgcacataaaggtcagggctcctggtggaaacggtccaaggacacccggaccaggtgcacaggcagccataagggcactggcaagggctggaatgaggataggtaaaattgaggatgtaactcccatacctcacgatggaacaggtagacctggaggtaagaggggaagaagggtctaa

SEQ ID NO: 704 - protein, 130 aa, Methanobacterium thermoautotrophicum
MAEKEKWGIANIYSSFNNTIITITDITGAETITQWSGGKVVRADRQESSPFAAMEAATRAADDAKEKGIVGLHIKVRAPGGNGPRTPGPGAQAAIRALARAGMRIGKIEDVTPIPHDGTGRPGGKRGRRV

SEQ ID NO: 705 - DNA, 393 bp, Moorella thermoacetica
  CDS (1)..(393): transl_table=11
atgccaccacgtaaaaccgcccggccgcgccggcgggatcgcaagcatattgaaagcggtattgcccatattaaatcaaccttcaataataccctggtgaccattaccgataaaaacggaaatgctatttcctgggccagcgccggcaccgtggggttcaagggttcccggaagagtacaccctttgcggcccaaatggcggctgaagctgccgccaagcaggccatggaacatggcctgcgggaggtcgagtgttacgtcaagggaccgggggccggccgggaagcggccattcgttcccttcaggccgccgggctggaggtcagcgttattaaagacgtcacacctattccccataacggttgccgtcctcctaaacggcgccgggtttag

SEQ ID NO: 706 - protein, 130 aa, Moorella thermoacetica
MPPRKTARPRRRDRKHIESGIAHIKSTFNNTLVTITDKNGNAISWASAGTVGFKGSRKSTPFAAQMAAEAAAKQAMEHGLREVECYVKGPGAGREAAIRSLQAAGLEVSVIKDVTPIPHNGCRPPKRRRV

SEQ ID NO: 707 - DNA, 417 bp, Mycobacterium avium
  CDS (1)..(417): transl_table=11
atgccaccagccaagaaggcagccgctgcccccaagaaggggcagaagacccgccgccgggagaagaagaacgtcccgcacggcgcggcccacatcaagagcacgttcaacaacacgatcgtgacgatcaccgacccgcagggcaacgtcatcgcctgggcgtcgtccggccacgtcgggttcaagggctcgcggaagtcgaccccgttcgccgcccagctggccgccgagaacgcggcccgcaaggcgcaggaacacggcgtgcgcaaggtcgacgtgttcgtcaagggcccgggctcgggccgggagacggcgatccggtcgctgcaggccgccgggctggaggtcggcgcgatctccgacgtcaccccccagccgcacaacggcgtccgccccccgaagcgcagaagggtctag

SEQ ID NO: 708 - protein, 138 aa, Mycobacterium avium
MPPAKKAAAAPKKGQKTRRREKKNVPHGAAHIKSTFNNTIVTITDPQGNVIAWASSGHVGFKGSRKSTPFAAQLAAENAARKAQEHGVRKVDVFVKGPGSGRETAIRSLQAAGLEVGAISDVTPQPHNGVRPPKRRRV

SEQ ID NO: 709 - DNA, 420 bp, Mycobacterium bovis
  CDS (1)..(420): transl_table=11
atgccaccagcaaaaaaagggccggcaacgtcggctaggaagggccagaagacccgccggcgggagaagaagaacgtcccgcacggcgccgcccacatcaagagcacgttcaacaacacgatcgtgaccatcaccgacccgcaaggcaacgtcattgcctgggcatcgtcggggcacgtcggcttcaagggttcccggaaatcgaccccgtttgcggcccagctggccgcggagaacgccgctcgcaaggcccaagaccacggggtgcgcaaggtcgacgtgttcgtcaagggcccgggctcgggccgcgagaccgcgatccggtcgctgcaggccgccggcctggaggtgggcgcgatctcggatgtcaccccccagccgcataacggtgtccggccccccaatcgccggcgcgtctag

SEQ ID NO: 710 - protein, 139 aa, Mycobacterium bovis
MPPAKKGPATSARKGQKTRRREKKNVPHGAAHIKSTFNNTIVTITDPQGNVIAWASSGHVGFKGSRKSTPFAAQLAAENAARKAQDHGVRKVDVFVKGPGSGRETAIRSLQAAGLEVGAISDVTPQPHNGVRPPNRRRV

SEQ ID NO: 711 - DNA, 417 bp, Mycobacterium leprae
  CDS (1)..(417): transl_table=11
atgccgccgaagaaggcaaacgcagcgggtcccaagaagggacagaagacccgtaagcgggaaaagaagaatatcccatacggtgctgcgcatattaagagcaccttcaacaatacgatcgtgaccattactgaccagcagggtaacgtcattgcctgggcgtcatcgggccacgttggcttcaaaggatcgcggaaatcgactccgttcgccgcgcagttggctgctgagaacgccgcacgcaaggctcaggagcacggggtgcgcaaggtcgacgtattcgtgatgggcccgggctcgggccgggagactgcgatccggtcgctgcaggctgctggcctagaggtcggcgcgatctctgacgtcaccccccagccgcacaatggctgccgtccacccaagcgcagaagagtctag

SEQ ID NO: 712 - protein, 138 aa, Mycobacterium leprae
MPPKKANAAGPKKGQKTRKREKKNIPYGAAHIKSTFNNTIVTITDQQGNVIAWASSGHVGFKGSRKSTPFAAQLAAENAARKAQEHGVRKVDVFVMGPGSGRETAIRSLQAAGLEVGAISDVTPQPHNGCRPPKRRRV

SEQ ID NO: 713 - DNA, 405 bp, Mycoplasma mobile
  CDS (1)..(405): transl_table=4
atggcagttaaaaaaacaaaatcaaaacaaaaagttaaaagaaaaaatattgttagtggtgttgcacatattcattcaactcaccaaaacacaattgttgcttttagtgatgaagccggaaacgtatttgcatgatcttcagcaggagcaattggttacaaaggaactaagaaaaaaactccttatgcagctggtttggcaacaacagcagctgtagaaaaagctaaagaacatggattaaaagaagtaagagttgaattaaaaggaacaggttctggtaaagatgctgctagaaaacaaattgaagcattaggaatcattattaaagaagttaaagatgtcactccaattccacataatggaacaagacctcctaaaaaagtgttgaaaagagatctaaaataa

SEQ ID NO: 714 - protein, 134 aa, Mycoplasma mobile
MAVKKTKSKQKVKRKNIVSGVAHIHSTHQNTIVAFSDEAGNVFAWSSAGAIGYKGTKKKTPYAAGLATTAAVEKAKEHGLKEVRVELKGTGSGKDAARKQIEALGIIIKEVKDVTPIPHNGTRPPKKVLKRDLK

SEQ ID NO: 715 - DNA, 372 bp, Mycoplasma penetrans
  CDS (1)..(372): transl_table=4
atggcaaagaaaagaaaaaagaaattaagctctcctgaaggaatttctcacattcatgcatctgctaacaatactattgttactttaactaacactggtggggatgctattacttgatcaagttctggatcaattggttataaaggttcaaaaaaatctacaccatatgcagctggtatagcagcagaaactgcagctaaagttgcaattgatttaggattaaaaaaagtaattgtaaaagtgaatgggactggtagtggtaaagatactgcaattagaagtttacatgcagctggattagaaatatctgaaattcacgatgttactccaattccacacaatggatgtagaccgcctaagaaaccaagataa

SEQ ID NO: 716 - protein, 123 aa, Mycoplasma penetrans
MAKKRKKKLSSPEGISHIHASANNTIVTLTNTGGDAITWSSSGSIGYKGSKKSTPYAAGIAAETAAKVAIDLGLKKVIVKVNGTGSGKDTAIRSLHAAGLEISEIHDVTPIPHNGCRPPKKPR

SEQ ID NO: 717 - DNA, 366 bp, Mycoplasma pneumoniae
  CDS (1)..(366): transl_table=4
atggctaagaagaaaaagattaatgtatctagtggaattatccacgtatcctgttccccaaataacacaattgtatccgctagtgatccggggggcaacgtgttgtgctgagctagcagtggtaccatgggctttaagggatcgcgcaaaaagaccccgtactcagccggcatagcagccgataaggtggccaaaaccgtcaaggaaatggggatggcgaccgttaagctctttgtcaagggtacaggtcggggtaaggataccgccattcgcagctttgctaatgcgggactttctattactgaaattaacgaaaagaccccgattccccacaacggttgcaaaccaccaaaacgaccacgctaa

SEQ ID NO: 718 - protein, 121 aa, Mycoplasma pneumoniae
MAKKKKINVSSGIIHVSCSPNNTIVSASDPGGNVLCWASSGTMGFKGSRKKTPYSAGIAADKVAKTVKEMGMATVKLFVKGTGRGKDTAIRSFANAGLSITEINEKTPIPHNGCKPPKRPR

SEQ ID NO: 719 - DNA, 411 bp, Mycoplasma pulmonis
  CDS (1)..(411): transl_table=4
atggcacaaagaagatcaagccaaacaactaaaaaagttaaacgtaaaaacgttactaatggtgttgcccatattcactcaactcataacaatacaatagttactttctcagatgaaaaaggaaatgttatttcatgagcttcttctggaacaattggttacaaaggaactaagaaaaaaacagcctatgcagctggacttgcagctcaaaatgctagcgaaaaagctaaagaacatggaattagagaagttagcgttagagtaaaaggaattggtcaaggaagagatgccgctagaaaacaaattgaagtttcagggatatcagtgagtcaaattgttgatgtaactcctcaagctcacaatggtactcgtcctccaaaaagagttttaaaacgagagaaagcaaggtaa

SEQ ID NO: 720 - protein, 136 aa, Mycoplasma pulmonis
MAQRRSSQTTKKVKRKNVTNGVAHIHSTHNNTIVTFSDEKGNVISWASSGTIGYKGTKKKTAYAAGLAAQNASEKAKEHGIREVSVRVKGIGQGRDAARKQIEVSGISVSQIVDVTPQAHNGTRPPKRVLKREKAR

SEQ ID NO: 721 - DNA, 417 bp, Mycobacterium smegmatis
  CDS (1)..(417): transl_table=11
atggcacaggcaaagaagggcggcacggccgccaagaagggtcagaagacccgccgcagggaaaagaagaacgtcccgcacggcgccgctcacatcaagagcacgttcaacaacacgatcgtgtcgatcaccgatccccagggcaacgtcatcgcctgggcgtcctcgggtcacgtgggcttcaagggctcgcgtaagtccaccccgttcgccgcgcagctggccgccgagaacgctgcccgcaaggcgcaggagcacggtgtgaagaaggtcgacgtgttcgtcaagggcccgggttcgggccgtgagaccgccatccgctcgctgcaggccgcaggcctcgaggtgggcacgatctccgatgtcaccccgcagccgcacaacggttgccgtccgccgaagcggcgccgggtctaa

SEQ ID NO: 722 - protein, 138 aa, Mycobacterium smegmatis
MAQAKKGGTAAKKGQKTRRREKKNVPHGAAHIKSTFNNTIVSITDPQGNVIAWASSGHVGFKGSRKSTPFAAQLAAENAARKAQEHGVKKVDVFVKGPGSGRETAIRSLQAAGLEVGTISDVTPQPHNGCRPPKRRRV

SEQ ID NO: 723 - DNA, 417 bp, Mycobacterium sp
  CDS (1)..(417): transl_table=11
atgccaccgaagaaagcagccgcttcctccgcgaagaaggggcagaagacccgccgcagggaaaagaagaacgtcccgcacggcgccgcacacatcaagagcaccttcaacaacacgatcgtgtcgatcaccgatccccagggcaacgtcatcgcctgggcgtcgtcgggacacgtcgggttcaagggctcgcgtaagtcgaccccgttcgccgcgcagctggcggcggagaacgccgcccgcaaggcgcaggagcacggcgtcaagaaggtcgacgtcttcgtgaagggccccggttcgggccgtgagaccgccatccgctcgctgcaggccgccggcctcgaggtcggcgcgatcgccgatgtcacgccgcagccgcacaacgggtgccgtccgcccaagcggcgccgggtctaa

SEQ ID NO: 724 - protein, 138 aa, Mycobacterium sp
MPPKKAAASSAKKGQKTRRREKKNVPHGAAHIKSTFNNTIVSITDPQGNVIAWASSGHVGFKGSRKSTPFAAQLAAENAARKAQEHGVKKVDVFVKGPGSGRETAIRSLQAAGLEVGAIADVTPQPHNGCRPPKRRRV

SEQ ID NO: 725 - DNA, 420 bp, Mycobacterium tuberculosis
  CDS (1)..(420): transl_table=11
atgccaccagcaaaaaaagggccggcaacgtcggctaggaagggccagaagacccgccggcgggagaagaagaacgtcccgcacggcgccgcccacatcaagagcacgttcaacaacacgatcgtgaccatcaccgacccgcaaggcaacgtcattgcctgggcatcgtcggggcacgtcggcttcaagggttcccggaaatcgaccccgtttgcggcccagctggccgcggagaacgccgctcgcaaggcccaagaccacggggtgcgcaaggtcgacgtgttcgtcaagggcccgggctcgggccgcgagaccgcgatccggtcgctgcaggccgccggcctggaggtgggcgcgatctcggatgtcaccccccagccgcataacggtgtccggccccccaagcgccggcgcgtctag

SEQ ID NO: 726 - protein, 139 aa, Mycobacterium tuberculosis
MPPAKKGPATSARKGQKTRRREKKNVPHGAAHIKSTFNNTIVTITDPQGNVIAWASSGHVGFKGSRKSTPFAAQLAAENAARKAQDHGVRKVDVFVKGPGSGRETAIRSLQAAGLEVGAISDVTPQPHNGVRPPKRRRV

SEQ ID NO: 727 - DNA, 441 bp, Myxococcus xanthus
  CDS (1)..(441): transl_table=11
atggctgacgagatcaatacttcggctgcggcgtccacgggcgccgagggcgaggcccctgccgcgaagaagtcgaagcgcaagggcaagaagaacatcctcaacggcgtggtccacatccagtccacgttcaacaacaccatcatcacgatcacggacgtgtccgggaacgtgatctcctggtcgtccgccggggcgcgtggcttcaagggaagccgcaagtccaccccgttcgcggcgcaggtggccgctggcgacgccgcggcgaaggcgatggagcacggcctgaagaacgtgtccgtgttcgtgaagggcccaggcgcgggccgcgagtcggcgctgcgcgcgctggccgccgccggtctgaagatcaacctcatccgcgacgtgacgcccatcccgcacaacggatgccgtcagcccaagcgtcgccgcgtctaa

SEQ ID NO: 728 - protein, 146 aa, Myxococcus xanthus
MADEINTSAAASTGAEGEAPAAKKSKRKGKKNILNGVVHIQSTFNNTIITITDVSGNVISWSSAGARGFKGSRKSTPFAAQVAAGDAAAKAMEHGLKNVSVFVKGPGAGRESALRALAAAGLKINLIRDVTPIPHNGCRQPKRRRV

SEQ ID NO: 729 - DNA, 393 bp, Nanoarchaeum equitans
  CDS (1)..(393): transl_table=11
atggcaaaagagcgatggggagtagcacatatatattcctctgagaataacacaataattcatataaccgatataactggggcagagactattgctgttggctctggaggtatggttgtaaatgccgatagattagaaggttcccctactgcagctatactagcagcaaaaagagcagcagcattagcaaaagaaagaggtattaccggtttacatataaaggttagagccccaggtgggcataatggtccttggattcctggaccaggggcaagtgcagcaataaagacattagcaagagaaggattgaaaatagggattatagaggatgttacaccaactccccacgatggttgtagaagaaaaggcggtaaaagaggaagaagggtatag

SEQ ID NO: 730 - protein, 130 aa, Nanoarchaeum equitans
MAKERWGVAHIYSSENNTIIHITDITGAETIAVGSGGMVVNADRLEGSPTAAILAAKRAAALAKERGITGLHIKVRAPGGHNGPWIPGPGASAAIKTLAREGLKIGIIEDVTPTPHDGCRRKGGKRGRRV

SEQ ID NO: 731 - DNA, 396 bp, Neisseria gonorrhoeae
  CDS (1)..(396): transl_table=11
atggctaaagcaaacacagcttcacgtgtacgtaaaaaagtacgtaaaaccgtgagtgagggtattgtgcacgttcatgcatctttcaacaataccatcattacaatcactgaccgtcaaggcaatgcgttgtcttgggctacctctggcggcgctggttttaaaggttctcgtaaaagtacaccatttgcagcacaagttgcagcagaagcagctggtaaagttgcccaagagtatggcgttaaaaatttagaggttcgtattaaaggtccaggtccaggtcgcgaatcctctgtacgtgctttgaatgctcttggtttcaagattaccagcattactgacgttaccccgttgcctcataacggttgccgtccgcctaaaaaacgtcgtatttaa

SEQ ID NO: 732 - protein, 131 aa, Neisseria gonorrhoeae
MAKANTASRVRKKVRKTVSEGIVHVHASFNNTIITITDRQGNALSWATSGGAGFKGSRKSTPFAAQVAAEAAGKVAQEYGVKNLEVRIKGPGPGRESSVRALNALGFKITSITDVTPLPHNGCRPPKKRRI

SEQ ID NO: 733 - DNA, 363 bp, Neorickettsia sennetsu
  CDS (1)..(363): transl_table=11
atgagagaaaagaagagtatcgtttcgggtaatgcgcacgttattgtgacgtttaataatgtctatatcagtgtcaccgatcatcagggaaatgtgcaaggttgggccagttctggctcggttggctttaagggtaataagaagtccactgcgtatgctgcgcagtctgttgcaacgaccttaatgaccaagctgaagcgcattgggttaaagatccttaatgttcatttgagtggttccaatccaattagggaagctgcgctgcgtgcgattcgcaattcgggcatcgtaatcatctcccttcaggacatgacgcctgttccacataatggagtaaggttgagaagaaggcgtagggtctag

SEQ ID NO: 734 - protein, 120 aa, Neorickettsia sennetsu
MREKKSIVSGNAHVIVTFNNVYISVTDHQGNVQGWASSGSVGFKGNKKSTAYAAQSVATTLMTKLKRIGLKILNVHLSGSNPIREAALRAIRNSGIVIISLQDMTPVPHNGVRLRRRRRV

SEQ ID NO: 735 - DNA, 390 bp, Nitrosomonas europaea
  CDS (1)..(390): transl_table=11
atggtaaagccttcattaaaaattcgtaaaaaagttaaaaaaaatgttgttgagggggtggcgcatattcacgcctccttcaataacacaatcgtgactatttctgatcgtcaagggaatgctctttcttgggcaacatcgggcggggtgggatttaagggttcgcgtaaaagcaccccatttgcagcacaagttgctgcagaacatgcaggcagggcagcgctggaatacggcgttaaaaatttggaggtaagagtaaaagggcccgggccgggtcgtgactctgctgtacgagctctcaacgctacaggttttaaaattaccagcataaccgatgtgacacccatacctcacaatggatgtaggccgcctaagaaacgtcgtatctaa

SEQ ID NO: 736 - protein, 129 aa, Nitrosomonas europaea
MVKPSLKIRKKVKKNVVEGVAHIHASFNNTIVTISDRQGNALSWATSGGVGFKGSRKSTPFAAQVAAEHAGRAALEYGVKNLEVRVKGPGPGRDSAVRALNATGFKITSITDVTPIPHNGCRPPKKRRI

SEQ ID NO: 737 - DNA, 414 bp, Nocardia farcinica
  CDS (1)..(414): transl_table=11
atgcctccgaagagtcgggcctccggccccaagaagacccagaagtcgcggcgccgggacaagaagaacgttccgcacggcaacgcgcacatcaagagcacgttcaacaacacgatcgtgtccatcaccgacccgaacggcaacgtcatctcctgggcgtcctcgggtcacgtcggcttcaagggttcgcgcaagtcgaccccgttcgccgcccagctggccgccgagaacgcggcccgcaaggcgcaggagcacggcgtcaagaaggtcgacgtgttcgtcaagggcccgggttcgggccgcgagaccgcgatccgctcgctgcaggccgccggcctggaagtgggcacgatctccgatgtcaccccgcagccgcacaacggctgccgtccgcccaagcggcgtcgcgtctag

SEQ ID NO: 738 - protein, 137 aa, Nocardia farcinica
MPPKSRASGPKKTQKSRRRDKKNVPHGNAHIKSTFNNTIVSITDPNGNVISWASSGHVGFKGSRKSTPFAAQLAAENAARKAQEHGVKKVDVFVKGPGSGRETAIRSLQAAGLEVGTISDVTPQPHNGCRPPKRRRV

SEQ ID NO: 739 - DNA, 408 bp, Nocardioides sp
  CDS (1)..(408): transl_table=11
atgcctcccaagagccgcactgcggccggcgccaagaaggtgcgccgcaaggagaagaagaacgtcgcgatgggcgaggcccacatcaagagcacgttcaacaacaccatcgtcacgatcaccgaccccaccggtgcggtgatctcgtgggcctcggccggcaccgtcggcttcaagggctcccgcaagtccaccccgttcgccgcgcagatggcagccgaggctgccggtcgtcgggcgatggagcacggcatgaagaagatcgacgtcttcgtgaagggcccgggctcgggccgcgagacggcgatccgttccctgggtgcgatcggcctcgaggtcggcaccatccaggacgtcacgccgacgccccacaacggatgccgcccgcccaagcgccggcgcgtctga

SEQ ID NO: 740 - protein, 135 aa, Nocardioides sp
MPPKSRTAAGAKKVRRKEKKNVAMGEAHIKSTFNNTIVTITDPTGAVISWASAGTVGFKGSRKSTPFAAQMAAEAAGRRAMEHGMKKIDVFVKGPGSGRETAIRSLGAIGLEVGTIQDVTPTPHNGCRPPKRRRV

SEQ ID NO: 741 - DNA, 390 bp, Novosphingobium aromaticivorans
  CDS (1)..(390): transl_table=11
atggcacgcgaaccccagcgcatcaagcgccgcgagcgcaagaacatcaccagcggcattgcgcacgtcaacgccagcttcaacaacacgatggtcaccatcaccgatgcccagggcaacgccatttcgtggtcgtcggccggcatgatgggcttcaagggcagccgcaagtcgacgccgtacgccgcgcaggtcgctgctgacgatgccggcaagaaggctgccgagcacggcgtccgtaccctcgaagtcgaggtcaagggccccggttcgggccgtgaaagcgcgctgcgcgcccttcaggcggtcggtttcaccatcacggccatccgtgacgtgaccccgatcccgcacaacggcgttcgtccgtcgaagcgtcgtcgcgtctga

SEQ ID NO: 742 - protein, 129 aa, Novosphingobium aromaticivorans
MAREPQRIKRRERKNITSGIAHVNASFNNTMVTITDAQGNAISWSSAGMMGFKGSRKSTPYAAQVAADDAGKKAAEHGVRTLEVEVKGPGSGRESALRALQAVGFTITAIRDVTPIPHNGVRPSKRRRV

SEQ ID NO: 743 - DNA, 390 bp, Oceanobacillus iheyensis
  CDS (1)..(390): transl_table=11
atggcacgtaaaacgaatacacgtaaacgtcgtgtgaaaaagaatatagaatctggtattgctcatatccgttctacttttaacaatactattgttacaattacggatactcgcggtaatgctattggatggagttcagctggtgcattaggctttaaaggttctaagaaatcaactcctttcgcagctcaaatggcagctgaaacagcagctaagtctgctatcgaaaatggaatgaaaactttagaagtaactgttaaaggccctggtgcgggacgtgaagctgcaatccgttctttacaggctgctggtctagaagttacagctattgtagatgtaactccagtacctcataatggttgccgtccaccaaaacgtcgtcgtgtttaa

SEQ ID NO: 744 - protein, 129 aa, Oceanobacillus iheyensis
MARKTNTRKRRVKKNIESGIAHIRSTFNNTIVTITDTRGNAIGWSSAGALGFKGSKKSTPFAAQMAAETAAKSAIENGMKTLEVTVKGPGAGREAAIRSLQAAGLEVTAIVDVTPVPHNGCRPPKRRRV

SEQ ID NO: 745 - DNA, 399 bp, Oenococcus oeni
  CDS (1)..(399): transl_table=11
atggcaagtcgtacaagtcgcacaagtggtcataagcgtcgcgctaaaaagaatattgaaaaaggcgttgcccatattcattcaacttttaataacacgattgttttgatcactgatgaagcaggaaacgcagtttcttggtcatcagctggttcattaggttttaagggttctcgtaagtctactccttttgctgctcaacttgctggtgaagctgctgccaaagcagcaatggaacaaaatatgcatagtgttgcaatcagtgttaaaggaccaggtcctggacgcgaatctgcaattcgtgctgttgccgctgctggtttagaaattactgcaattagcgacgtcactcccgttcctcataacggttctcgtccaccgaagcagcgtcgggcataa

SEQ ID NO: 746 - protein, 132 aa, Oenococcus oeni
MASRTSRTSGHKRRAKKNIEKGVAHIHSTFNNTIVLITDEAGNAVSWSSAGSLGFKGSRKSTPFAAQLAGEAAAKAAMEQNMHSVAISVKGPGPGRESAIRAVAAAGLEITAISDVTPVPHNGSRPPKQRRA

SEQ ID NO: 747 - DNA, 387 bp, Onion yellows phytoplasma
  CDS (1)..(387): transl_table=11
ttggcaagaaaaaaaactaccaaacgcaaagttaaaaaaaatgttcctttaggaattgcacatattcataccacttttaacaacactatcgttactatcactgatcttaacggtaatgctgttacttggagtagtgcaggtgctttgggttttaaaggaagtcgtaaatcaactccctttgcagcacaattagccgctgaagcagttgccaaagcagcgatggaacacggaatggttaaagtagaaactttcattacaggaccaggtcccggaagagaagcagctatccgttctttgcaagcagcaggattagaaattactgctattaaagatgttactgcagtaccacataatggttgtcgaccgccaaaacctcctagaggataa

SEQ ID NO: 748 - protein, 128 aa, Onion yellows phytoplasma
MARKKTTKRKVKKNVPLGIAHIHTTFNNTIVTITDLNGNAVTWSSAGALGFKGSRKSTPFAAQLAAEAVAKAAMEHGMVKVETFITGPGPGREAAIRSLQAAGLEITAIKDVTAVPHNGCRPPKPPRG

SEQ ID NO: 749 - DNA, 408 bp, Protochlamydia amoebophila
  CDS (1)..(408): transl_table=11
ttgagtaagcaacctgccactaataaaaaacctgtaaaggctaagaaaaaagcttttcaaaatgttccatcaggaatcgcgcatgttaaagctacctttaacaataccattattgcgattactgatccatcaggtcgagtgatttcttgggcatctgccggaaaagttaacttttcaggttctcgtaaatcttcagcttttgcagccacagtagctgctcaagatgctgctaaaacagcttcttctctcggtatgaaagaagttgaagtaaatttgaaaggacctggagcgggtcgagagtctgctgtgcgaggattacaaagcgcgggcttaacaattactgcaattagagatacaacgcctgtacctcataatggatgccgtccgcgtaaacgtcgtcgtgtataa

SEQ ID NO: 750 - protein, 135 aa, Protochlamydia amoebophila
MSKQPATNKKPVKAKKKAFQNVPSGIAHVKATFNNTIIAITDPSGRVISWASAGKVNFSGSRKSSAFAATVAAQDAAKTASSLGMKEVEVNLKGPGAGRESAVRGLQSAGLTITAIRDTTPVPHNGCRPRKRRRV

SEQ ID NO: 751 - DNA, 390 bp, Pasteurella multocida
  CDS (1)..(390): transl_table=11
atggctaaaacaccagttcgtgcacgtaaacgtgtaaaaaaacaagttgtagatggcgtagcacatatccacgcatctttcaataatacaatcgttactattactgaccgccaaggcaatgctctcgcgtgggcaacagcaggtggttcaggtttccgtggttctcgtaaatctaccccgtttgcggcgcaggttgctgctgaacgttgtgctgaagttgtcaaagaattcggcttaaagaacttggaagttatggtgaaaggacctggtcctggtcgtgagtctactattcgtgcgttaaacgcagcgggtttccgtattacgaatattactgatgtgactccgattcctcataacggttgtcgtccaccgaaaaaacgtcgtgtttaa

SEQ ID NO: 752 - protein, 129 aa, Pasteurella multocida
MAKTPVRARKRVKKQVVDGVAHIHASFNNTIVTITDRQGNALAWATAGGSGFRGSRKSTPFAAQVAAERCAEVVKEFGLKNLEVMVKGPGPGRESTIRALNAAGFRITNITDVTPIPHNGCRPPKKRRV

SEQ ID NO: 753 - DNA, 390 bp, Pediococcus pentosaceus
  CDS (1)..(390): transl_table=11
atggcaacgaaaaagaatactcgcaaacgtcgagtaaaaaagaatattgaatctggagtagcacatatccattcaacattcaacaatactcttgttatgattacagatccccaaggtaacgcagttgcttggtcatctgctggtgctcttggatttaagggtagtcgtaagtctacaccttttgccgcacaaatggcatcagaagctgctgctaaagcagctatggaacatggtatgaagaatgttgaagttgctgttaagggacctggttcaggtcgtgaagctgctattcgtgcactacaagctactgggcttgaagtaagtgcaattcgtgatgttacaccagttcctcataatggatctcgtcctccaaagcgccgtcgtgtatag

SEQ ID NO: 754 - protein, 129 aa, Pediococcus pentosaceus
MATKKNTRKRRVKKNIESGVAHIHSTFNNTLVMITDPQGNAVAWSSAGALGFKGSRKSTPFAAQMASEAAAKAAMEHGMKNVEVAVKGPGSGREAAIRALQATGLEVSAIRDVTPVPHNGSRPPKRRRV

SEQ ID NO: 755 - DNA, 390 bp, Photobacterium profundum
  CDS (1)..(390): transl_table=11
atggcaaagcaaccaactcgcgctcgtaagcgcgttcgcaagcaagtagctgatggcgtagcgcacatccatgcttcttttaacaacacaatcgtaaccattacagaccgtcaaggtaatgctctttcatgggcaactgcaggtggttcaggtttccgtggttctcgtaaatctactccgttcgctgcacaggttgctgctgaacgttgtggtgaaatggccaaagaatatggcgttaagaacctggaagttatggttaagggacctggtcctggtcgtgagtctacaatccgtgcattaaatgcagcgggtttccgtatcactaacattgttgatgcgactccgattcctcataacggttgtcgtccacctaagaaacgtcgcgtataa

SEQ ID NO: 756 - protein, 129 aa, Photobacterium profundum
MAKQPTRARKRVRKQVADGVAHIHASFNNTIVTITDRQGNALSWATAGGSGFRGSRKSTPFAAQVAAERCGEMAKEYGVKNLEVMVKGPGPGRESTIRALNAAGFRITNIVDATPIPHNGCRPPKKRRV

SEQ ID NO: 757 - DNA, 384 bp, Picrophilus torridus
  CDS (1)..(384): transl_table=11
atgaataagacaggaatagcacatatatatgcatcacagaacaacacaataatacttgtaacagatccaacaggcgccgaaacgatagcaaaatcaagcggcggcatggttgtcaaaaacgacagggatgaggcaagcccttacgctgccatgagggcggcagacatggtctctgaaaagctcagggagagggaaataacagatcttataataagggtccgtgcaccaggaggaagcaaatcgaagataccaggcccaggagcacagtcagcaataagggcgctctcaagggcaggttttaaaatattaagaatagaggaggtaacaccaataccccatgatggcactaaaaagaaaggtggcagaaggggaaggagagtttaa

SEQ ID NO: 758 - protein, 127 aa, Picrophilus torridus
MNKTGIAHIYASQNNTIILVTDPTGAETIAKSSGGMVVKNDRDEASPYAAMRAADMVSEKLREREITDLIIRVRAPGGSKSKIPGPGAQSAIRALSRAGFKILRIEEVTPIPHDGTKKKGGRRGRRV

SEQ ID NO: 759 - DNA, 387 bp, Porphyromonas gingivalis
  CDS (1)..(387): transl_table=11
atggcaaagaaagcagtcgcaaaaaagaaagttgtaagggtggaagcagtgggacaggctcatattcattcttcctttaacaacattattatttccttagcgaacagcgaaggtcaggttatcagctggtcttcagccggtaaaatgggatttcgttcttcaaagaagaatactccctatgctgcccagatggcagctcaggattgtgccaaagtggcatatgatatgggcttgcgcaaggtaacggtctacgttaagggcccgggtaatggtcgtgaatcggctattagaacaattcatggagcgggaatcgaggttatggagattattgatgtaacgcctatgcctcataacggttgtcgtcctcctaaaaagagaagagtttaa

SEQ ID NO: 760 - protein, 128 aa, Porphyromonas gingivalis
MAKKAVAKKKVVRVEAVGQAHIHSSFNNIIISLANSEGQVISWSSAGKMGFRSSKKNTPYAAQMAAQDCAKVAYDMGLRKVTVYVKGPGNGRESAIRTIHGAGIEVMEIIDVTPMPHNGCRPPKKRRV

SEQ ID NO: 761 - DNA, 408 bp, Propionibacterium acnes
  CDS (1)..(408): transl_table=11
atggctactgcaggccacaagggtgcacccaagaccaaggtgcgccgcaaggagaagaagaacgtcgtcgccggtcaggcgcacatcaagagcacgttcaacaacaccatcatcgctattactgacccctcgggtgcagtgatctcgtgggcctctgccggcactgtcggcttcaagggctcccgtaagtccaccccgttcgccgctcagatggccgctgaggctgctggacgtcgtgccatggagcatggcatgaagcgcgttgacgtcttcgttaagggtcccggctccggtcgtgagaccgccatccgttccctgggggctgtcggtttggagatcggcccgatctccgacgtcacccctgttccgcacaacggatgccgcccgccgaagcgccgccgcgtctga

SEQ ID NO: 762 - protein, 135 aa, Propionibacterium acnes
MATAGHKGAPKTKVRRKEKKNVVAGQAHIKSTFNNTIIAITDPSGAVISWASAGTVGFKGSRKSTPFAAQMAAEAAGRRAMEHGMKRVDVFVKGPGSGRETAIRSLGAVGLEIGPISDVTPVPHNGCRPPKRRRV

SEQ ID NO: 763 - DNA, 393 bp, Prochlorococcus marinus
  CDS (1)..(393): transl_table=11
atgccagctacagtaaaaaaaacaggttcaaagaaatctaaacgtaatgtaccaaatggtgtggtacacatccaaagcacatttaataatactatcgtctcaattactgacacctctggtcatgtaatttcttggtcttctgcaggcgcaagtggatttaaaggcgctaggaaagggacgccgtttgctgctcaaacagctgccgaagctgcagctagaagagcacttgatcaaggtatgagacaaatagaagtactagttagagggccgggcgcaggtagggaaacggccataagagctttacaagtggccggattagaaataactctaataagagatgtaactccattacctcataatggatgtagaagacctaaacggagacgcgtttag

SEQ ID NO: 764 - protein, 130 aa, Prochlorococcus marinus
MPATVKKTGSKKSKRNVPNGVVHIQSTFNNTIVSITDTSGHVISWSSAGASGFKGARKGTPFAAQTAAEAAARRALDQGMRQIEVLVRGPGAGRETAIRALQVAGLEITLIRDVTPLPHNGCRRPKRRRV

SEQ ID NO: 765 - DNA, 393 bp, Prochlorococcus marinus
  CDS (1)..(393): transl_table=11
atggctacaacctcaaagaaaaccggttctaagaagtcaaagcgcaacgttccaaatggagttgtgcatattcaaagtaccttcaacaacaccattgtttcaattaccgatacctctggtgaagtcatttcctggtcatcagcaggagcaagcggttttaaaggagctcgaaagggtactccttttgctgctcagaccgcggctgaacttgcggcccgaagggccctagagcaaggaatgcgtcaaatagaagttcttgtaagaggaccaggctcaggtcgtgaaaccgcaataagagcgttgcaagtagctggtcttgaaattactttgatcagagatgtaactcctcttcctcataacggttgcaggagacctaaacgcagacgcgtttaa

SEQ ID NO: 766 - protein, 130 aa, Prochlorococcus marinus
MATTSKKTGSKKSKRNVPNGVVHIQSTFNNTIVSITDTSGEVISWSSAGASGFKGARKGTPFAAQTAAELAARRALEQGMRQIEVLVRGPGSGRETAIRALQVAGLEITLIRDVTPLPHNGCRRPKRRRV

SEQ ID NO: 767 - DNA, 393 bp, Prochlorococcus marinus
  CDS (1)..(393): transl_table=11
atggccaaacccaccaaaaagacaggttccaagaagaccaagcgcaacgtccccaatggggttgcgcatattcagagcaccttcaacaacacaatcgtctcaatcaccgatacagctggggaagttatcgcctggtcatctgctggagccagtggcttcaagggtgctcgtaaaggcacacccttcgctgctcaaactgcagctgaagctgcagcccgtagagctctcgagcagggcatgcgtcagatcgaggtactggtccgtggtcccggctctggccgtgaaaccgccatccgcgccctgcaggtggcaggcctcgaaatcactcttattagagacgtcaccccactcccccataacggttgccgtcggcccaaacgccggcgcgtctga

SEQ ID NO: 768 - protein, 130 aa, Prochlorococcus marinus
MAKPTKKTGSKKTKRNVPNGVAHIQSTFNNTIVSITDTAGEVIAWSSAGASGFKGARKGTPFAAQTAAEAAARRALEQGMRQIEVLVRGPGSGRETAIRALQVAGLEITLIRDVTPLPHNGCRRPKRRRV

SEQ ID NO: 769 - DNA, 393 bp, Prochlorococcus marinus
  CDS (1)..(393): transl_table=11
atggcagctccagtaaaaaaaacagggtcaaagaaatcaaagaaaaatgtaccaaatggtgtagtacatattcaaagtacctttaataacactatcgtatctattagtgatacttcaggtcatgtaatttcttggtcttctgcaggagcaagtggatttaaaggcgccagaaaaggtaccccattcgctgctcaaacagctgctgaggcagcagctaaaagagctctggatcaagggatgagacaaatagaagtattagttagaggccctggctcaggtagggaaaccgccataagagctttacaagtggccggtttagaaataactctaataagagatgtaactccattacctcataatggatgtagaagacctaaacgtagacgcgtttag

SEQ ID NO: 770 - protein, 130 aa, Prochlorococcus marinus
MAAPVKKTGSKKSKKNVPNGVVHIQSTFNNTIVSISDTSGHVISWSSAGASGFKGARKGTPFAAQTAAEAAAKRALDQGMRQIEVLVRGPGSGRETAIRALQVAGLEITLIRDVTPLPHNGCRRPKRRRV

SEQ ID NO: 771 - DNA, 393 bp, Prochlorococcus marinus
  CDS (1)..(393): transl_table=11
atggcagctacagtaaaaaaaacaggttcaaagaaatccaaacgtaatgtacctaatggtgtggtacatattcaaagcacatttaacaacacaatcgtttctatcactgatacttctggtcatgtaatttcttggtcttctgcaggtgccagtggattcaagggcgcccgtaaaggtacgccatttgccgctcaaacagccgctgaagcagcagctaggagagcacttgatcaaggtatgagacaaatagaagtattagttagagggccaggctcaggtagggaaacggccataagagctttacaagtggccggtttagaaataactctaataagagatgtaactccattacctcataatggatgtagaagacctaaacggagacgcgtttag

SEQ ID NO: 772 - protein, 130 aa, Prochlorococcus marinus
MAATVKKTGSKKSKRNVPNGVVHIQSTFNNTIVSITDTSGHVISWSSAGASGFKGARKGTPFAAQTAAEAAARRALDQGMRQIEVLVRGPGSGRETAIRALQVAGLEITLIRDVTPLPHNGCRRPKRRRV

SEQ ID NO: 773 - DNA, 393 bp, Prochlorococcus marinus
  CDS (1)..(393): transl_table=11
atggccacaccagcaaagaaaacaggttcaaagaagtctaagcgcaacgtcccaaacggtgttgtgcacattcaaagcaccttcaataacacaattgtttctataactgatacaaatggagaagttatctcttggtcatcagcaggtgcaagtggctttaaaggagctagaaaaggtacaccatttgcggcgcaaactgcagctgaagctgcagctaggcgagcacttgatcaaggcatgcgtcagatcgaggttctcgtaagaggacccggttctggtcgtgaaacagctattcgtgcactacaagtggctggtcttgagatcacattgattagagatgtgacacctctccctcacaatggttgtagaagggcaaaacgcaggcgcgtttaa

SEQ ID NO: 774 - protein, 130 aa, Prochlorococcus marinus
MATPAKKTGSKKSKRNVPNGVVHIQSTFNNTIVSITDTNGEVISWSSAGASGFKGARKGTPFAAQTAAEAAARRALDQGMRQIEVLVRGPGSGRETAIRALQVAGLEITLIRDVTPLPHNGCRRAKRRRV

SEQ ID NO: 775 - DNA, 393 bp, Prochlorococcus marinus
  CDS (1)..(393): transl_table=11
atggccaaacccaccaaaaaaacaggttccaaaaagaccaagcgcaacgtccccaatggcgttgcacatattcagagcaccttcaacaacacgatcgtctcaatcgccgatacagctggggaagttattgcctggtcatctgctggagccagtggcttcaagggtgctcgtaagggcaccccctttgccgctcaaactgcagctgaagctgcagcgcgtagggcactcgaacagggcatgcgtcagatcgaggtactagtccgtggacccggctccggccgtgaaacagccatccgcgccctgcaggtggcaggcctcgaaatcactcttattagagacgtcaccccactcccccataacggttgccgtcggcccaaacgccggcgcgtctga

SEQ ID NO: 776 - protein, 130 aa, Prochlorococcus marinus
MAKPTKKTGSKKTKRNVPNGVAHIQSTFNNTIVSIADTAGEVIAWSSAGASGFKGARKGTPFAAQTAAEAAARRALEQGMRQIEVLVRGPGSGRETAIRALQVAGLEITLIRDVTPLPHNGCRRPKRRRV

SEQ ID NO: 777 - DNA, 393 bp, Prochlorococcus marinus subsp
  CDS (1)..(393): transl_table=11
atggcagctccagtaaaaaaaacaggttcaaagaaatcaaagaaaaatgtaccaaatggcgtagtacatattcaaagtacctttaataacactatcgtatctatcactgatacttcgggccatgtaatttcttggtcttctgcaggagcaagtggattcaaaggtgctcgaaaagggactccatttgctgctcaaacagctgccgaagccgcggctaaaagagctcttgatcaaggcatgagacaaataaaagtattagttagaggccctggctcaggtagggaaaccgccataagagctttacaagtggccggtttagaaataactctaataagagatgtaactccattacctcataatggatgcagaagacctaaacgtagacgcgtttag

SEQ ID NO: 778 - protein, 130 aa, Prochlorococcus marinus subsp
MAAPVKKTGSKKSKKNVPNGVVHIQSTFNNTIVSITDTSGHVISWSSAGASGFKGARKGTPFAAQTAAEAAAKRALDQGMRQIKVLVRGPGSGRETAIRALQVAGLEITLIRDVTPLPHNGCRRPKRRRV

SEQ ID NO: 779 - DNA, 393 bp, Prochlorococcus marinus
  CDS (1)..(393): transl_table=11
atggcagctacagtaaaaaaaacaggttcaaagaaatctaaacgaaatgtacctaatggtgtggtacatatccaaagcacatttaataatactatcgtctcaattactgacacctcaggtcatgtaatttcttggtcttctgctggcgcaagtggatttaaaggcgctcgcaaaggtacgccatttgccgctcaaacagctgctgaagctgcagctagaagagctcttgatcaaggtatgagacaaatagaagtactagttagagggcctggcgcaggtagggaaacggccataagagctttacaagtggccggattagaaataactctaataagagatgtaactccattacctcataatggatgtagaagacctaaacgcagacgcgtttag

SEQ ID NO: 780 - protein, 130 aa, Prochlorococcus marinus
MAATVKKTGSKKSKRNVPNGVVHIQSTFNNTIVSITDTSGHVISWSSAGASGFKGARKGTPFAAQTAAEAAARRALDQGMRQIEVLVRGPGAGRETAIRALQVAGLEITLIRDVTPLPHNGCRRPKRRRV

SEQ ID NO: 781 - DNA, 393 bp, Prochlorococcus marinus
  CDS (1)..(393): transl_table=11
atggctacaacctcaaagaaatccggttctaagaagtcaaagcgcaacgttcccaatggagttgtgcatattcaaagtaccttcaacaacaccattgtttctattaccgacacctctggtgaagtcatttcctggtcatcagcaggagcaagcggttttaaaggagctcgaaaaggtactccttttgctgctcagaccgcggctgaacttgcggcccgaagggccctagagcaaggaatgcgtcaaatagaagttcttgtaagaggaccaggctcaggtcgtgaaaccgcaataagagcgttgcaagtagctggtcttgaaattactttgatcagagatgtaactcctcttcctcataacggttgcaggagacctaaacgcagacgcgtttaa

SEQ ID NO: 782 - protein, 130 aa, Prochlorococcus marinus
MATTSKKSGSKKSKRNVPNGVVHIQSTFNNTIVSITDTSGEVISWSSAGASGFKGARKGTPFAAQTAAELAARRALEQGMRQIEVLVRGPGSGRETAIRALQVAGLEITLIRDVTPLPHNGCRRPKRRRV

SEQ ID NO: 783 - DNA, 390 bp, Pseudomonas syringae pv
  CDS (1)..(390): transl_table=11
atggcaaaacctgctgctcgtcctcgtaaaaaagttaaaaagacagtggttgatggcatcgcccacatccacgcgtcgtttaacaacacaatcgtcaccattaccgatcgtcaaggtaacgctctttcgtgggctacctccggcggttcgggtttccgtggttcgcgcaagtccaccccgttcgctgctcaagtagctgctgagcgtgctggtcaagctgcgctggagtacggtctgaagaacctcgacgtcaatgtcaagggtccaggcccaggtcgtgaatccgctgtccgtgcattgaacggctgtggctataagatcgccagcatcaccgacgtgacgccaatcccgcacaacgggtgccgtccgccgaagaagcgccgcgtgtaa

SEQ ID NO: 784 - protein, 129 aa, Pseudomonas syringae pv
MAKPAARPRKKVKKTVVDGIAHIHASFNNTIVTITDRQGNALSWATSGGSGFRGSRKSTPFAAQVAAERAGQAALEYGLKNLDVNVKGPGPGRESAVRALNGCGYKIASITDVTPIPHNGCRPPKKRRV

SEQ ID NO: 785 - DNA, 390 bp, Pseudomonas fluorescens
  CDS (1)..(390): transl_table=11
atggcaaaacctgctgctcgtcctcgtaaaaagattaaaaagacagtggttgatggcatcgcccacatccacgcgtctttcaacaacaccatcgtgaccatcaccgaccgtcaaggtaacgctctttcctgggcaacctccggtggttcgggtttccgcggttctcgcaagtccaccccgttcgctgctcaagtagctgctgagcgtgctggtcaagctgcgctggaatatggcctgaaaaacctcgacgtcaacgtcaagggtccaggtccaggtcgtgaatccgcagtccgcgctttgaacggctgtggctacaagatcgccagcatcaccgacgtgacgccaatcccgcacaacgggtgccgtccgccgaagaagcgccgcgtgtaa

SEQ ID NO: 786 - protein, 129 aa, Pseudomonas fluorescens
MAKPAARPRKKIKKTVVDGIAHIHASFNNTIVTITDRQGNALSWATSGGSGFRGSRKSTPFAAQVAAERAGQAALEYGLKNLDVNVKGPGPGRESAVRALNGCGYKIASITDVTPIPHNGCRPPKKRRV

SEQ ID NO: 787 - DNA, 414 bp, Pyrococcus abyssi
  CDS (1)..(414): transl_table=11
atgagcgaggagcaggtaaacataaagaagaaggagaagtggggtatagcccacatctactcaagctataacaacacgattatccacataacagacataacgggtgccgaaactataagcaggtggagcggtggtatggtagtcaaggccgatagggacgagccttcaccttacgccgcaatgctagccgcgaggagggctgccgaagaggcattagagaagggtatcgtcggagttcacataagagttagggcccctggtggaagtaaaagcaagactcctggcccaggagctcaagcggctataagagccctagcaagggcaggacttaagataggaagggttgaggatgtaacgcctattccacacgatggaacgaggccaaagggtggaaggagaggaaggcgtgtttga

SEQ ID NO: 788 - protein, 137 aa, Pyrococcus abyssi
MSEEQVNIKKKEKWGIAHIYSSYNNTIIHITDITGAETISRWSGGMVVKADRDEPSPYAAMLAARRAAEEALEKGIVGVHIRVRAPGGSKSKTPGPGAQAAIRALARAGLKIGRVEDVTPIPHDGTRPKGGRRGRRV

SEQ ID NO: 789 - DNA, 402 bp, Pyrobaculum aerophilum
  CDS (1)..(402): transl_table=11
atgtcctcagagcaacaaaaactgaggtggggaattgcgtggatatactcctcgtcaaacaacactataataacaattaccgacttaaccggggcggagacagtggcgcgcgtaagcggcggacaagtcgtgagggcagataaagacaagccatctccgtgggcagccatgcaggccgcgtataaagcggcgcaactggccctggccagggggataaacgcagtacatataaaagtcagggggccaggcggatatggtatgaaagtgcctggacccggcgcctcggccgctataagagcgctggcccggtcaggcctagtcatcggccgcatagaggacgtcacgccgattccgcacgacataatcaggccgcccagcgggcgcaagggcaggagagtctaa

SEQ ID NO: 790 - protein, 133 aa, Pyrobaculum aerophilum
MSSEQQKLRWGIAWIYSSSNNTIITITDLTGAETVARVSGGQVVRADKDKPSPWAAMQAAYKAAQLALARGINAVHIKVRGPGGYGMKVPGPGASAAIRALARSGLVIGRIEDVTPIPHDIIRPPSGRKGRRV

SEQ ID NO: 791 - DNA, 414 bp, Pyrococcus furiosus
  CDS (1)..(414): transl_table=11
atgagcgaggagcaagttaacattaagaagaaggagaagtggggaattgctcacatctattcaagcttcaacaacacgattattcatattactgacataacaggtgctgaaacaataagcagatggagcggtggtatggtagttaaagctgacagagatgagccttctccatacgctgcaatgcttgcggcaaggagagcagcagaagaggcccttgaaaagggaattgtaggcgttcacattagagttagagccccaggaggaagcaagagcaagactcctggacctggggcacaggcagcaattagagctttggctagagcaggcttgaaaataggtagagttgaggatgttactccaataccacacgatggtactaggccaaagggtggtagaagaggtaggcgtgtctga

SEQ ID NO: 792 - protein, 137 aa, Pyrococcus furiosus
MSEEQVNIKKKEKWGIAHIYSSFNNTIIHITDITGAETISRWSGGMVVKADRDEPSPYAAMLAARRAAEEALEKGIVGVHIRVRAPGGSKSKTPGPGAQAAIRALARAGLKIGRVEDVTPIPHDGTRPKGGRRGRRV

SEQ ID NO: 793 - DNA, 423 bp, Pyrococcus kodakaraensis
  CDS (1)..(423): transl_table=11
atgagcgaggagcagaccactcaggttaacataaagaagaaggagaagtggggtgtcgcccacatctactcctcatacaacaacaccatcatccacatcacggacctcaccggggccgagaccatctccaggtggagcggtggtatggtcgtcaaggccgacagggacgagccctcaccgtatgctgctatgatagccgcgagaagggccgccgaagaggctatggagaagggcatcaccggcgtccacatcaaggtccgcgcccctggaggaagcaagagcaagagcccgggaccaggtgctcaggcagccattagggccctctccagggccggccttaggattggaagggttgaggacgtcaccccgatcccgcacgacggtaccaggccgaagggcgggagaaggggcaggcgcgtctga

SEQ ID NO: 794 - protein, 140 aa, Pyrococcus kodakaraensis
MSEEQTTQVNIKKKEKWGVAHIYSSYNNTIIHITDLTGAETISRWSGGMVVKADRDEPSPYAAMIAARRAAEEAMEKGITGVHIKVRAPGGSKSKSPGPGAQAAIRALSRAGLRIGRVEDVTPIPHDGTRPKGGRRGRRV

SEQ ID NO: 795 - DNA, 402 bp, Ralstonia metallidurans
  CDS (1)..(402): transl_table=11
atggcaaaaggtccgaataacgccgcccagcgcgcgcgtaagaaggtcaagaagaacgttgccgacggcattgcgcacgtccacgcttcgttcaacaacaccatcatcaccatcaccgaccgccagggcaacgccctgtcgtgggcgaccgcaggtggccagggcttcaagggttcgcgtaagtcgaccccgttcgctgcccaggttgccgccgagaacgccggccgtgttgcgcaagaccagggtatcaagaatctggaagtgcgcatcaagggccccggtcccggccgtgagtcggctgtccgtgcgctgaacgcgctgggcatcaagatcgcggtgatcgaagatgtgacgccggtgccgcacaacggctgccgcccgccgaagcgccgccgtatctaa

SEQ ID NO: 796 - protein, 133 aa, Ralstonia metallidurans
MAKGPNNAAQRARKKVKKNVADGIAHVHASFNNTIITITDRQGNALSWATAGGQGFKGSRKSTPFAAQVAAENAGRVAQDQGIKNLEVRIKGPGPGRESAVRALNALGIKIAVIEDVTPVPHNGCRPPKRRRI

SEQ ID NO: 797 - DNA, 402 bp, Ralstonia solanacearum
  CDS (1)..(402): transl_table=11
atggcaaaagcagcgaataccgccgcccagcgcgcgcgcaagaaggttcgcaagaacgtcgccgacggcatcgcgcacgttcacgcgtcgttcaacaacacgatcatcaccatcaccgatcgccagggcaacgccctgtcgtgggcgacgtcgggcggccagggcttcaagggctcgcgcaagtcgacgccgttcgccgcgcaggttgcggccgagagcgccggccgtgtggctcaggatcaaggcatcaagaacctggaagtgcgcatcaagggcccgggcccgggtcgcgaatcggctgtccgcgccctgaacaacctgggtatcaagattcaggtgatcgaggatgtgacgccggtgccgcacaacggctgccgtccgccgaagcgccgccgcatctaa

SEQ ID NO: 798 - protein, 133 aa, Ralstonia solanacearum
MAKAANTAAQRARKKVRKNVADGIAHVHASFNNTIITITDRQGNALSWATSGGQGFKGSRKSTPFAAQVAAESAGRVAQDQGIKNLEVRIKGPGPGRESAVRALNNLGIKIQVIEDVTPVPHNGCRPPKRRRI

SEQ ID NO: 799 - DNA, 390 bp, Rhizobium loti
  CDS (1)..(390): transl_table=11
atggccaaggaagccgctcgtgttcgccgtcgcgaacgcaagaatatctcgtcgggcgttgcccacgtcaattcgaccttcaacaacacgatgatcacgatcaccgacgcgcagggcaattcaattgcctggtcgtcggccggtgcccagggcttcaagggttcgcgcaagtcgaccccgttcgctgcccagatggctgccgaggacgtcgccaagaaggctcaggaacacggcatgcgcatgctcgaagtcgaggtctgcggacctggctccggtcgtgaatcggcgctgcgcgcgctgcaggcggccggcttcaccatcacctcgatccgtgatgtgacgccgatcccgcacaatggctgccgcccgcgcaagaagcgccgcgtctaa

SEQ ID NO: 800 - protein, 129 aa, Rhizobium loti
MAKEAARVRRRERKNISSGVAHVNSTFNNTMITITDAQGNSIAWSSAGAQGFKGSRKSTPFAAQMAAEDVAKKAQEHGMRMLEVEVCGPGSGRESALRALQAAGFTITSIRDVTPIPHNGCRPRKKRRV

SEQ ID NO: 801 - DNA, 390 bp, Rhizobium meliloti
  CDS (1)..(390): transl_table=11
atggccaaggaagccacccgcgttcgccgtcgcgagcgcaagaacattacgtcgggcgttgcacacgtcaactcgtcgttcaacaacacgatgatcaccattaccgacgcgcagggcaatgctattgcctggtcgtccgccggtgcgaagggtttcaagggttcgcgcaagtcgaccccgttcgccgcgcagatcgccgctgaagattgcgccaagaaggcccaggaacacggcatgaagtcgctggaagtggaagtttgcggtccgggttccggccgtgaatccgctcttcgcgcgctccaggctgcaggtttcatgatcacgtcgatccgtgacgtgaccccgatcccgcacaatggctgccgtccgcgcaagaagcgccgcgtctga

SEQ ID NO: 802 - protein, 129 aa, Rhizobium meliloti
MAKEATRVRRRERKNITSGVAHVNSSFNNTMITITDAQGNAIAWSSAGAKGFKGSRKSTPFAAQIAAEDCAKKAQEHGMKSLEVEVCGPGSGRESALRALQAAGFMITSIRDVTPIPHNGCRPRKKRRV

SEQ ID NO: 803 - DNA, 384 bp, Rhodopirellula baltica
  CDS (1)..(384): transl_table=11
gtggcaaagaccaacaagaaaaaacgcatccgcagaaacgtaagcaacggtgttgctcacgttcacgcgactttcaacaacaccacggtgaccatcacggacgccaagggtgacacgttgtgctgggccagtgcaggaaccagtggattcaagggcagccgtaaaagcacgcctttcgctggtcagtgtgctgctcaacaggctgctgaaaaagcaaccaagtttggtatgcgtgacgtcgaagttcgcgtcaaaggacctgggtccggtcgcgaaagtgccatcaccgcgctgcaagctgctggcttgaacgtgaaattgatcgaggaagtgacccccatcccgcacaacggttgccgtcctcgcaagaaacgccgcgtctaa

SEQ ID NO: 804 - protein, 127 aa, Rhodopirellula baltica
MAKTNKKKRIRRNVSNGVAHVHATFNNTTVTITDAKGDTLCWASAGTSGFKGSRKSTPFAGQCAAQQAAEKATKFGMRDVEVRVKGPGSGRESAITALQAAGLNVKLIEEVTPIPHNGCRPRKKRRV

SEQ ID NO: 805 - DNA, 390 bp, Rhodopseudomonas palustris
  CDS (1)..(390): transl_table=11
atggccaaggacgccacccgcattcgccgtcgcgagcgcaagaacatcgcttccggcatcgcgcatgtgaattcgtcgttcaacaacaccaccatcaccatcaccgacgcgcagggcaatgcgattgcctggtcgtcggccggcacgatgggcttcaagggctcgcgcaagtcgaccccgtacgctgcgcaggtcgcggccgaggacgtcgccaagaaggcgcaggagcacggcatgcgcaccctcgaagtcgaggtggctggcccgggttcgggccgtgagtcggcgctgcgcgcgctgcaggcggcgggtttcacggtgacctcgatccgcgacgtcaccaccatcccgcacaacggttgccgtccgcgtaagcgtcgtcgcgtctga

SEQ ID NO: 806 - protein, 129 aa, Rhodopseudomonas palustris
MAKDATRIRRRERKNIASGIAHVNSSFNNTTITITDAQGNAIAWSSAGTMGFKGSRKSTPYAAQVAAEDVAKKAQEHGMRTLEVEVAGPGSGRESALRALQAAGFTVTSIRDVTTIPHNGCRPRKRRRV

SEQ ID NO: 807 - DNA, 390 bp, Rhodospirillum rubrum
  CDS (1)..(390): transl_table=11
atggccaagccagctcagaagttgcgcaggcgcgagcgcaagaatatcacctcgggcatcgcccatgtgagcgcttcgttcaataataccaagatcaccatcaccgacgttcagggcaacgcgattgcctggtcgtccgccggtgctcagggcttcaagggatcgcgcaagtcgaccccttacgcagcccaggtcgctgccgaggacgcgggccgcaaggcccaggaacacggcatgaagaccctggaagtcatggtgaagggtcccgggtcgggccgtgaatcggcgcttcgcgctttgcagtcggtgggcttccaggtgacgtcgatcaaagacgtgaccccgatcccccacaacggctgccgccctcgcaagcgccgtcgcgtctga

SEQ ID NO: 808 - protein, 129 aa, Rhodospirillum rubrum
MAKPAQKLRRRERKNITSGIAHVSASFNNTKITITDVQGNAIAWSSAGAQGFKGSRKSTPYAAQVAAEDAGRKAQEHGMKTLEVMVKGPGSGRESALRALQSVGFQVTSIKDVTPIPHNGCRPRKRRRV

SEQ ID NO: 809 - DNA, 414 bp, Rhodococcus sp
  CDS (1)..(414): transl_table=11
atgccccccaagtcacgtggcaccggtccgaagaagacccagaaggcgcgtcgcagggacaagaagaacgtcccgcacggcgccgctcacatcaagagcacgttcaacaacaccatcgtgtccatcacggaccccgccggaaacgtgatttcctgggcgtcctcgggacacgtcggcttcaagggttcgcgtaagtcgaccccgttcgccgctcagctggccgccgagaacgcagcccgcaaggcgcaggagcacggtgtcaagaaggtcgacgtcttcgtcaagggccccggctccggccgtgagaccgcgatccgctcgcttcaggccgcgggcctcgaggtcggcaccatctccgatgtcaccccccagccgcacaacggctgccgtccgcccaagcggcgtcgggtctag

SEQ ID NO: 810 - protein, 137 aa, Rhodococcus sp
MPPKSRGTGPKKTQKARRRDKKNVPHGAAHIKSTFNNTIVSITDPAGNVISWASSGHVGFKGSRKSTPFAAQLAAENAARKAQEHGVKKVDVFVKGPGSGRETAIRSLQAAGLEVGTISDVTPQPHNGCRPPKRRRV

SEQ ID NO: 811 - DNA, 384 bp, Rickettsia conorii
  CDS (1)..(384): transl_table=11
atgaatcagacggttaaagttaagaaaaagaaaaaaactatcactcttggtgttgtgcatatccgagcatcatttaataatactatagtaacatttactgatattcaaggtaatactattgcttctgcatcggcaggaggtaatgggtttaaaggggcaagaaaagcaacaccttatgcagctcaagtaacaattgatagagcatcggaaaaagcaaaagaatatggtctaaaaactatttctattaggattggaggaccgggggctcagcgtgaatcagcaatgagagctttattcggacaaaattttgtggttacatcaattttagatgtatcgtcaattgctcataatggagtaagaccgccaaaaagaagaagagtataa

SEQ ID NO: 812 - protein, 127 aa, Rickettsia conorii
MNQTVKVKKKKKTITLGVVHIRASFNNTIVTFTDIQGNTIASASAGGNGFKGARKATPYAAQVTIDRASEKAKEYGLKTISIRIGGPGAQRESAMRALFGQNFVVTSILDVSSIAHNGVRPPKRRRV

SEQ ID NO: 813 - DNA, 384 bp, Rickettsia felis
  CDS (1)..(384): transl_table=11
atgaatcagacggttaaagttaagaaaaagaaaaaaactatcactctaggtgttgtgcatatccgagcatcatttaataatactatagtaacatttactgatatccaaggtaatactatttcttctgcatcggcaggaggtaatgggtttaaaggggcaagaaaagcaacaccttatgcagctcaagtaacaattgatagagcatcggaaaaagcaaaagaatatggtctaaaaactatttctattaggattggagggccgggagctcagcgtgaatcagcaatgagagctttattcgggcaaaattttgtggttacatcaattttagatgtatcgtcaattgctcataatggagtgagaccgccaaaaagaagaagagtataa

SEQ ID NO: 814 - protein, 127 aa, Rickettsia felis
MNQTVKVKKKKKTITLGVVHIRASFNNTIVTFTDIQGNTISSASAGGNGFKGARKATPYAAQVTIDRASEKAKEYGLKTISIRIGGPGAQRESAMRALFGQNFVVTSILDVSSIAHNGVRPPKRRRV

SEQ ID NO: 815 - DNA, 384 bp, Rickettsia prowazekii
  CDS (1)..(384): transl_table=11
atgaatcagactattaaagttaagaaaaagaaaaagactatcactcttggtgttgtacatatccgagcgtcatttaataatactatagtaacatttactgatattcaaggtaatactatttcttctgcatcagcagggggcaatggttttaagggtgcaagaaaggcaacgccttatgcagctcaagtaacgattgataaagcatcggaaaaggcaaaagaatgtggcctaaagactatttctattaggattggaggccctggagcacagcgtgaatcagcaatgcgtgctttattcgggcaaaattttgtggttacatcaattttagatgtatcatccattgctcataatggagtaagaccgccaaaaagaagaagagtataa

SEQ ID NO: 816 - protein, 127 aa, Rickettsia prowazekii
MNQTIKVKKKKKTITLGVVHIRASFNNTIVTFTDIQGNTISSASAGGNGFKGARKATPYAAQVTIDKASEKAKECGLKTISIRIGGPGAQRESAMRALFGQNFVVTSILDVSSIAHNGVRPPKRRRV

SEQ ID NO: 817 - DNA, 408 bp, Rubrobacter xylanophilus
  CDS (1)..(408): transl_table=11
atgggcaggcagcgtcagcagcggtcgcggggcagcaggtcgcggcggagggtccggaagaacatctccaccgccgtggtccacataaagagctccttcaacaacaccatcatctcggtgaccgatcaggagggcaacgtcatagcctgggagtcggcgggctccatggggttcaagggcagccgcaagagcaccccgtacgccgcccagatgaccgccgagagcgcggccaacaaggccatggagcacggcgtcaagcgggtggacatccaggtcaaggggcacggctcgggccgcgacatggcggccaggaccttccaggcgatgggcatagaggtgctctctataaaggacgtcacgggccagccccacaacggctgcaggccgcccaagcggcgccggggctag

SEQ ID NO: 818 - protein, 135 aa, Rubrobacter xylanophilus
MGRQRQQRSRGSRSRRRVRKNISTAVVHIKSSFNNTIISVTDQEGNVIAWESAGSMGFKGSRKSTPYAAQMTAESAANKAMEHGVKRVDIQVKGHGSGRDMAARTFQAMGIEVLSIKDVTGQPHNGCRPPKRRRG

SEQ ID NO: 819 - DNA, 396 bp, Saccharophagus degradans
  CDS (1)..(396): transl_table=11
atggctaagccaagtggtaagtcaacgaccaagaaaaaggtcaaaaagaccgttgttgacggaatcgcgcatattcatgcttcgtttaataacactatcgtgacgattactgatcgtcagggtaatactttatcttgggcaactgcgggcggttctggtttccgcggttctcgtaaaagtactccttttgctgcacaggttgcggcagagcgtgcaggccaagctgcacaagactacggtcttaaaaatttggatgtagaagttaagggtcctggtccgggtcgtgagtcagctgtacgtgctttgaacaatattggttacaaagttaacaacattacagatgtgacaccgattccgcacaacggctgtcgtccacccaaaaagcgtcgcgtataa

SEQ ID NO: 820 - protein, 131 aa, Saccharophagus degradans
MAKPSGKSTTKKKVKKTVVDGIAHIHASFNNTIVTITDRQGNTLSWATAGGSGFRGSRKSTPFAAQVAAERAGQAAQDYGLKNLDVEVKGPGPGRESAVRALNNIGYKVNNITDVTPIPHNGCRPPKKRRV

SEQ ID NO: 821 - DNA, 390 bp, Salmonella choleraesuis
  CDS (1)..(390): transl_table=11
atggcaaaggcaccagttcgcgcacgtaaacgtgtaagaaaacaagtctctgacggcgtggctcatatccatgcttctttcaacaacaccatcgtgactattaccgatcgtcagggtaatgcgctgggttgggcaacagccggtggttccggtttccgtggttctcgcaaatccactccgtttgcagctcaggttgcagcagagcgttgcgctgacgccgtgaaagaatacggtatcaagaatctggaagttatggttaaaggtccgggtccaggccgcgaatctactattcgtgctctgaacgccgctggtttccgcatcactaatattactgatgtgactccgatccctcataacggttgtcgtccgccgaaaaaacgtcgcgtataa

SEQ ID NO: 822 - protein, 129 aa, Salmonella choleraesuis
MAKAPVRARKRVRKQVSDGVAHIHASFNNTIVTITDRQGNALGWATAGGSGFRGSRKSTPFAAQVAAERCADAVKEYGIKNLEVMVKGPGPGRESTIRALNAAGFRITNITDVTPIPHNGCRPPKKRRV

SEQ ID NO: 823 - DNA, 390 bp, Salmonella typhi
  CDS (1)..(390): transl_table=11
atggcaaaggcaccagtttgcgcacgtaaacgtgtaagaaaacaagtctctgacggcgtggctcatatccatgcttctttcaacaacaccatcgtgactattaccgatcgtcagggtaatgcgctgggttgggcaacagccggtggttccggtttccgtggttctcgcaaatccactccgtttgcagctcaggttgcagcagagcgttgcgctgacgccgtgaaagaatacggtatcaagaatctggaagttatggttaaaggtccgggtccaggccgcgaatctactattcgtgctctgaacgccgctggtttccgcatcactaatattactgatgtgactccgatccctcataacggttgtcgtccgccgaaaaaacgtcgcgtataa

SEQ ID NO: 824 - protein, 129 aa, Salmonella typhi
MAKAPVCARKRVRKQVSDGVAHIHASFNNTIVTITDRQGNALGWATAGGSGFRGSRKSTPFAAQVAAERCADAVKEYGIKNLEVMVKGPGPGRESTIRALNAAGFRITNITDVTPIPHNGCRPPKKRRV

SEQ ID NO: 825 - DNA, 393 bp, Shewanella oneidensis
  CDS (1)..(393): transl_table=11
atggctaaagttccgtcacgttctccgcgtaagcgcgtacgtaaacaggttgcagatggcatggctcatatccatgcttctttcaacaacacaattgtcaccattacagatcgtcaaggtaatgcgttgtcatgggctacctcaggtggttcaggtttccgtggttcacgtaaatctacgccatttgctgcacaggtagctgctgagcgtgcaggtgctgctgctcaagactacggtttaaaaaaccttgaagtgtttgtgaagggtccaggtccaggtcgtgaatcagccattcgtgcgctgaacgctgttggttacaaaattaccaacattaccgatgtgacgccgatccctcataatggttgtcgtcctcctaaaaagcgtcgtgtataa

SEQ ID NO: 826 - protein, 130 aa, Shewanella oneidensis
MAKVPSRSPRKRVRKQVADGMAHIHASFNNTIVTITDRQGNALSWATSGGSGFRGSRKSTPFAAQVAAERAGAAAQDYGLKNLEVFVKGPGPGRESAIRALNAVGYKITNITDVTPIPHNGCRPPKKRRV

SEQ ID NO: 827 - DNA, 408 bp, Shewanella violacea
  CDS (1)..(408): transl_table=11
atggctaaaagtccgtcacgttctccgcgtaagcgtgtacgtaaacaggttgctgatggtatggctcatatccatgcgtctttcaacaacacaattattaccattactgatcgtcaaggtaatgcactatcttgggcaacttcaggtggttcaggtttccgtggttcacgtaaatctactccttttgctgcacaggttgctgctgagcgcgccggtgttgctgctcaggattacggtgttaaaaaccttgaagtttttgtaaagggtccaggtccaggacgcgaatctgcgattcgtgcactgaattcggttggttataaaataaccaatattaccgatgtgacgcctatccctcataatggttgtcgtcctcctaaggaaacgtcgcgtttaattcgtcgtttttaa

SEQ ID NO: 828 - protein, 135 aa, Shewanella violacea
MAKSPSRSPRKRVRKQVADGMAHIHASFNNTIITITDRQGNALSWATSGGSGFRGSRKSTPFAAQVAAERAGVAAQDYGVKNLEVFVKGPGPGRESAIRALNSVGYKITNITDVTPIPHNGCRPPKETSRLIRRF

SEQ ID NO: 829 - DNA, 393 bp, Silicibacter pomeroyi
  CDS (1)..(393): transl_table=11
atggcacgcgataagacccgcaccacgaagaaaaaagaacgcaagaatatcgcatcgggcgtggcccatgtgaactcgacgttcaacaacaccaagatcctgatctcggacgtgcaaggcaacgccatctcgtggtcgtcggctggcaccatgggcttcaagggatcgcggaaatcgaccccctacgccgctcagctggctgccgaagatgccggccgcaaggcgcaggatcatggcgtcaagacgctggaagtcgaagttcagggccccggttcgggccgtgaatcggctctgcgcgctctggctgccgtgggcttcaacatcacgtcgatccgcgatgtgaccccgatcgcccacaacggctgccgcccgccgaagcgccgccgcgtctaa

SEQ ID NO: 830 - protein, 130 aa, Silicibacter pomeroyi
MARDKTRTTKKKERKNIASGVAHVNSTFNNTKILISDVQGNAISWSSAGTMGFKGSRKSTPYAAQLAAEDAGRKAQDHGVKTLEVEVQGPGSGRESALRALAAVGFNITSIRDVTPIAHNGCRPPKRRRV

SEQ ID NO: 831 - DNA, 390 bp, Silicibacter sp
  CDS (1)..(390): transl_table=11
atggcacgcgataaaacccgcacgaagcgtaaagagcgtaagaacattgcatcgggcgttgcccatgtgaactcctcgttcaacaacaccaagatcctgatctctgacgttcagggcaacgcgatctcctggtcctccgctggcaccatgggcttcaagggctcccgtaagtccacgccctatgccgcgcagatggctgcagaagacgcaggccgcaaggcacaggatcacggcgtaaagaccctcgaggtcgaggttcaaggccccggttcgggtcgtgaatccgccctgcgcgcgctggccgcaatcggtttcaacatcaccaacatccgtgatgtgaccccgatcgcacacaacggctgccgcccgccgaagcgccgccgcgtctaa

SEQ ID NO: 832 - protein, 129 aa, Silicibacter sp
MARDKTRTKRKERKNIASGVAHVNSSFNNTKILISDVQGNAISWSSAGTMGFKGSRKSTPYAAQMAAEDAGRKAQDHGVKTLEVEVQGPGSGRESALRALAAIGFNITNIRDVTPIAHNGCRPPKRRRV

SEQ ID NO: 833 - DNA, 408 bp, Solibacter usitatus
  CDS (1)..(408): transl_table=11
atggcgaaagcaccagttaaagcaggcaagaagaagagcttcaagaagaaggagaagcgcgtcgtccacacgggcgtcgtgcatatccaggccaccttcaacaacaccatcgtcaccatcagcgatcaggaaggcaatacgatttcctggtcgagcgccggttcgctgggtttccgcggctcccgcaagggcacgccattcgcagcgcagcaggcggcgatgacggcggcgaacaaggccaacgaaaccgggttgcgcgtggtggaagtccgggtgtccggtccgggttcgggccgggaatcggcagtgcgcgcgttgagcacggccggtattgaagttcgcgctattaaagatgtgacgccgatcccgcacaacgggtgccgtcctcccaagaagcgccgcgtttaa

SEQ ID NO: 834 - protein, 135 aa, Solibacter usitatus
MAKAPVKAGKKKSFKKKEKRVVHTGVVHIQATFNNTIVTISDQEGNTISWSSAGSLGFRGSRKGTPFAAQQAAMTAANKANETGLRVVEVRVSGPGSGRESAVRALSTAGIEVRAIKDVTPIPHNGCRPPKKRRV

SEQ ID NO: 835 - DNA, 390 bp, Sphingopyxis alaskensis
  CDS (1)..(390): transl_table=11
atggctcgtgaaccgcagcgccttcgtcggcgcgaacgcaagaatatctcgtcgggtgtggcccacgtcaacgcgaccttcaacaatacgatgatcaccatcaccgacgcacagggcaatgcgattgcctggtcgagcgccggcatgatgggcttcaagggcagccgcaaatcgactccctatgcggcgcaggtctgcgccgaagacgcgggcaagaaggccgccgaacatggcgtccgcacgctggaagtcgaagtcaagggccccggcgccggccgtgaatcggcgctgcgtgcgctgcaggccgtcggttttcacatcacgtcgatccgcgacgtgacaccgatcccgcacaatggcgtccgcccggccaaacgtcgccgcgtctga

SEQ ID NO: 836 - protein, 129 aa, Sphingopyxis alaskensis
MAREPQRLRRRERKNISSGVAHVNATFNNTMITITDAQGNAIAWSSAGMMGFKGSRKSTPYAAQVCAEDAGKKAAEHGVRTLEVEVKGPGAGRESALRALQAVGFHITSIRDVTPIPHNGVRPAKRRRV

SEQ ID NO: 837 - DNA, 390 bp, Staphylococcus epidermidis
  CDS (1)..(390): transl_table=11
atggcacgtaaacaagtatctcgtaaacgtagagtgaaaaagaatattgaaaatggtgtagctcacatccgttcaacattcaataatactatcgtaactatcactgatgaattcggtaatgcattatcttggtcatcagctggtgcattaggattcaaaggatctaaaaaatcaactccatttgcagctcaaatggcttcagaaacagcttctaaaactgctatggaacatggtttgaaaacagtagaagtaacagtaaaaggacctggtccaggccgtgaatctgctatccgtgcactacaatctgcaggtttagaagtaactgcaatcagagacgttactccagtaccacacaacggttgtcgtccaccaaaacgtcgtcgcgtataa

SEQ ID NO: 838 - protein, 129 aa, Staphylococcus epidermidis
MARKQVSRKRRVKKNIENGVAHIRSTFNNTIVTITDEFGNALSWSSAGALGFKGSKKSTPFAAQMASETASKTAMEHGLKTVEVTVKGPGPGRESAIRALQSAGLEVTAIRDVTPVPHNGCRPPKRRRV

SEQ ID NO: 839 - DNA, 405 bp, Streptomyces avermitilis
  CDS (1)..(405): transl_table=11
atgccccccaagggtcgtcagggcgctgccaagaaggtgcgccgcaaggaaaagaagaacgtcgctcacggccacgcgcacatcaagagcacgttcaacaacacgatcgtctcgatcacggacccctcgggcaacgtgatctcctgggcctccgccggccacgtcggcttcaagggctcgcgcaagtccacccccttcgccgcgcagatggccgccgagtcggccgcccgccgcgcgcaggagcacggcatgcgcaaggttgacgtcttcgtcaagggtccgggctccggccgcgagaccgcgatccgttccctccaggccactggcctcgaggtcggctccatccaggacgtcacccccaccccgcacaacggttgccgtccgcccaagcgccgccgcgtctga

SEQ ID NO: 840 - protein, 134 aa, Streptomyces avermitilis
MPPKGRQGAAKKVRRKEKKNVAHGHAHIKSTFNNTIVSITDPSGNVISWASAGHVGFKGSRKSTPFAAQMAAESAARRAQEHGMRKVDVFVKGPGSGRETAIRSLQATGLEVGSIQDVTPTPHNGCRPPKRRRV

SEQ ID NO: 841 - DNA, 405 bp, Streptomyces coelicolor
  CDS (1)..(405): transl_table=11
atgccccccaagggacgtcagggcgctgccaagaaggtgcgccgcaaggaaaagaagaacgtcgctcacggccacgcgcacatcaagagcacgttcaacaacacgatcgtgtccatcacggacccgaccggcaacgtgatctcctgggcctccgccggccacgtcggcttcaagggctcccggaagtccacgccgttcgccgcgcagatggccgccgagtcggctgcccgtcgcgcgcaggagcacggcatgcgcaaggtcgacgtcttcgtcaagggcccgggttccggtcgtgagaccgccatccgctccctgcaggcgaccggcctcgaggtcggctccatccaggacgtcacgcccaccccgcacaacgggtgccgtccgccgaagcgtcgtcgcgtctga

SEQ ID NO: 842 - protein, 134 aa, Streptomyces coelicolor
MPPKGRQGAAKKVRRKEKKNVAHGHAHIKSTFNNTIVSITDPTGNVISWASAGHVGFKGSRKSTPFAAQMAAESAARRAQEHGMRKVDVFVKGPGSGRETAIRSLQATGLEVGSIQDVTPTPHNGCRPPKRRRV

SEQ ID NO: 843 - DNA, 384 bp, Streptococcus mutans
  CDS (1)..(384): transl_table=11
ttggctaaaccaacacgtaaacgtcgtgtcaagaaaaatattgaatctggtattgcccatattcacgcaacatttaataacactattgttatgattacagatgtgcatggtaacgctcttgcatggtcatcagctggtgctcttggattcaaaggttcacgtaaatctactccatttgctgctcaaatggctgcagaagccgctgctaagtctgcacaagaacacggtcttaaaacagttgaagttactgtaaaaggtccaggttcaggtcgtgagtctgctattcgtgcgcttgccgctgctggtcttgaagtaacgtcaattcgtgatgtgactcctgtaccacataatggtgctcgtcctccaaaacgtcgtcgtgtataa

SEQ ID NO: 844 - protein, 127 aa, Streptococcus mutans
MAKPTRKRRVKKNIESGIAHIHATFNNTIVMITDVHGNALAWSSAGALGFKGSRKSTPFAAQMAAEAAAKSAQEHGLKTVEVTVKGPGSGRESAIRALAAAGLEVTSIRDVTPVPHNGARPPKRRRV

SEQ ID NO: 845 - DNA, 399 bp, Sulfolobus acidocaldarius
  CDS (1)..(399): transl_table=11
atgtcgagcaggcgtgaaattagatggggaaatgcgaggatatatgcctcgcagaataatacaataataacaataactgatattacaggtgcagagataatatctaaggcatcaggtggtatggtagttaaggctgatagagaaaaaccatcgccatatgctgcaatgttagctgccaataaggctgcaaatgatgcctttgataagggtattagtgctatacatataaaggtcagagcacagggtggatacggttccaagactcctggacctggagctcaaccggctataagggcattagcaagagctggatttataattggaagaattgaagacgttacgccattacctcatgataccataaggagacctggtggaagaagaggaagaagagtataa

SEQ ID NO: 846 - protein, 132 aa, Sulfolobus acidocaldarius
MSSRREIRWGNARIYASQNNTIITITDITGAEIISKASGGMVVKADREKPSPYAAMLAANKAANDAFDKGISAIHIKVRAQGGYGSKTPGPGAQPAIRALARAGFIIGRIEDVTPLPHDTIRRPGGRRGRRV

SEQ ID NO: 847 - DNA, 399 bp, Sulfolobus solfataricus
  CDS (1)..(399): transl_table=11
gtgtcaagcaggcgtgaaatcagatggggaatagctcatatttacgcatcccagaataacactttgctaacaataagtgatcttactggcgcggagattatctccagagctagtggaggtatggtagtaaaagctgatcgagaaaaatcatcaccctatgctgcaatgttggctgcaaataaagctgctagtgacgcgcttgaaaaaggtataatggcgcttcatattaaggttagggcaccaggtggatatggaagtaagacacctggaccgggtgcccagcctgcaattagagcattagctagagctggattcattataggaaggattgaggatgttacacctatacctcatgataccataaggagacctggcggaagaagaggaagaagagtatag

SEQ ID NO: 848 - protein, 132 aa, Sulfolobus solfataricus
MSSRREIRWGIAHIYASQNNTLLTISDLTGAEIISRASGGMVVKADREKSSPYAAMLAANKAASDALEKGIMALHIKVRAPGGYGSKTPGPGAQPAIRALARAGFIIGRIEDVTPIPHDTIRRPGGRRGRRV

SEQ ID NO: 849 - DNA, 408 bp, Sulfolobus tokodaii; identical to SEQ ID NO: 159
  CDS (10)..(408): transl_table=11

SEQ ID NO: 850 - protein, 132 aa, Sulfolobus tokodaii
MSSRREIRWGIARVYASQNNTLITITDITGAEIISRASGGMVVKADREKPSPYAAMLAANKAATEAFDKGISAIHIKVRAQGGYGSKTPGPGAQPAIRALARAGFIIGRIEDVTPIPHDSIRRPGGRRGRRV

SEQ ID NO: 851 - DNA, 390 bp, Symbiobacterium thermophilum
  CDS (1)..(390): transl_table=11
atggctaagcgcactgcccgcgtgaagcgcagggagcggaagaacgtagacaagggcgtggcccacatccgttctaccttcaataacacgatcgtgaccatcaccgatgtccatggcaacgcgctggcctgggcgaccgccggcgccatggggttcaagggttcccggaagtccacgccgtttgcggcccagatggcggccgagaaggcggccaaggacgccatggagcacggcgtgcgtgaggttgaagtgctggtcaaggggccggggtccggccgtgaggcggcgatccgccagctgcaggccgccggcctggaggtcacggcgatcaaggacgtgaccccgattccccacaacggctgccgcccgccgaagcggcgccgcgtgtag

SEQ ID NO: 852 - protein, 129 aa, Symbiobacterium thermophilum
MAKRTARVKRRERKNVDKGVAHIRSTFNNTIVTITDVHGNALAWATAGAMGFKGSRKSTPFAAQMAAEKAAKDAMEHGVREVEVLVKGPGSGREAAIRQLQAAGLEVTAIKDVTPIPHNGCRPPKRRRV

SEQ ID NO: 853 - DNA, 393 bp, Syntrophus aciditrophicus
  CDS (1)..(393): transl_table=11
atggctaagcaggtaagaaagacaggcaagaaaaaagagaagaagaacattccggaaggaattgcacatatacagtcaacttttaataatacaatcattaccattacagatccaatcggaaacgttattgcgtggtcgtcatctggaatgcagggatttaagggttccagaaaaagcacgccatttgccgctcaaatggctgcggaagactgcgtaaaaaaggcgaaagaacacggtctaagaaaggtacaggtctatgtaaagggaccaggatccggacgcgaatcagcgttacgttcgcttcaggccgcaggattgacgatttcgttaattcgagatgtaacaccgattccgcataacggctgtcgccctccaaaaagacgaagggtctga

SEQ ID NO: 854 - protein, 130 aa, Syntrophus aciditrophicus
MAKQVRKTGKKKEKKNIPEGIAHIQSTFNNTIITITDPIGNVIAWSSSGMQGFKGSRKSTPFAAQMAAEDCVKKAKEHGLRKVQVYVKGPGSGRESALRSLQAAGLTISLIRDVTPIPHNGCRPPKRRRV

SEQ ID NO: 855 - DNA, 393 bp, Synechococcus elongatus
  CDS (1)..(393): transl_table=11
atggcaccctctgcaaaacgctctggccctcgtaagcaaaagcgcaatgtccccagtggcgttgcccacattcagtccacatttaataacacgattgtctcaattaccgaccccaatggtgaggtgattgcttgggcctctgctggctctagtggtttcaaaggtgccaaaaaaggcacaccttttgcagcccaaactgctgctgataatgcggctcgccgtgccattgatcaggggatgcggcaaattgaggtcatggtgagtggtcccggctccggtcgagaaacagccattcgggcgttgcaagccgcaggcctagaaattaccctcattcgggatgtgacccccattccccacaatggttgccgtccccccaaacggcggcgggtttag

SEQ ID NO: 856 - protein, 130 aa, Synechococcus elongatus
MAPSAKRSGPRKQKRNVPSGVAHIQSTFNNTIVSITDPNGEVIAWASAGSSGFKGAKKGTPFAAQTAADNAARRAIDQGMRQIEVMVSGPGSGRETAIRALQAAGLEITLIRDVTPIPHNGCRPPKRRRV

SEQ ID NO: 857 - DNA, 393 bp, Synechococcus sp
  CDS (1)..(393): transl_table=11
atggctcgacccactaaaaaatcggggccccgcaaacagaagcgcaacgttcctagcggtgttgcccacatccaatccaccttcaataacacgatcgtttcgatcgctgaccccgccggtgaagtcatctcttgggcttccgctggttctagcggcttcaaaggcgccaaaaaggggactccctttgcagcacaaactgcggctgaggctgctgcccgtcgggcgatcgaccaaggcatgcgccagctcgaagtgatggtcagtggcccaggctcgggtcgtgaaaccgccatccgggcgttgcaaagcgctggcctagaaatcaccctgattcgtgacgtcacgccgattcctcacaacggctgccgcccgcccaaacgtcgtcgcgtttag

SEQ ID NO: 858 - protein, 130 aa, Synechococcus sp
MARPTKKSGPRKQKRNVPSGVAHIQSTFNNTIVSIADPAGEVISWASAGSSGFKGAKKGTPFAAQTAAEAAARRAIDQGMRQLEVMVSGPGSGRETAIRALQSAGLEITLIRDVTPIPHNGCRPPKRRRV

SEQ ID NO: 859 - DNA, 393 bp, Synechococcus sp
  CDS (1)..(393): transl_table=11
atggccaaacccgccaagaaaacaggccccaagaaggccaaacgcaacgtcccgaacggcgttgcccacatccagagcaccttcaacaacacgatcgtgtcgatcaccgacacgtctggcgaagtcatctcctggtcatccgctggtgccagcggcttcaagggtgctcgcaaaggcacgcccttcgctgcccagacggctgcagaagcagcggcacgtcgagcacttgatcaaggcatgcgccagatcgaagtgctggtgaagggtcctggatccggtcgtgagaccgcaattcgtgccttgcaggtggctggtcttgagatcaccctgatcagagacgtcactccgctgccccacaacggttgccggcggcccaagcgccgtcgcgtctga

SEQ ID NO: 860 - protein, 130 aa, Synechococcus sp
MAKPAKKTGPKKAKRNVPNGVAHIQSTFNNTIVSITDTSGEVISWSSAGASGFKGARKGTPFAAQTAAEAAARRALDQGMRQIEVLVKGPGSGRETAIRALQVAGLEITLIRDVTPLPHNGCRRPKRRRV

SEQ ID NO: 861 - DNA, 393 bp, Synechococcus sp
  CDS (1)..(393): transl_table=11
atggccaagccagcaaagaaatcaggccccaagaaggccaaacgcaacgtccccaacggagttgctcacatccaaagcacgttcaataacacgatcgtgtccattaccgacaccaccggagaagtcatctcctggtcatcagctggagccagtgggtttaaaggtgctcgcaagggcactccttttgctgctcaaaccgctgcagaagctgccgctcgccgagctctcgagcaaggcatgcgtcaaattgaagttcttgttcgtggtccaggctcaggacgggaaacagccattcgcgctcttcaagttgctggcttagagatcaccttgatccgcgacgtcactcccttaccccacaacgggtgccgccgctctaagcggcgtcgtgtctga

SEQ ID NO: 862 - protein, 130 aa, Synechococcus sp
MAKPAKKSGPKKAKRNVPNGVAHIQSTFNNTIVSITDTTGEVISWSSAGASGFKGARKGTPFAAQTAAEAAARRALEQGMRQIEVLVRGPGSGRETAIRALQVAGLEITLIRDVTPLPHNGCRRSKRRRV

SEQ ID NO: 863 - DNA, 393 bp, Synechococcus sp
  CDS (1)..(393): transl_table=11
atggctaaaaccgtcaaaaaatccgggcccaagaaggccaagcgaaacgtccccaacggtgttgctcacatccagagcaccttcaacaacaccatcgtgtccatcaccgacacggccggtgaggtgatctcctggtcgtctgcaggcgccagtggcttcaaaggtgctcgcaaaggcacccccttcgcggctcaaaccgccgcagaagcagcagcacgtcgcgccctcgaccaaggcatgcgtcagatcgaagtgctcgtaaggggtcctggctcaggccgtgagaccgccatccgtgctctccaagtcgctggactcgaaatcaccctgattcgcgacgtcacccccctgccccataacggttgccgccggcccaagcgccgccgcgtctga

SEQ ID NO: 864 - protein, 130 aa, Synechococcus sp
MAKTVKKSGPKKAKRNVPNGVAHIQSTFNNTIVSITDTAGEVISWSSAGASGFKGARKGTPFAAQTAAEAAARRALDQGMRQIEVLVRGPGSGRETAIRALQVAGLEITLIRDVTPLPHNGCRRPKRRRV

SEQ ID NO: 865 - DNA, 393 bp, Synechocystis sp
  CDS (1)..(393): transl_table=11
atggcgcgtcctaccagaaaaactgggcccaaaaaggcaaaaaagaatgtccctagcggggtggcccacattcaatctacttttaacaacaccattgtcaccatttccgacattcggggcgatgtgatttcctgggcttccgctggttctagcggtttcaaaggagctaaaaagggcactccctacgccgcccaaaccgctgctgattctgcggcccgtcgggccatggaacagggtatgcggcaattagaggtaatggtaagtggccccggtgccggtcgggaaactgctatccgggccctccaaggggctggtttggaaatcaccctgatcagggatgttacccccatcccccacaatggttgtcgtccccccaaacgccgtcgggtctag

SEQ ID NO: 866 - protein, 130 aa, Synechocystis sp
MARPTRKTGPKKAKKNVPSGVAHIQSTFNNTIVTISDIRGDVISWASAGSSGFKGAKKGTPYAAQTAADSAARRAMEQGMRQLEVMVSGPGAGRETAIRALQGAGLEITLIRDVTPIPHNGCRPPKRRRV

SEQ ID NO: 867 - DNA, 393 bp, Thermoplasma acidophilum
  CDS (1)..(393): transl_table=11
gtgagacagatgaataagactggaatagcccatatctatgcatcgcagaacaacactataatacatgtaactgatccgaccggcgcggagaccatcgccatggtttccggcggaatggtcgtaaagaatgacagggaccaggcaagcccgtacgcggcaatgaaagccgccgatatggtttccgaagccctgaaagagaaggagataaccgatctcataataaaggtacgtgctccgggcggaaacaagtcaaagatacccggtccgggtgctcaggcagccataagggccctttccagggcaggtttgaagatcgtccggatagaggaagtgactcctatcccccacgatggtaccaagaagaaggggggaaagagagggagaagggtctga

SEQ ID NO: 868 - protein, 130 aa, Thermoplasma acidophilum
MRQMNKTGIAHIYASQNNTIIHVTDPTGAETIAMVSGGMVVKNDRDQASPYAAMKAADMVSEALKEKEITDLIIKVRAPGGNKSKIPGPGAQAAIRALSRAGLKIVRIEEVTPIPHDGTKKKGGKRGRRV

SEQ ID NO: 869 - DNA, 405 bp, Thermobifida fusca
  CDS (1)..(405): transl_table=11
atgccgcctaagagccgtcagggcgccgggcgcaaggtgcgccgcaaagagaagaagaacgtcgtccacgggcacgcgcacatcaagagcaccttcaacaacacgattgtgagcatcaccgacccgaccggcgcggtgatctcctgggccagtgccggacaggtcgggttcaaggggtcgcggaagtccactccgttcgccgcgcagatggctgccgaggccgccgcacgccgcgcgcaggagcatggggtgcgcaaggtcgacgtcttcgtcaagggtccgggctcgggccgggaaaccgcgatccgttcgctgcaggcgaccgggctcgaggtcggctcgatccaggacgtcaccccggttccgcacaacggctgccgtccgccgaaacggcgccgggtctga

SEQ ID NO: 870 - protein, 134 aa, Thermobifida fusca
MPPKSRQGAGRKVRRKEKKNVVHGHAHIKSTFNNTIVSITDPTGAVISWASAGQVGFKGSRKSTPFAAQMAAEAAARRAQEHGVRKVDVFVKGPGSGRETAIRSLQATGLEVGSIQDVTPVPHNGCRPPKRRRV

SEQ ID NO: 871 - DNA, 393 bp, Thermotoga maritima
  CDS (1)..(393): transl_table=11
atggcaagaaaaagaggcggctcttcaaaaaaacagaaaaaggttagttttgattacggagtggtgcatataaaatctactttcaacaacactataatcactctcaccgacaaagatggaaatacactcacctgggccagtggaggaacggtgggatttgagggaacaaggaagggcacaccctatgctgctcagctggcagccgataaagtggcaagagaagctctcaggatgggcatcaaaaaagtcgatgttcttgtgaaaggacctggcccaggaagggaacccgcgataagaacgcttcagggcgccggtcttgaaatcaaccagataaaggatgttactcctattccgttcaacggttgcagacccaagaagagaagaagagtgtga

SEQ ID NO: 872 - protein, 130 aa, Thermotoga maritima
MARKRGGSSKKQKKVSFDYGVVHIKSTFNNTIITLTDKDGNTLTWASGGTVGFEGTRKGTPYAAQLAADKVAREALRMGIKKVDVLVKGPGPGREPAIRTLQGAGLEINQIKDVTPIPFNGCRPKKRRRV

SEQ ID NO: 873 - DNA, 390 bp, Thermus thermophilus
  CDS (1)..(390): transl_table=11
atggccaagaagccgagcaagaaaaaggtcaagcggcaggtggcgagcggtcgcgcctacatccacgcctcctacaacaacaccatcgtcaccatcaccgacccggacggcaaccccatcacctggtcttcgggtggcgtcatcggctacaagggaagccgtaagggcaccccttacgccgcccagctcgcggccctggacgccgccaagaaggccatggcctacggcatgcagagcgtggacgtgatcgtgcggggcaccggggcgggccgggagcaggccataagggccctccaggcctccggcctccaggtgaagtccatcgtggacgacacccccgtcccccacaacggctgcaggcccaagaagaagttccgtaaggcttcctag

SEQ ID NO: 874 - protein, 129 aa, Thermus thermophilus
MAKKPSKKKVKRQVASGRAYIHASYNNTIVTITDPDGNPITWSSGGVIGYKGSRKGTPYAAQLAALDAAKKAMAYGMQSVDVIVRGTGAGREQAIRALQASGLQVKSIVDDTPVPHNGCRPKKKFRKAS

SEQ ID NO: 875 - DNA, 393 bp, Thermoanaerobacter tengcongensis
  CDS (1)..(393): transl_table=11
atggccaagagagtaaaaagggctggaagaaaacgcgaaaaaaagcatgtggagagaggtatcgctcacatccactccacttttaacaataccattgtgacgataactgatccagcaggcaataccattgcatgggctagcgctggaacagtcggatttaaaggctcaagaaaatctactccatttgctgctcagatggcggctgaatctgctgcaaaagcggcaatggaccatgggatgagaactgtagatgtatatgtgaaagggccaggggcaggaagagaagcggcaataagagccttgcaggcagctggtcttgaggtaagtcttataaaagacgtaactccaataccccataacggctgcagaccaccaaagaggagaagagtgtaa

SEQ ID NO: 876 - protein, 130 aa, Thermoanaerobacter tengcongensis
MAKRVKRAGRKREKKHVERGIAHIHSTFNNTIVTITDPAGNTIAWASAGTVGFKGSRKSTPFAAQMAAESAAKAAMDHGMRTVDVYVKGPGAGREAAIRALQAAGLEVSLIKDVTPIPHNGCRPPKRRRV

SEQ ID NO: 877 - DNA, 399 bp, Thermoplasma volcanium
  CDS (1)..(399): transl_table=11
atggaggtgaacaggatgaataaaacgggaattgcacatatatacgcatcacagaataatacaataatacacgtgactgatccaactggcgctgagacaatagcaatggtatctggcggcatggttgtaaaaaacgatagggatcaggctagcccttacgctgccatgaaggctgccgatatggtatccgagactttaaaagagcatgaaataactgatctgatcataaaggtaagagctccaggaggcaataaatctaaaatccccggcccaggtgctcaagcagcaataagggccctttcgagggcaggcctgaagatagtaaggattgaagaggtaactcctattccacacgatggaactaagaagaagggtggaaagagagggagaagggtttag

SEQ ID NO: 878 - protein, 132 aa, Thermoplasma volcanium
MEVNRMNKTGIAHIYASQNNTIIHVTDPTGAETIAMVSGGMVVKNDRDQASPYAAMKAADMVSETLKEHEITDLIIKVRAPGGNKSKIPGPGAQAAIRALSRAGLKIVRIEEVTPIPHDGTKKKGGKRGRRV

SEQ ID NO: 879 - DNA, 393 bp, Thiobacillus denitrificans
  CDS (1)..(393): transl_table=11
atggcgactaaaacagcagcgcgtgtccgcaagaaggtcaaaaagaacgtcgcagaaggtattgcgcacatccatgcctcgttcaacaacaccatcgtgacgatcaccgatcgccagggcaacgccctgtcgtgggcgacggcaggcggcgcgggcttcaagggctcccgcaagtcgacgccgttcgcggcccaggtcgccgcggaaaacgccggcaagatggcgcaggaatacggcgtcaagaacctggaagtgcggatcaagggccccggccctggccgcgagtcgacggtgcgcgcgctgaatgcgctcggcttcaagatcgttgcgatctccgatgtcacgccgatcccgcacaacggttgccgtccctccaaaaagcgtcgtatctaa

SEQ ID NO: 880 - protein, 130 aa, Thiobacillus denitrificans
MATKTAARVRKKVKKNVAEGIAHIHASFNNTIVTITDRQGNALSWATAGGAGFKGSRKSTPFAAQVAAENAGKMAQEYGVKNLEVRIKGPGPGRESTVRALNALGFKIVAISDVTPIPHNGCRPSKKRRI

SEQ ID NO: 881 - DNA, 381 bp, Treponema denticola
  CDS (1)..(381): transl_table=11
atggctactgtaaagaaaagaaaagaaaagaaaagcatatatgaaggcaatgtttatattcaagcaacctttaataacacaattattacgataaccgacttaaagggaaatgttctttcatgggcatcttcaggcggcttaggctttgccggtgccaaaaaatcgacaccctttgcggctcagaccgttgcagaaacagctgtacaaaagtgccagccctacggcttgcatgaggttcatgtttttgtaaaaggtcccggagtcggccgtgaatcggctatcagaacgcttggaacaatgggattaaaggttcgctcaatcagcgatgtaactcccattccgcacaacggctgccgtcccaagaagacgcgccgaatataa

SEQ ID NO: 882 - protein, 126 aa, Treponema denticola
MATVKKRKEKKSIYEGNVYIQATFNNTIITITDLKGNVLSWASSGGLGFAGAKKSTPFAAQTVAETAVQKCQPYGLHEVHVFVKGPGVGRESAIRTLGTMGLKVRSISDVTPIPHNGCRPKKTRRI

SEQ ID NO: 883 - DNA, 381 bp, Treponema pallidum
  CDS (1)..(381): transl_table=11
gtggcggtcacaaagaagcgtaaagaaaaaaagaatgtgtacgaggggaacgtgtatatccaggcgactttcaataacaccatcataacggttactgacctgcaaggaaatgcgctctcctgggcttcgtccgggggccttgggtttaatggggcaaagaaatctactccttttgcagcacagacggtcgcggaagctgcggtacagaaagcgcagcagtgcggactgcgtgaagtacatgtgtttgtcaaagggccgggtattgggcgtgagtcagcaattagaatgcttggtaccatgggactgagggtgcgttcgattcgcgacatcacacccattccacataacggctgtcgtccgcgtaaaactcgccgcatctga

SEQ ID NO: 884 - protein, 126 aa, Treponema pallidum
MAVTKKRKEKKNVYEGNVYIQATFNNTIITVTDLQGNALSWASSGGLGFNGAKKSTPFAAQTVAEAAVQKAQQCGLREVHVFVKGPGIGRESAIRMLGTMGLRVRSIRDITPIPHNGCRPRKTRRI

SEQ ID NO: 885 - DNA, 396 bp, Trichodesmium erythraeum
  CDS (1)..(396): transl_table=11
atggcacgacaaccaacaaaaaaaacaggcccgaaaaaacaaaaaaagaatgtgcccaatggggtagcttacatccagtctacctttaataatacgattgtaactattgctgacctaaatggtgaagtaatttcttgggcttcggcaggttcaagtggtttcaagggggccaaaaaaggaactccctttgcagcacagacagcagcagaaagtgcagcacgccgagccaacgatcaaggaatgcgtcaggttcaagtgatggtaagtgggccaggggcaggaagagaaactgcaattagagctttacagggggctggtctagaaataactttgattcgagatattaccccaattcctcataatggttgccgtccaccaaaacggcgtagagtctaa

SEQ ID NO: 886 - protein, 131 aa, Trichodesmium erythraeum
MARQPTKKTGPKKQKKNVPNGVAYIQSTFNNTIVTIADLNGEVISWASAGSSGFKGAKKGTPFAAQTAAESAARRANDQGMRQVQVMVSGPGAGRETAIRALQGAGLEITLIRDITPIPHNGCRPPKRRRV

SEQ ID NO: 887 - DNA, 393 bp, Tropheryma whipplei
  CDS (1)..(393): transl_table=11
ttgtcaaaacaggctcagagtaggtcgcgcaaaaaagctaggaaaaatatccctgcaggccttgcccatataaagtcaactttcaataacacgattgttacgataaccgacctatctggcaatgtaattggctggtcatcgagtggtgcagttggctttaaaggatccagaaagtcaacaccctatgccgcacagatggcagccgatgctgccgctcgctctgctcaggagcacggagtgaagaaagtggatgtgtttgtaaagggtccgggttccggcagggagactgccatacggtccctccagacggcaggtcttgagataggctccataagcgacacgacccctcttgcgttcaatggatgtcgcccccctaagaaacgcctggtttaa

SEQ ID NO: 888 - protein, 130 aa, Tropheryma whipplei
MSKQAQSRSRKKARKNIPAGLAHIKSTFNNTIVTITDLSGNVIGWSSSGAVGFKGSRKSTPYAAQMAADAAARSAQEHGVKKVDVFVKGPGSGRETAIRSLQTAGLEIGSISDTTPLAFNGCRPPKKRLV

SEQ ID NO: 889 - DNA, 366 bp, Ureaplasma parvum
  CDS (1)..(366): transl_table=4
atggcaaagaagaaaaaacttagttttactaatggaattgcatatattcatgcaactaaaaataatacgattattactttggctgatgaacaaggaagcgttttatcttgagcatcatctggttcaatcggttataaaggaacaaagaaaaaaactccatattcagcaggtattgctgctgaagctgcagcaaaagctgtgattgatatgggattaaaatctgttgaagttcatgttaatggaacaggtgcaagtcgtgatacagcaattcgtagcctacaagcagcaggtttagaagtaacaaaaattaaagatgttactccaattccacataatgggtgtcgtccacctaaaaaaccaagatag

SEQ ID NO: 890 - protein, 121 aa, Ureaplasma parvum
MAKKKKLSFTNGIAYIHATKNNTIITLADEQGSVLSWASSGSIGYKGTKKKTPYSAGIAAEAAAKAVIDMGLKSVEVHVNGTGASRDTAIRSLQAAGLEVTKIKDVTPIPHNGCRPPKKPR

SEQ ID NO: 891 - DNA, 390 bp, Vibrio cholerae
  CDS (1)..(390): transl_table=11
atggctaaacaaccaactcgcgcacgtaagcgtgtacgcaagcaagttgctgatggcgtagcgcatatccacgcatctttcaacaacacaatcgtaaccattacggaccgtcaaggtaatgctcttgcttgggcaactgctggtggttctggtttccgcggttctcgtaagtctactccgttcgctgcacaggttgctgctgagcgttgtgctgaaatggctaaagaatacggcctaaagaacctagaggttatggttaagggtcctggtccaggtcgtgaatctactgttcgcgctctgaatgcagctggtttccgtatcacgaacatcgttgatgctacaccaatccctcataacggttgtcgtccaccgaagaaacgtcgcgtttaa

SEQ ID NO: 892 - protein, 129 aa, Vibrio cholerae
MAKQPTRARKRVRKQVADGVAHIHASFNNTIVTITDRQGNALAWATAGGSGFRGSRKSTPFAAQVAAERCAEMAKEYGLKNLEVMVKGPGPGRESTVRALNAAGFRITNIVDATPIPHNGCRPPKKRRV

SEQ ID NO: 893 - DNA, 396 bp, Wigglesworthia glossinidia brevipalpis
  CDS (1)..(396): transl_table=11
atgtctaaaaaacaaaattctagtatttctagaaaaaaaattaaaaggcaaattttagaaggaatagcacatattcatgcatcatttaataatactattgttactataacagatcgtcaaggaaatacattaggttgggctacatctggaggatctgggtttcgtggttctagaaaatccacgccttttgccgcacaagttgctgcggaaaaatgttctgaaatagcaaaagaatatggaataaaaaatttggaaataatggtaaaagggccagggccaggaagagaatctacaataagagctttaaattcatctgggtttaaaatcaccaatattactgatgtaactcctataccacataatggatgcagacctccaaaaagaagaagagtttaa

SEQ ID NO: 894 - protein, 131 aa, Wigglesworthia glossinidia brevipalpis
MSKKQNSSISRKKIKRQILEGIAHIHASFNNTIVTITDRQGNTLGWATSGGSGFRGSRKSTPFAAQVAAEKCSEIAKEYGIKNLEIMVKGPGPGRESTIRALNSSGFKITNITDVTPIPHNGCRPPKRRRV

SEQ ID NO: 895 - DNA, 387 bp, Wolbachia pipientis wMel
  CDS (1)..(387): transl_table=11
atgaaaaaagtcaaaacggttagtaagagtaagaaggagtttattactggtgttgtccatattcgtgcaacttttaataatacttttgtaaatgtaactgatgttcatggtaatacgctatgtcaaacttctgtgggtgcatgtggtttttcaggttcgagaaaatccacaccttatgctgcaggtaaggctgcggagtctgctgcgaagaacgcaatggagagatttggtatgaaggttgtctctgtaataattcgcggccctggctttggtaccgaagctgcggttaaagcatttcagagctgtgggttgactgtgacttcaattgcagataaaaccgcaattcctcataatgggtgcaggttaagaaaaaaaagaagagtatag

SEQ ID NO: 896 - protein, 128 aa, Wolbachia pipientis wMel
MKKVKTVSKSKKEFITGVVHIRATFNNTFVNVTDVHGNTLCQTSVGACGFSGSRKSTPYAAGKAAESAAKNAMERFGMKVVSVIIRGPGFGTEAAVKAFQSCGLTVTSIADKTAIPHNGCRLRKKRRV

SEQ ID NO: 897 - DNA, 396 bp, Wolinella succinogenes
  CDS (1)..(396): transl_table=11
atggcaaaaagaaaagtaacaaacaaaaaaagagttgtcaagaagaatatagcccgaggaatcattcacatcgctgcaacgttcaataacactagcgttacgatcactgatgagatgggaaatgttatttgctggagtaccgcgggggctttgggcttcaagggaagcaaaaaatcgactccctatgcagcgcaacaagcggttgaggatgcagtagtaaaggccaaagagcacggaatcaaggaacttggaatcaaggttcaaggtcctggaagtggacgcgaaacagccgtaaagagcctcggttctattgaaggaatcaaagtattgtggtttaaagatgtcactccattgccccacaatggatgccgaccgcccaagcgccgaagagtgtaa

SEQ ID NO: 898 - protein, 131 aa, Wolinella succinogenes
MAKRKVTNKKRVVKKNIARGIIHIAATFNNTSVTITDEMGNVICWSTAGALGFKGSKKSTPYAAQQAVEDAVVKAKEHGIKELGIKVQGPGSGRETAVKSLGSIEGIKVLWFKDVTPLPHNGCRPPKRRRV

SEQ ID NO: 899 - DNA, 393 bp, Xanthomonas axonopodis pv
  CDS (1)..(393): transl_table=11
atggccaagccagcagaaaagaaaacgaagaagaagatcaagcgcgtcatcaccgacggcgtcgctcacgtccacgcttcgttcaacaacaccatcgtcaccatcaccgatcgccagggcaacgcgctgtcgtgggctacgtccggcggcgccggtttccgtggttcgcgcaagtcgaccccgttcgctgcccaggttgccgccgagaaggctggccgcgctgcgctcgattacggcgtgaagtcgctggaagtgcgtatcaagggtccgggtccgggccgtgagtcggccgtgcgttcgttgaacaacgtgggctacaagatcaccaacatcatcgacgtgacgccaatcccgcacaacgggtgccgtccgccgaagaagcgtcgcgtctaa

SEQ ID NO: 900 - protein, 130 aa, Xanthomonas axonopodis pv
MAKPAEKKTKKKIKRVITDGVAHVHASFNNTIVTITDRQGNALSWATSGGAGFRGSRKSTPFAAQVAAEKAGRAALDYGVKSLEVRIKGPGPGRESAVRSLNNVGYKITNIIDVTPIPHNGCRPPKKRRV

SEQ ID NO: 901 - DNA, 393 bp, Xylella fastidiosa
  CDS (1)..(393): transl_table=11
atggctaaacagtctgttgtaaaaattaagaagaaggttaagcgtgttatcaccgatggcgttgcccatatttccgcttctttcaataatactattgttaccattactgaccgacagggtaattcgttgttctggtgtacttccggtgcttctggttttcgcgggtcacgtaaatgtactccttttgctgcgcaggtagctgccgagaaagctgggcgtgctgtcttagattatggaatgaaatctttggaagttcggatcaatggtcccggtcctggtcgagaatcggcagtccgttctttaaataacgtcggttataaaattacaaatatcattgatgtgacgccaatccctcataatggctgtcgtcctccaaaaaagcgtcgtgtctaa

SEQ ID NO: 902 - protein, 130 aa, Xylella fastidiosa
MAKQSVVKIKKKVKRVITDGVAHISASFNNTIVTITDRQGNSLFWCTSGASGFRGSRKCTPFAAQVAAEKAGRAVLDYGMKSLEVRINGPGPGRESAVRSLNNVGYKITNIIDVTPIPHNGCRPPKKRRV

SEQ ID NO: 903 - DNA, 393 bp, Xylella fastidiosa
  CDS (1)..(393): transl_table=11
atgtctaaacagtctgttgtcaaaactaagaagagggttaagcgtgttatcaccgatggcgttgcccatatttgcgcttctttcaataatactattgttacaattactgaccgacagggtaattctttgttctggtgtacctccggtgcttctggttttcgcgggtcacgtaaatgtacaccttttgctgcgcaggtagctgccgagaaggctgggcgtgccgtgttagattatggaatgaaatctttggaagtgcggatcaatggtccaggtcctggtcgagaatcagcagtccgttctttaagtaatgtcggttataaaattacaaatatcattgatgtgacgccaatcccgcataatggttgtcgtcctccaaaaaagcgtcgtgtctaa

SEQ ID NO: 904 - protein, 130 aa, Xylella fastidiosa
MSKQSVVKTKKRVKRVITDGVAHICASFNNTIVTITDRQGNSLFWCTSGASGFRGSRKCTPFAAQVAAEKAGRAVLDYGMKSLEVRINGPGPGRESAVRSLSNVGYKITNIIDVTPIPHNGCRPPKKRRV

SEQ ID NO: 905 - DNA, 390 bp, Zymomonas mobilis
  CDS (1)..(390): transl_table=11
atggcacgcgaaccgcagcgcgttaaaagacgcgagcgtaaaaatatttcagccggcgtagctcatgttaacgccagcttcaataatacaatgatcaccatcaccgatgcacagggaaatgctatttcctggtcatctgctggtatgatgggcttcaagggcagccgtaaatcgacgccttatgctgcacaggttgccgcagaagatgccggtaaaaaggccgctgaacatggtgtccgcactttagaagtcgaagttaaaggtccgggttcaggtcgtgaatctgcccttcgcgctttgcaggctgtcggttttcatatcacttctatccgtgatgtgaccccgattccgcataatggcgtgcgtccttctaaacggcgtcgtgtctga

SEQ ID NO: 906 - protein, 129 aa, Zymomonas mobilis
MAREPQRVKRRERKNISAGVAHVNASFNNTMITITDAQGNAISWSSAGMMGFKGSRKSTPYAAQVAAEDAGKKAAEHGVRTLEVEVKGPGSGRESALRALQAVGFHITSIRDVTPIPHNGVRPSKRRRV

SEQ ID NO: 907 - DNA, 453 bp, Arabidopsis thaliana
  CDS (1)..(453)
atgtcaaagagaaagactaaagagccaaaggtcgatgttgtgactcttggaccatctgttcgtgagggagagcaagttttcggtgttgtccacatctttgcttcattcaacgacactttcattcatgttactgatttgtctggtcgtgaaactcttgtccgtatcaccggtggaatgaaggtgaaagctgatagagatgagtcctcaccttacgcagctatgcttgcagcacaggatgttgctcagcgatgcaaggaacttggtatcactgccatgcatgtgaagctccgtgccacaggtggaaacaagaccaagacacctggtcctggagcacagtctgcccttagagcccttgctcgttccggcatgaaaataggccgtattgaggatgttactcccatcccaacagacagtacccgcagaaagggtggtagaagaggaagaaggctctga

SEQ ID NO: 908 - protein, 150 aa, Arabidopsis thaliana
MSKRKTKEPKVDVVTLGPSVREGEQVFGVVHIFASFNDTFIHVTDLSGRETLVRITGGMKVKADRDESSPYAAMLAAQDVAQRCKELGITAMHVKLRATGGNKTKTPGPGAQSALRALARSGMKIGRIEDVTPIPTDSTRRKGGRRGRRL

SEQ ID NO: 909 - DNA, 453 bp, Arabidopsis thaliana
  CDS (1)..(453)
atgtcgaagagaaaaactaaggagccaaaggttgagactgtgactcttggaccttctgttcgtgaaggagagcaagtttttggtgttgttcacatctttgcatctttcaatgacactttcattcatgtgactgatctctccggtagagaaactctcgtccgcatcaccggtggcatgaaggtgaaggctgaccgtgatgagtcctctccttatgctgctatgcttgcagctcaagatgttgctcaaagatgcaaggagcttggcatcactgccatgcacgtgaagctccgtgctactggaggaaacaaaaccaagactccaggtcctggtgctcagtctgctcttagagcccttgctcgttctggcatgaagattggtcgtattgaggatgtgactccgattcccacagacagtacacgccgaaagggtggacgaagaggaagaagactctga

SEQ ID NO: 910 - protein, 150 aa, Arabidopsis thaliana [sequence omitted]

SEQ ID NO: 911 - DNA, 453 bp, Arabidopsis thaliana
  CDS (1)..(453)
atgtcgaagagaaagaccaaagagccaaaggttgagaatgtgactcttggaccagctgttcgtgaaggagagcaagtctttggagttgttcacgtctttgcttcattcaacgacactttcattcacgtgactgatttgtctggacgggaaacacttgttcgcatcactggtggaatgaaggtgaaagccgacagagatgagtcctcaccttatgctgctatgcttgcggcacaagatgttgctcagcgatgcaaggaacttggaatcactgccatacatgtgaaactccgtgccactggtggtaacaagaccaagacccctggacctggtgctcagtctgctctaagagcccttgcccgttctggcatgaaaattggtcgcattgaggatgtgactccaatcccaaccgacagtacccgcagaaagggtggaagaagaggaaggaggctctga

SEQ ID NO: 912 - protein, 150 aa, Arabidopsis thaliana
MSKRKTKEPKVENVTLGPAVREGEQVFGVVHVFASFNDTFIHVTDLSGRETLVRITGGMKVKADRDESSPYAAMLAAQDVAQRCKELGITAIHVKLRATGGNKTKTPGPGAQSALRALARSGMKIGRIEDVTPIPTDSTRRKGGRRGRRL

SEQ ID NO: 913 - DNA, 414 bp, Saccharomyces cerevisiae
  CDS (1)..(414)
atgtctaacgttgttcaagctcgtgacaattcccaagtttttggtgttgctagaatttacgcttctttcaacgatactttcgttcatgttaccgatttatctggtaaggaaaccatcgccagagttactggtggtatgaaggttaaggctgacagagatgaatcttctccatacgctgctatgttggctgcccaagatgttgccgctaagtgtaaggaagtcggtatcactgccgttcacgttaagatcagagctaccggtggtactagaaccaagactccaggtccaggtggtcaagctgctttgagagctttggccagatctggtttgagaattggccgtatcgaagatgttaccccagttccatctgactccaccagaaagaagggtggtagaagaggtagaagattatga

SEQ ID NO: 914 - protein, 137 aa, Saccharomyces cerevisiae
MSNVVQARDNSQVFGVARIYASFNDTFVHVTDLSGKETIARVTGGMKVKADRDESSPYAAMLAAQDVAAKCKEVGITAVHVKIRATGGTRTKTPGPGGQAALRALARSGLRIGRIEDVTPVPSDSTRKKGGRRGRRL

SEQ ID NO: 915 - DNA, 417 bp, Saccharomyces cerevisiae
  CDS (1)..(417)
atggctaacgaccttgttcaagctcgcgataactctcaagtctttggtgttgccagaatctacgcctcctttaacgatacctttgtacatgttaccgatttatctggtaaggaaactatcgccagagttactggtggtatgaaagtcaaggccgacagagacgaatcatctccatacgctgctatgttggctgcccaagatgttgccgctaagtgtaaggaagtcggtatcactgccgttcacgttaagatcagagctactggtggtaccagaaccaagaccccaggaccaggtggtcaagccgctttgagagctttggccagatctggtttgaggattggccgtatcgaagacgttactccagtcccatcagactccaccagaaagaagggtggtagaagaggtagaagattatga

SEQ ID NO: 916 - protein, 138 aa, Saccharomyces cerevisiae
MANDLVQARDNSQVFGVARIYASFNDTFVHVTDLSGKETIARVTGGMKVKADRDESSPYAAMLAAQDVAAKCKEVGITAVHVKIRATGGTRTKTPGPGGQAALRALARSGLRIGRIEDVTPVPSDSTRKKGGRRGRRL

SEQ ID NO: 917 - DNA, 405 bp, Candida albicans
  CDS (1)..(405): transl_table=12
atgtattacacctcataccgttcccaagttttcggtgttgctagaatttttgcttcattcaacgatactttcgtccacgttactgatttatcagggaaagaaaccattgccagagttactggtggtatgaaagtcaaagctgacagagatgaatcatctccatacgctgctatgttggctgctcaagatgttgctgctaaatgtaaagaagttggtattactgctgttcacattaaattgagagctactggtggtactaaaactaaaaccccaggtccaggtggtcaatccgctttaagagctttagccagatctggtttaagaattggtagaattgaagatgttaccccagttccatctgattctactagaagaaagggtggtagaagaggtagaagattatga

SEQ ID NO: 918 - protein, 134 aa, Candida albicans
MYYTSYRSQVFGVARIFASFNDTFVHVTDLSGKETIARVTGGMKVKADRDESSPYAAMLAAQDVAAKCKEVGITAVHIKLRATGGTKTKTPGPGGQSALRALARSGLRIGRIEDVTPVPSDSTRRKGGRRGRRL

SEQ ID NO: 919 - DNA, 462 bp, Chlamydomonas reinhardtii
  CDS (1)..(462)
atggcccccaagaaggccgccaagggtgatgaggcccccaaggaggtggtgagcctgggccccaccgtccgcgagggcgagcacgtcttcggcgttgctcacatcttcgccagcttcaacgacacgttcgtgcatgtgaccgacctgtcgggccgggaaactatttcgcgcgtcaccggcggcatgaaggtcaaggccgaccgcgacgagtcgtcgccctacgcggccatgcttgccgcgcaggacgtggcccagaagtgcaaggagctgggcatcactgccctgcacatcaagctgcgcgccaccggcggcaaccggaccaagacccccggccccggtgcccagtccgccctgcgtgccctggcccgcgcgggcatgaagattggccgcatcgaggacgtgacccccatccccaccgactccacccgccggaagggtggtcgccgcggtcgccgcctgtag

SEQ ID NO: 920 - protein, 153 aa, Chlamydomonas reinhardtii
MAPKKAAKGDEAPKEVVSLGPTVREGEHVFGVAHIFASFNDTFVHVTDLSGRETISRVTGGMKVKADRDESSPYAAMLAAQDVAQKCKELGITALHIKLRATGGNRTKTPGPGAQSALRALARAGMKIGRIEDVTPIPTDSTRRKGGRRGRRL

SEQ ID NO: 921 - DNA, 456 bp, Drosophila melanogaster
  CDS (1)..(456)
atggctccaagaaaggctaaagttcagaaggaggaggttcaggtccagctgggaccccaagttcgcgacggcgagatcgtgttcggagtggctcacatctacgccagcttcaacgacaccttcgtccatgtcacggatctgtccggccgtgagaccatcgctcgtgtcaccggaggcatgaaggtgaaggccgatcgtgatgaggcttcgccctacgccgctatgttggccgctcaggatgtggctgagaagtgcaagacactgggcatcactgccctgcatattaagctgcgtgccaccggcggcaacaagaccaagacccccggacccggcgcccagtccgctctgcgtgcgttggcccgttcgtccatgaagattggccgcatcgaggatgtgacccctatcccatcggactctacccgcaggaagggcggtcgccgaggtcgtcgtctgtag

SEQ ID NO: 922 - protein, 151 aa, Drosophila melanogaster
MAPRKAKVQKEEVQVQLGPQVRDGEIVFGVAHIYASFNDTFVHVTDLSGRETIARVTGGMKVKADRDEASPYAAMLAAQDVAEKCKTLGITALHIKLRATGGNKTKTPGPGAQSALRALARSSMKIGRIEDVTPIPSDSTRRKGGRRGRRL

SEQ ID NO: 923 - DNA, 414 bp, Kluyveromyces lactis
  CDS (1)..(414)
atggctaacgttgttcaagctaaggataactctcaagttttcggtgttgctagaatcttcgcttctttcaacgacactttcgtgcacgtcactgatttgtccggtagagaaactatcgccagagttactggtggtatgaaggtcaaggccgacagagacgaatcttctccatatgctgccatgttggctgcccaagatgttgctgccaagtgtaaggaagttggtatcactgccgttcacatcaagatcagagctacggggggtactagatccaagactccaggtccaggtggtcaagctgctttgagagctttggctagatccggtttgagaatcggtcgtatcgaagatgttactccagttccatctgactccaccagaaagaagggtggtagaagaggtagaagattatga

SEQ ID NO: 924 - protein, 137 aa, Kluyveromyces lactis
MANVVQAKDNSQVFGVARIFASFNDTFVHVTDLSGRETIARVTGGMKVKADRDESSPYAAMLAAQDVAAKCKEVGITAVHIKIRATGGTRSKTPGPGGQAALRALARSGLRIGRIEDVTPVPSDSTRKKGGRRGRRL

SEQ ID NO: 925 - DNA, 453 bp, Lupinus luteus
  CDS (1)..(453)
atgtcgaggagaaaggttagggacacaaaggaagaaactgttacacttggtcctgctgttagcgatggtgaacatgtttttggtgtggctcgtatctttgcttcatttaatgataccttcattcatgtgactgatttgtctgggagggaaacacttgttagaatcacaggtggaatgaaggttaaagctgaccgagatgagtcatctccttatgctgctatgcttgcagcacaggatgttgctaccagatgcaaggagcttggcattactgctcttcacatcaagctccgtgccactggtggaaacaaaactaaaactccaggtcgcggtgctcagtctgctctccgtgccttggctcgttcaggaatgaaaatcggccgcatagaggatgtgactccaattccatccgacagcacccgtagaaagagtggtagaaggggtagaaggctttag

SEQ ID NO: 926 - protein, 150 aa, Lupinus luteus
MSRRKVRDTKEETVTLGPAVSDGEHVFGVARIFASFNDTFIHVTDLSGRETLVRITGGMKVKADRDESSPYAAMLAAQDVATRCKELGITALHIKLRATGGNKTKTPGRGAQSALRALARSGMKIGRIEDVTPIPSDSTRRKSGRRGRRL

SEQ ID NO: 927 - DNA, 453 bp, Neurospora crassa
  CDS (1)..(453)
atgcccccgaagaaggccgcccgtcccgctcaggagaacatctcccttggccctcagatccgtgagggtgagctcgttttcggcgttgctcgcatcttcgcttccttcaacgacaccttcgtccacgtcaccgatctcagtggccgcgagaccactgaccgtgtcattggtggcataaaggtcaaggccgaccgtgacgagtcctccccctacgccgctatgttggctgcccaggacgtcgctgcccgctgcaaggagctcggcattactgccctccacatcaagatccgtgccactggtggtaacggcaccaggacccccggccccggtgcccagtctgctctccgtgcccttgctcgctctggcatgaagatcggtcgtatcgaggacgtcacccccaccccctccgactctactcgtcgcaagggtggtcgccgtggtcgtcgtctctga

SEQ ID NO: 928 - protein, 150 aa, Neurospora crassa
MPPKKAARPAQENISLGPQIREGELVFGVARIFASFNDTFVHVTDLSGRETTDRVIGGIKVKADRDESSPYAAMLAAQDVAARCKELGITALHIKIRATGGNGTRTPGPGAQSALRALARSGMKIGRIEDVTPTPSDSTRRKGGRRGRRL

SEQ ID NO: 929 - DNA, 456 bp, Procambarus clarkii
  CDS (1)..(456)
atggctccccgtaaaggaaaagttcagaaggaggaggtgcaagtccagcttggcccacaagtgcttgatggggaaaaagtatttgctgtgtgtcacatttatgccagctacaacgacacatttgtacacgtgactgatctatctggccgtgaaaccattgtccgcatcactggaggacagaaagtgaaggcagatcgtgacgagtcttcgccttatgctgctatgttggctgctcaggatgttgcagagaaatgtaaatccctgggtatcaattgcttgcacattaagatccgtgccactggtggcaacaagacaaagactccgggacctggagggcagtctgcattacgagctttagcccgtgctggcatgaagattggtcgcattgaggatgttactccagtgccctctgacagtacacgcaggaagggaggtcgccgtggtaggcgtctgtag

SEQ ID NO: 930 - protein, 151 aa, Procambarus clarkii
MAPRKGKVQKEEVQVQLGPQVLDGEKVFAVCHIYASYNDTFVHVTDLSGRETIVRITGGQKVKADRDESSPYAAMLAAQDVAEKCKSLGINCLHIKIRATGGNKTKTPGPGGQSALRALARAGMKIGRIEDVTPVPSDSTRRKGGRRGRRL

SEQ ID NO: 931 - DNA, 420 bp, Schizosaccharomyces pombe
  CDS (1)..(420)
atggctactaacgttggccctcaaatccgttccggtgagcttgttttcggcgttgctcacatcttcgcctcctttaatgatacattcgttcacatcactgatttgaccggcaaggaaaccattgttcgtgtcaccggtggtatgaaggtcaagactgatcgtgatgagtcttctccttacgctgctatgttagccgcccaagacgctgctgctaagtgcaaggaagttggtatcactgctcttcacatcaagatccgtgctactggtggtactgctaccaagacccctggtcctggtgctcaagctgcccttcgtgccttggcccgtgctggtatgcgtattggccgtattgaggatgttactcccatccccactgattctactcgtagaaagggtggtcgtcgtggtcgcagactttaa

SEQ ID NO: 932 - protein, 139 aa, Schizosaccharomyces pombe
MATNVGPQIRSGELVFGVAHIFASFNDTFVHITDLTGKETIVRVTGGMKVKTDRDESSPYAAMLAAQDAAAKCKEVGITALHIKIRATGGTATKTPGPGAQAALRALARAGMRIGRIEDVTPIPTDSTRRKGGRRGRRL

SEQ ID NO: 933 - DNA, 405 bp, Tortula ruralis
  CDS (1)..(405)
atgtctggggaaagaagaaaggtcagagccgtattcggcgtcgctcacatcttcgcctcattcaacgacaccttcgtgcacgtgactgatctctcaggaaaggagacatcgctcgtgttaactggtggcatgaaggtcaaggctgacagagatgaggcatcaccctacgctgctatgcttgccgctcaggatgttgcccagaggtgcaaggagttgggaatcaccgctcttcacatcaacgtccgcgctaccggaggcaacaagaccaagacccccggccccggagcccagtccctccgtgcgctggctcgttctggcatgagaatcggccgcattgaggatgtgaccccgatccccaccgacagcaccaggcggaagggaggacgcaggggccgtcgtctctag

SEQ ID NO: 934 - protein, 134 aa, Tortula ruralis
MSGERRKVRAVFGVAHIFASFNDTFVHVTDLSGKETSLVLTGGMKVKADRDEASPYAAMLAAQDVAQRCKELGITALHINVRATGGNKTKTPGPGAQSLRALARSGMRIGRIEDVTPIPTDSTRRKGGRRGRRL

SEQ ID NO: 935 - DNA, 378 bp, Marchantia polymorpha
  CDS (1)..(378)
atgcaaaaaaagcacggtattactaatatgcaaaaaaaacactgtattacttatattcaatcaacttttggtaatacaattattactttaacagattataacggaaatacaaaaacttggtcctcctcaggttcagtggggtttaagggatctcgtcgctcaaccaattatgctgctcaagcaactgcagaaaatgccgcgcgagttgccattcaacttggatttaagtttgttgaagtgagaataaaaggattaggttatggaaaggaatcttcactacgtggtttaaaactaggaggtcttattattaccaaaattcgcgatgtaaccccaacgccacataatggatgccgaccccctaaaaaacgtcgtgtttaa

SEQ ID NO: 936 - protein, 125 aa, Marchantia polymorpha
MQKKHGITNMQKKHCITYIQSTFGNTIITLTDYNGNTKTWSSSGSVGFKGSRRSTNYAAQATAENAARVAIQLGFKFVEVRIKGLGYGKESSLRGLKLGGLIITKIRDVTPTPHNGCRPPKKRRV

SEQ ID NO: 937 - DNA, 387 bp, Prototheca wickerhamii
  CDS (1)..(387)
atgcttgtaaaaaaatctcaaatttctagaaaatttattgaaaaaaaaagtggaattgtacatatacaaagtacaacaaataacactttaataactcttactgatttagaaggtaatacacaattttttgtatctgcaggtactttaggttttaaaaattcacgaaaatctacagtttacgcttcaggagctgcagcagaagctttagctagtaaagcatttaacgaaggctatcgtacaattattgtaaaaattaaaggcttaggttatggaaaaaaaagtgcaattcgcgggcttcagaaatcaaatttagttataaaacagattcaagaagttacacctatcgctcataatggttgccgtcctccaaaaaaacgtcgcgtttaa

SEQ ID NO: 938 - protein, 128 aa, Prototheca wickerhamii
MLVKKSQISRKFIEKKSGIVHIQSTTNNTLITLTDLEGNTQFFVSAGTLGFKNSRKSTVYASGAAAEALASKAFNEGYRTIIVKIKGLGYGKKSAIRGLQKSNLVIKQIQEVTPIAHNGCRPPKKRRV

SEQ ID NO: 939 - DNA, 456 bp, Triticum aestivum
  CDS (1)..(456)
atgcctcccaagaagaccgccccccgtgctccccaggagaacatctccctcggaccttccgttcgcgatggcgagctggtcttcggcgttgcccgtatcttcgcctccttcaacgataccttcgtccacgtcaccgatctgagtggccgtgagactatcacccgtgttactggtggtatgaaggtcaaggccgaccgtgacgagtcctccccctacgctgccatgttggctgcccaggacgtcgctgcccgctgcaaggagcttggcatcaacgctcttcacatcaagatccgtgccactggtggtaacggtaccaagacccccggtcccggtgcccagtccgctctccgtgcccttgcccgtgctggcatgaagattggccgaactgaggacgttacccctactccttccgactctacccgcagaaagggtggtcgccgtggtcgtcgtctctga

SEQ ID NO: 940 - protein, 151 aa, Triticum aestivum
MPPKKTAPRAPQENISLGPSVRDGELVFGVARIFASFNDTFVHVTDLSGRETITRVTGGMKVKADRDESSPYAAMLAAQDVAARCKELGINALHIKIRATGGNGTKTPGPGAQSALRALARAGMKIGRTEDVTPTPSDSTRRKGGRRGRRL

SEQ ID NO: 941 - DNA, 456 bp, Zea mays
  CDS (1)..(456)
atgtctgggaggaagaagacgcgggagcccaaggaggagaacgtgacgcttggccccgctgtccgcgagggagaacacgtctttggcgttgcgcacatcttcgcctccttcaacgacactttcatccatgtgacggatctgtctggaagggagacgctcgtccgcatcactggtggcatgaaggttaaagctgatcgtgatgagtcctcgccttatgctgctatgcttgcctcacaggaggtcgcgcaaagatgcaaggagcttggaattactgcattgcacattaagctccgtgctactggtggaaacaagaccaaaacccctggccctggtgctcagtctgctcttagagctcttgctcgatctggcatgaagataggccgtattgaggatgttactccagtccccacagacagcacacgcagaaagggtggtagaagaggaaggaggctgtaa

SEQ ID NO: 942 - protein, 151 aa, Zea mays
MSGRKKTREPKEENVTLGPAVREGEHVFGVAHIFASFNDTFIHVTDLSGRETLVRITGGMKVKADRDESSPYAAMLASQEVAQRCKELGITALHIKLRATGGNKTKTPGPGAQSALRALARSGMKIGRIEDVTPVPTDSTRRKGGRRGRRL

SEQ ID NO: 943 - DNA, 456 bp, Hordeum vulgare
  CDS (1)..(456)
atgtcagggaggaagaagacccgcgagcccaaggaggagaacgtgacgctcggccccgccgtccgcgagggggagcacgtcttcggcgtcgcgcacatcttcgcctccttcaacgacactttcatccatgtcacggatctgtccgggagggagacgctcgtccgcatcaccggtgggatgaaggttaaagctgatcgtgatgaatcatccccttatgcagctatgcttgcatcacaggatgttgctgtaagatgcaaggagcttggaattactgctctgcacattaagctccgtgctactggtggaaacaagacaaaaactccaggtcctggtgctcaagctgcgcttagagctcttgcacgttctggcatgaagattggacgcattgaggatgttactccagtcccaactgacagcactcgccggaagggtggtagaagaggaaggaggctgtaa

SEQ ID NO: 944 - protein, 151 aa, Hordeum vulgare
MSGRKKTREPKEENVTLGPAVREGEHVFGVAHIFASFNDTFIHVTDLSGRETLVRITGGMKVKADRDESSPYAAMLASQDVAVRCKELGITALHIKLRATGGNKTKTPGPGAQAALRALARSGMKIGRIEDVTPVPTDSTRRKGGRRGRRL

SEQ ID NO: 945 - DNA, 453 bp, Brassica napus
  CDS (1)..(453)
atgtcgaggagaaagaccagagagcctaaggaggaaactgtcactctcggaccagctgttcgtgatggtgagcaagtctttggagttgttcacatctttgcttccttcaatgacacattcattcatgtgactgatctgtctggaagggaaactctcgttcgtatcactggtggaatgaaagtaaaggctgaccgtgatgagtcctctccttatgctgctatgcttgctgctcaagatgttgctcaaagatgcaaggagcttggcatcacagctatgcatgtgaaactccgcgccactggaggaaacaagactaagaccccaggtcctggtgctcagtctgccctcagagctcttgctcgttctggcatgaagattggtcgcattgaggatgtgactccaattccaaccgatagcacccgtagaaagggtggtagaaggggaagacgtctttga

SEQ ID NO: 946 - protein, 150 aa, Brassica napus
MSRRKTREPKEETVTLGPAVRDGEQVFGVVHIFASFNDTFIHVTDLSGRETLVRITGGMKVKADRDESSPYAAMLAAQDVAQRCKELGITAMHVKLRATGGNKTKTPGPGAQSALRALARSGMKIGRIEDVTPIPTDSTRRKGGRRGRRL

SEQ ID NO: 947 - DNA, 453 bp, Glycine max
  CDS (1)..(453)
atgtcgaggagaaaggttagagagccaaaggaggaaaacgtgactctgggcccagctgttagagatggtgaacatgtttttggagtcgctcgcatctttgcctccttcaatgacaccttcattcatgtcactgatctgtctgggagggaaacacttgtccgcatcactggcgggatgaaggttaaagctgacagagatgaatcatctccatatgctgctatgcttgctgcgcaggatgttgctgctagatgcaaggaactgggcataactgctcttcatatcaagctccgtgccacaggtggaaacaagacaaaaacaccaggtcctggtgctcaatcagctcttcgagcccttgctcgttcaggaatgaaaattggtcgcatagaggatgtgacccccattccttccgatagcacacggagaaagagtggtagaaggggtagaaggctttaa

SEQ ID NO: 948 - protein, 150 aa, Glycine max
MSRRKVREPKEENVTLGPAVRDGEHVFGVARIFASFNDTFIHVTDLSGRETLVRITGGMKVKADRDESSPYAAMLAAQDVAARCKELGITALHIKLRATGGNKTKTPGPGAQSALRALARSGMKIGRIEDVTPIPSDSTRRKSGRRGRRL

SEQ ID NO: 949 - DNA, 453 bp, Glycine max
  CDS (1)..(453)
atgtcgaggagaaaggttagggagccaaaggaggaaaatgtcactcttggtccagccgttagagacggtgaacatgttttcggcgtggctcgcatctttgcctccttcaacgacaccttcatccatgtcactgatttgtctgggagggaaacccttgttcgcatcactggtgggatgaaagttaaagctgacagagatgaatcatctccatatgctgctatgcttgcagcacaggatgttgctgccagatgtaaggaactgggcataactgctcttcatatcaggctccgtgccactggtggaaacaagaccaaaacacctggtcctggtgctcaatcagctcttcgagcccttgcacgttcaggaatgaaaattggtcgtatagaggatgttactcccattccttcggatagtacacgtagaaagagtggtagaaggggtagaagactttaa

SEQ ID NO: 950 - protein, 150 aa, Glycine max
MSRRKVREPKEENVTLGPAVRDGEHVFGVARIFASFNDTFIHVTDLSGRETLVRITGGMKVKADRDESSPYAAMLAAQDVAARCKELGITALHIRLRATGGNKTKTPGPGAQSALRALARSGMKIGRIEDVTPIPSDSTRRKSGRRGRRL

SEQ ID NO: 951 - DNA, 453 bp, Helianthus annuus
  CDS (1)..(453)
atgtcaaagagaaaggtcagagagccaaaggaagacaatgtcaccctcggacctgctactcgtgagggagagcttgtttttggtgtggcgcatatttttgcatccttcaatgatactttcattcatgtgactgatctctctggaagagaaaccatggttcggattactggtgggatgaaggtgaaggctgatagagatgaatcatctccgtatgcggctatgcttgcagcacaagatgtttcaaccagatgcaaggagcttggcatcaatgctcttcacattaagttgcgggccactggaggaaacaagaccaagacccctggtccaggtgctcagtctgcactcagagctcttgctcgttctgggatgaaaattggtcgcattgaggatgtgacaccaattccaactgacagcacccgtcgaaagagcggtagaagaggaagaaggctgtga

SEQ ID NO: 952 - protein, 150 aa, Helianthus annuus
MSKRKVREPKEDNVTLGPATREGELVFGVAHIFASFNDTFIHVTDLSGRETMVRITGGMKVKADRDESSPYAAMLAAQDVSTRCKELGINALHIKLRATGGNKTKTPGPGAQSALRALARSGMKIGRIEDVTPIPTDSTRRKSGRRGRRL

SEQ ID NO: 953 - DNA, 453 bp, Hordeum vulgare
  CDS (1)..(453)
atgtcgaagcgaaaggttagggagcccaaggaggagactgttaccctggggcctaatgtttctgaaggaaccattgtcttcggtgttgctcacatctttgcatcatttaatgacaccttcattcatgtcactgatatttctggcagagaaactttagttaggatcaccggtggaatgaaggtgaaagctgacagggatgagtcctctccctacgccgctatgcttgcagcacaggatgtttctactcgatgcaaggagctgggtatcaatgctcttcacattaagctccgagccactggtgggaacaagaccaagacccctggtcctggcgctcagtcagctctcagagctcttgctcgttctggcatgaagatcggccgcattgaggatgtgaccccgatcccaactgacagcactcgccgaaagggtggaaggagaggaaggaggctgtga

SEQ ID NO: 954 - protein, 150 aa, Hordeum vulgare
MSKRKVREPKEETVTLGPNVSEGTIVFGVAHIFASFNDTFIHVTDISGRETLVRITGGMKVKADRDESSPYAAMLAAQDVSTRCKELGINALHIKLRATGGNKTKTPGPGAQSALRALARSGMKIGRIEDVTPIPTDSTRRKGGRRGRRL

SEQ ID NO: 955 - DNA, 456 bp, Hordeum vulgare
  CDS (1)..(456)
atgtcagggaggaagaagacccgcgagcccaaggaggagaacgtgacgctcggccccgccgtccgcgagggggagcacgtcttcggcgtcgcgcacatcttcgcctccttcaacgacactttcatccatgtcacggatctgtccgggagggagacgctcgtccgcatcaccggtgggatgaaggttaaagctgatcgtgatgaatcatccccttatgcagctatgcttgcatcacaggatgttgctgtaagatgcaaggagcttggaattactgctctgcacattaagctccgtgctactggtggaaacaagacaaaaactccaggtcctggtgctcaagctgcgcttagagctcttgcacgttctggcatgaagattggacgcattgaggatgttactccagtcccaactgacagcactcgcccgaagggtggtagaagaggaaggaggctgtaa

SEQ ID NO: 956 - protein, 151 aa, Hordeum vulgare
MSGRKKTREPKEENVTLGPAVREGEHVFGVAHIFASFNDTFIHVTDLSGRETLVRITGGMKVKADRDESSPYAAMLASQDVAVRCKELGITALHIKLRATGGNKTKTPGPGAQAALRALARSGMKIGRIEDVTPVPTDSTRPKGGRRGRRL

SEQ ID NO: 957 - DNA, 453 bp, Linum usitatissimum
  CDS (1)..(453)
atgtcgaagcgaaaggttaaagagcccaaggaggagactgttaccttgggaccaactctcaagcctggagagaataactttggtgtcgctcacatcttcgcatcattcaacgacaccttcatccacgttaccgacatttctggaagagaaacattggttcgcatcactggtgggatgaaggtgaaagctgatagggatgagtcttcaccctatgctgccatgcttgcagcacaggatgttactgctcgttgcaaggagctcggagtaactgctcttcacattaagctcagagcaaccggtggaaacaagaccaagacacctggtccaggtgcccagtctgcactcagggcgcttgcacgttctgggatgaagattggccgcatcgaggatgtgactcctattcctacagacagcactcgcagaaagggtggaaggagaggaagaaggctttga

SEQ ID NO: 958 - protein, 150 aa, Linum usitatissimum
MSKRKVKEPKEETVTLGPTLKPGENNFGVAHIFASFNDTFIHVTDISGRETLVRITGGMKVKADRDESSPYAAMLAAQDVTARCKELGVTALHIKLRATGGNKTKTPGPGAQSALRALARSGMKIGRIEDVTPIPTDSTRRKGGRRGRRL

SEQ ID NO: 959 - DNA, 456 bp, Oryza sativa
  CDS (1)..(456)
atgtccgggaggaagaagacgcgagagcccaaggaggagaacgtgacgctcggccccacggtccgcgagggcgagtacgtcttcggcgtcgcgcacatcttcgcgtcgttcaacgacaccttcatccacgtgacggatctgtccggcagggagacgctcgtccgcatcaccggtggcatgaaggtgaaagctgaccgtgatgagtcatccccttatgctgccatgcttgcatcccaggatgttgcacagagatgcaaggagcttggaattactgctctgcacattaagctccgtgctactggtggaaacaagacaaaaactcctggtcctggtgctcaatctgcgcttaaagctcttgcacgttctggcatgaagattggacgcattgaggatgttactccagtcccaactgacagtacccgcagaaagggtggcagaagaggaaggaggctgtaa

SEQ ID NO: 960 - protein, 151 aa, Oryza sativa
MSGRKKTREPKEENVTLGPTVREGEYVFGVAHIFASFNDTFIHVTDLSGRETLVRITGGMKVKADRDESSPYAAMLASQDVAQRCKELGITALHIKLRATGGNKTKTPGPGAQSALKALARSGMKIGRIEDVTPVPTDSTRRKGGRRGRRL

SEQ ID NO: 961 - DNA, 456 bp, Triticum aestivum
  CDS (1)..(456)
atgtcgtcgaagaggaagaccagggagcccaaggaggagaatgtcacccttggaccggctgtccgtgaaggagagcatgtctttggcgttgctcacatctttgcatccttcaatgacactttcatccatgtgactgacttgtctgggagggaaaccctggtgcggatcactggtggaatgaaggtcaaggctgatcgtgatgagtcttcaccctatgctgctatgcttgcatctcaggatgttgctacacgttgcaaggagcttggtattaccgcactgcacattaagctccgtgccactggaggcaacaagaccaagacacctggacctggagctcagtctgctctcagggctcttgctcgttctgggatgaaaattgggcgcattgaggacgtgactccagttcccactgacagcacccgccggaagggaggaaggaggggaaggaggctgtag

SEQ ID NO: 962 - protein, 151 aa, Triticum aestivum
MSSKRKTREPKEENVTLGPAVREGEHVFGVAHIFASFNDTFIHVTDLSGRETLVRITGGMKVKADRDESSPYAAMLASQDVATRCKELGITALHIKLRATGGNKTKTPGPGAQSALRALARSGMKIGRIEDVTPVPTDSTRRKGGRRGRRL

SEQ ID NO: 963 - DNA, 453 bp, Triticum aestivum
  CDS (1)..(453)
atgtcgaagaggaaaaccagggagcctaaggaggagaatgttactcttggacctgctgtccgtgaaggggagcatgtcttcggagttgctcatgtctttgcatcattcaatgacacattcatccacgtcactgacttgtctgggagagagacccttgttcgtattactggtggaatgaaggtcaaggctgatcgtgatgagtcatcaccatatgcagctatgctcgcttctcaagatgttgcgacgcgttgcaaggaacttggcatcactgctttgcacattaagctccgtgccactggaggcaacaagaccaagactcctggacctggtgctcaatccgctctcagggcactcgctcgttctggcatgaaaattggacgcattgaggacgtgacccctgttcccactgacagcactcgcagaaagggcggcaggagaggaaggaggctgtag

SEQ ID NO: 964 - protein, 150 aa, Triticum aestivum
MSKRKTREPKEENVTLGPAVREGEHVFGVAHVFASFNDTFIHVTDLSGRETLVRITGGMKVKADRDESSPYAAMLASQDVATRCKELGITALHIKLRATGGNKTKTPGPGAQSALRALARSGMKIGRIEDVTPVPTDSTRRKGGRRGRRL

SEQ ID NO: 965 - DNA, 456 bp, Triticum aestivum
  CDS (1)..(456)
atgtcgtcgaagaggaagaccagggagcccaaggaggagaatgtcacccttggaccggctgtccgtgagggagagcatgtctttggcgttgctcacatctttgcatccttcaatgacaccttcatccatgtgactgacttgtctgggagggaaaccctggtgcggatcactggtggcatgaaggtcaaggctgatcgtgatgaatcgccaccctatgctgctatgcttgcatctcaggatgttgctacccgttgcaaggagcttggtatcaccgcactgcacattaagctccgtgccactggaggcaacaagaccaagacacctggacctggagcccagtctgctctcagggctcttgctcgttctgggatgaaaattgggcgcattgaggacgtgactccagttcccactgacagcacccgccggaagggaggaaggaggggaaggaggctgtag

SEQ ID NO: 966 - protein, 151 aa, Triticum aestivum
MSSKRKTREPKEENVTLGPAVREGEHVFGVAHIFASFNDTFIHVTDLSGRETLVRITGGMKVKADRDESPPYAAMLASQDVATRCKELGITALHIKLRATGGNKTKTPGPGAQSALRALARSGMKIGRIEDVTPVPTDSTRRKGGRRGRRL

SEQ ID NO: 967 - DNA, 456 bp, Triticum aestivum
  CDS (1)..(456)
atgtcgtcgaagaggaagaccagggagcccaaggaggagaatgtcacccttggaccggctgtccgtgagggagagcatgtctttggcgttgctcacatctttgcatccttcaatgacaccttcaggcatgtgactgacttgtctgggagggaaaccctggtgcggatcactggtggcatgaaggtcaaggctgatcgtgatgaatcgtcaccctatgctgctatgcttgcatctcaggatgttgctacccgttgcaaggagcttggtatcaccgcactgcacattaagctccgggccactggaggcaacaagaccaagacacctggacctggagcccagtctgatctcagggttcttgctcgtgctgggatgaaaattgggcgcattgaggacgtgactccagtacccactgacagcacccgccggaagggaggaaggaggggaaggaggctgtag

SEQ ID NO: 968 - protein, 151 aa, Triticum aestivum
MSSKRKTREPKEENVTLGPAVREGEHVFGVAHIFASFNDTFRHVTDLSGRETLVRITGGMKVKADRDESSPYAAMLASQDVATRCKELGITALHIKLRATGGNKTKTPGPGAQSDLRVLARAGMKIGRIEDVTPVPTDSTRRKGGRRGRRL

SEQ ID NO: 969 - DNA, 456 bp, Zea mays
  CDS (1)..(456)
atgtctgggaggaagaagacgcgggagcccaaggaggagaacgtgacgcttggccccgctgtccgcgagggagaacacgtctttggcgttgcgcacatcttcgcctccttcaacgacactttcatccatgtgacggatctgtctggaagggagacgctcgtccgcatcactggtggcatgaaggttaaagctgatcgtgatgagtcctcgccttatgctgctatgcttgcctcacaggatgtcgcgcaaagatgcaaggagcttggaattactgcattgcacattaagctccgtgctactggtggaaacaagaccaaaacccctggccctggtgctcagtctgctcttagagctcttgctcgatctggcatgaagataggccgtattgaggatgttactccagtccccacagacagcacacgcagaaagggtggtagaagaggaaggaggctgtaa

SEQ ID NO: 970 - protein, 151 aa, Zea mays
MSGRKKTREPKEENVTLGPAVREGEHVFGVAHIFASFNDTFIHVTDLSGRETLVRITGGMKVKADRDESSPYAAMLASQDVAQRCKELGITALHIKLRATGGNKTKTPGPGAQSALRALARSGMKIGRIEDVTPVPTDSTRRKGGRRGRRL

SEQ ID NO: 971 - DNA, 453 bp, Zea mays
  CDS (1)..(453)
atgtcgaggaggaagaccagggagcccaaggaggagaacgttacccttggacccactgtccgtgaaggagagtttgtctttggtgttgctcacatctttgcatccttcaatgacaccttcattcatgtcactgatttgtctgggagggaaactttggttcggatcactggtggcatgaaggttaaggctgatcgtgatgagtcgtctccttatgctgctatgcttgctgctcaagatgttgcacagcgttgcaaggagctcggtatcaccgcgctgcacattaagcttcgtgcaactggaggcaacaagaccaagacccctggacctggtgctcagtctgctctcagggctcttgctcgttctgggatgaaaattggacgcattgaggatgttaccccgggtcccactgacagcactcgcagaaagggtggtaggaggggaaggaggctgtag

SEQ ID NO: 972 - protein, 150 aa, Zea mays
MSRRKTREPKEENVTLGPTVREGEFVFGVAHIFASFNDTFIHVTDLSGRETLVRITGGMKVKADRDESSPYAAMLAAQDVAQRCKELGITALHIKLRATGGNKTKTPGPGAQSALRALARSGMKIGRIEDVTPGPTDSTRRKGGRRGRRL

SEQ ID NO: 973 - DNA, 453 bp, Zea mays
  CDS (1)..(453)
atgtcgaggaggaagaccagggagcccaaggaggagaacgttacccttggacccactgtccgtgaaggagagtttgtctttggtgttgctcacatctttgcatccttcaatgacaccttcattcatgtcactgatttgtctgggagggaaactttggttcggatcactggtggcatgaaggttaaggctgatcgtgatgagtcgtctccttatgctgctatgcttgctgctcaagatgttgcacagcgttgcaaggagctcggtatcaccgcgctgcacattaagcttcgtgcaactggaggcaacaagaccaagacccctggacctggtgctcagtctgctctcagggctcttgctcgttctgggatgaaaattggacgcattgaggatgttaccccggttcccactgacagcactcgcagaaagggtggtaggaggggaaggaggctgtag

SEQ ID NO: 974 - protein, 150 aa, Zea mays
MSRRKTREPKEENVTLGPTVREGEFVFGVAHIFASFNDTFIHVTDLSGRETLVRITGGMKVKADRDESSPYAAMLAAQDVAQRCKELGITALHIKLRATGGNKTKTPGPGAQSALRALARSGMKIGRIEDVTPVPTDSTRRKGGRRGRRL

SEQ ID NO: 975 - DNA, 453 bp, Zea mays
  CDS (1)..(453)
atgtcgaggaggaagaccagggagcccaaggaggagaacgtcacccttggacccactgtccgtgaaggagagtatgtctttggtgtcgctcacatctttgcatccttcaatgacaccttcattcatatcactgatttgtctgggagggaaactctggttcggatcaccggtggcatgaaggtgaaggctgaccgtgacgagtcgtcaccttacgctgctatgcttgctgctcaagacgtcgcacagcgctgcaaggagcttggcattactgcactgcacattaagcttcgtgccaccggaggcaacaagaccaagacccccggacctggtgcccagtctgccctcagggcgcttgctcgttctgggatgaaaatcggacgcattgaggacgttaccccggtccccacggacagcactcgcagaaagggcggtaggaggggaaggaggctgtag

SEQ ID NO: 976 - protein, 150 aa, Zea mays
MSRRKTREPKEENVTLGPTVREGEYVFGVAHIFASFNDTFIHITDLSGRETLVRITGGMKVKADRDESSPYAAMLAAQDVAQRCKELGITALHIKLRATGGNKTKTPGPGAQSALRALARSGMKIGRIEDVTPVPTDSTRRKGGRRGRRL

SEQ ID NO: 977 - DNA, 20 bp, Artificial sequence
  primer
atggcaaaacctgctgctcg

SEQ ID NO: 978 - DNA, 20 bp, Artificial sequence
  primer
ttacacgcgacgcttcttcg

SEQ ID NO: 979 - protein, 212 aa, Artificial sequence
  consensus sequence
  Variant (2)..(4): Xaa in position 2 to 4 is any amino acid
  Variant (5)..(59): Xaa in position 5 to 59 is any or no amino acid
  Variant (61)..(62): Xaa in position 61 to 62 is any amino acid
  Variant (64)..(67): Xaa in position 64 to 67 is any amino acid
  Variant (72)..(75): Xaa in position 72 to 75 is any amino acid
  Variant (78)..(78): Xaa in position 78 is any amino acid
  Variant (79)..(79): Xaa in position 79 is any or no amino acid
  Variant (81)..(88): Xaa in position 81 to 88 is any amino acid
  Variant (90)..(100): Xaa in position 90 to 100 is any amino acid
  Variant (101)..(101): Xaa in position 101 is any or no amino acid
  Variant (103)..(103): Xaa in position 103 is any amino acid
  Variant (106)..(107): Xaa in position 106 to 107 is any amino acid
  Variant (110)..(128): Xaa in position 110 to 128 is any amino acid
  Variant (129)..(138): Xaa in position 129 to 138 is any or no amino acid
  Variant (140)..(144): Xaa in position 140 to 144 is any amino acid
  Variant (145)..(153): Xaa in position 145 to 153 is any or no amino acid
  Variant (155)..(155): Xaa in position 155 is any amino acid
  Variant (157)..(160): Xaa in position 157 to 160 is any amino acid
  Variant (161)..(161): Xaa in position 161 is any or no amino acid
  Variant (163)..(167): Xaa in position 163 to 167 is any amino acid
  Variant (168)..(168): Xaa in position 168 is any or no amino acid
  Variant (170)..(170): Xaa in position 170 is any amino acid
  Variant (171)..(181): Xaa in position 171 to 181 is any or no amino acid
  Variant (186)..(186): Xaa in position 186 is any amino acid
  Variant (189)..(191): Xaa in position 189 to 191 is any amino acid
  Variant (193)..(195): Xaa in position 193 to 195 is any amino acid
  Variant (196)..(210): Xaa in position 196 to 210 is any or no amino acid
MXXXXXXXXXXXXXXXXXXXXXXXXXXXXXXXXXXXXXXXXXXXXXXXXXXXXXXXXXXGXXHXXXXFNNTXXXXTDXXGXXXXXXXXGXXXXXXXXXXXXPXAAXXAAXXXXXXXXXXXXXXXXXXXXXXXXXXXXXGXXXXXXXXXXXXXXAXRXXXXXGXXXXXXIXXXXXXXXXXXXDVTPXPHXXXRXXXXXXXXXXXXXXXXXXRR

SEQ ID NO: 980 - protein, 21 aa, Artificial sequence
  protein pattern
  Variant (2)..(2): Xaa in position 2 is any amino acid
  Variant (3)..(3): Xaa in position 3 is Ala, Ile or Val
  Variant (4)..(4): Xaa in position 4 is any amino acid
  Variant (5)..(5): Xaa in position 5 is Ile or Val
  Variant (6)..(6): Xaa in position 6 is any amino acid
  Variant (7)..(7): Xaa in position 7 is Ala, Ser or Thr
  Variant (8)..(8): Xaa in position 8 is Gly, Asn, Ser or Thr
  Variant (11)..(11): Xaa in position 11 is Asp or Asn
  Variant (13)..(16): Xaa in position 13 to 16 is any amino acid
  Variant (17)..(17): Xaa in position 17 is Ala, Ser or Thr
  Variant (18)..(18): Xaa in position 18 is Asp, Asn or Thr
  Variant (19)..(20): Xaa in position 19 to 20 is any amino acid
GXXXXXXXFNXTXXXXXXXXG

SEQ ID NO: 981 - protein, 19 aa, Artificial sequence
  protein pattern
  Variant (2)..(3): Xaa in position 2 to 3 is any amino acid
  Variant (4)..(4): Xaa in position 4 is Ile, Leu or Val
  Variant (5)..(6): Xaa in position 5 to 6 is any amino acid
  Variant (7)..(7): Xaa in position 7 is Ile, Leu or Val
  Variant (8)..(8): Xaa in position 8 is any amino acid
  Variant (10)..(10): Xaa in position 10 is any amino acid
  Variant (13)..(13): Xaa in position 13 is any amino acid
  Variant (15)..(15): Xaa in position 15 is any amino acid
  Variant (16)..(16): Xaa in position 16 is Asp or Asn
  Variant (17)..(17): Xaa in position 17 is Gly or Ser
  Variant (18)..(18): Xaa in position 18 is any amino acid
GXXXXXXXDXTPXPXXXXR

SEQ ID NO: 982 - DNA, 756 bp, AZOTOBACTER VINELANDII
  CDS (1)..(756): transl_table=11
atgcatcgcaaggtcttcgctggcagggtattcgagcgccaggtggcgctgatcggcggcggctgctccgacgtcggccgggcgctggcggtacgcctggcgcaggccggcgcgagcctggcgctgctcgacctcgatgcaactgcgctggacagcctggtcgagcacctggccgaccatcacaactgcgcggcgctcggattgccctgcgacctgaccgacgcgcaagcggtggagcgcgccgtaacgctggtcggcgagcgtttcggcggcatcgatctgctcgcctgctgcgccgtcgtccatcactgcggcggcatctgcgacaccgcgccggaagtgttccggcgggtcatggaggtcaactttttcggcgccctgcattgcgcccgggcggcgctacccggcctgctcgcgcggcgcgggcagatcgtcgtggccggggcgctgcccgccttcggtccgccgcaggccggccgtggcgccgaggccgccagccggcaggcgctgctcgggttgttcgagacgctgcgcctggaggtcgcggcggacggtgtcaacgtgatgctggtgtgtcccggccgcgccggcgatccggcgtgcgacgacccgtccggcgccgaggcggcgggccgcttgccctcggcgcaggacatcgccgaggcgatcttccagggagcgttgcgccgccgccatctgctgatgctgcccggctacgactggcgcgcccggctgctggcgcggctcgcgcaatag

SEQ ID NO: 983 - protein, 251 aa, AZOTOBACTER VINELANDII
MHRKVFAGRVFERQVALIGGGCSDVGRALAVRLAQAGASLALLDLDATALDSLVEHLADHHNCAALGLPCDLTDAQAVERAVTLVGERFGGIDLLACCAVVHHCGGICDTAPEVFRRVMEVNFFGALHCARAALPGLLARRGQIVVAGALPAFGPPQAGRGAEAASRQALLGLFETLRLEVAADGVNVMLVCPGRAGDPACDDPSGAEAAGRLPSAQDIAEAIFQGALRRRHLLMLPGYDWRARLLARLAQ

SEQ ID NO: 984 - DNA, 1042 bp, Oryza sativa
  CDS (31)..(828)
gtggacacgaaacagcttttgcattgcatcatgtcgaagacaaggatggacggcaaggtggccatcgtgaccggcggcgcgagcggcatcggcgaggcggcggcgcggctgttcgcgtcgtgcggcgcgacggtggtcatcgccgacgtccaggacgagctgggcgaggcggtggcggcgtcggtggcggggggcgggtgccggtacgtgcggtgcgacgtgacggacgaggcgcaggtggaggcggcggtggccgccgcggtggcggagcacgggcggctcgacgtgatggtgagcaacgccggcgtgctgctcccgacggggcccgtcgtggacatggacctcgcggctctggaccgggtgatgtcggtgaacttccgcggcgcggcggcgtgcgtgaagcacgcggcgcgcgccatggtgtcgcgcggcacccgcggcgccatcgtgtgcacggcgagcgtggcgtcgtgccagggcgggttcgggccggcggcgtacacggcgtcgaagcacgcggtgctggggctggtgcgcgcggcggccggcgagctcgggcggcacggcgtgcgcgtgaactgcgtgtcccccggcggcgtggcgacgccgctgagctgcgggctgacggggatgagccccgaggagatggaggcggcggcggagccccacaacgtgctccgcgggaaggtgctcaaggcggcggacgtcgcggaggccatgctcttcctcgcctccgaccaggccgccttcgtcagcggccacaacctcgtcgtcgacggcgccaccaccgccgtcaactacgccgtgctccagtccgtcggcctgtgacacggaccgacgccattaatttaatttaaaagaaaaacatatctttacgataaattttaccgcgttttgactggaaagatgatccctttttcttattaggcgatcaatggtgacgtggtgtcatagcatgtggtttgtaaaattgtgtttgttcgtttgtaatattatatgttggttgccattgcatctcatcatgatgcaaccttttggaccc

SEQ ID NO: 985 - protein, 265 aa, Oryza sativa
MSKTRMDGKVAIVTGGASGIGEAAARLFASCGATVVIADVQDELGEAVAASVAGGGCRYVRCDVTDEAQVEAAVAAAVAEHGRLDVMVSNAGVLLPTGPVVDMDLAALDRVMSVNFRGAAACVKHAARAMVSRGTRGAIVCTASVASCQGGFGPAAYTASKHAVLGLVRAAAGELGRHGVRVNCVSPGGVATPLSCGLTGMSPEEMEAAAEPHNVLRGKVLKAADVAEAMLFLASDQAAFVSGHNLVVDGATTAVNYAVLQSVGL

SEQ ID NO: 986 - DNA, 795 bp, Unknown
  Unidentified
  CDS (1)..(795)
atgcgcctagcgggaaaagtagtggtggtcaccggcgcggggagcggcctgggccaggccctggccttggagcttttaaggcggggggcgagggtggcggcggtggacctaaggtcggagggcctccaagaaaccatggccaaggcgggaagcctaggggagggcttaagcctccaccccctggacatcaccgacaaggagaaggtggccgccctgcccgaggaggtggaacgggtccacggccaggtggacggcctcatcaacaacgccgggatcatccagccctttaagcgcctcttggacctggacgaggcggccatggagcgcgtgatgcgggtgaacttctggggtaccctccacatgacccgggcttttctgcccaggctcctcaagcgccccgaggcccacctggtgaacgtctccagcatgggggccttcgtgcccgtgccggggcaggccctttacggggcctctaaggcggcggtgatgctcctcaccgaggccctctgggccgaactccaggggaccccggtacgcgtcaccctggtcctgcccggggccatgcgcacggggatcgccgagcactcgggggtggaagccccgagggcggaaggggcgaaggtgcccgtcctcgagcccgaggtggcggccaagcgcctcctggacgccgtggaacgggacgccttccgagtgctcctgggccgggacgcccagaccatggacctcctctatcgcttaagccccgccctcgccgcccggatcgtccagcggcgcatggcccacctcctcacctga

SEQ ID NO: 987 - protein, 264 aa, Unknown
  Unidentified
MRLAGKVVVVTGAGSGLGQALALELLRRGARVAAVDLRSEGLQETMAKAGSLGEGLSLHPLDITDKEKVAALPEEVERVHGQVDGLINNAGIIQPFKRLLDLDEAAMERVMRVNFWGTLHMTRAFLPRLLKRPEAHLVNVSSMGAFVPVPGQALYGASKAAVMLLTEALWAELQGTPVRVTLVLPGAMRTGIAEHSGVEAPRAEGAKVPVLEPEVAAKRLLDAVERDAFRVLLGRDAQTMDLLYRLSPALAARIVQRRMAHLLT

SEQ ID NO: 988 - DNA, 9994 bp, Streptomyces avermitilis
  CDS (508)..(1332): transl_table=11
ggatccatcgccaacgcctcacgcggactgatcccgaaaaaccccgcatcgaactccgccgcaccctccaggaaaccgccccggcgcgtatacgacgaacccgcccgccccggctccggatcatagaaagcctccacgtcccaaccccggtcgaccggaaactcccccaccgcatcccgacccgacgcaatcaactcccagaaatcctccgccgactccacaccccccggaaaacggcacgccatccccacaattgcaatcggctcctgctcgcccgattcaatctgctgaagtcgacgccgcacattgaggagatcggcagtaacgcgcttgagatagtcgcggagcttttcctcgttagccatggaccggtctcctcgacaagagaaatcggaaattaaaaaacacgcatgggactctcacaggctagagcgacgagagcagcacaaatacccctagataccccagacccctgatgctcgatgaatgccgctatagctagggggtatggcgccagacatgaattcacagcgtttcggcggccggctggcgcttgtcacaggtgcaggcggtggcatcgggcgggcgacctgcgctctcggatcggccggggcgcgagtggtgtgcgtggaccgggacggccgcggcgccggggtgacgccgacctggccggagcggggcgcgcgggcggcctggcccgaggtggccgacgtgtccgacggagcggcgatggagcggttgcccgagcgcgtcgccgagacgtacggggtcgtggacctgctggtgaacaacgccggcatcggcatggcggggcgttttctcgacacgtccgtcgaggactggcagcgcaccctgggcgtcaacctctggggtgtcattcatggttgccgcctcatcggccggcagatggcggagcgcgggcagggcgggcacatcgtgacggtggcgtcggcggcggcgttccagccgacgcgggcggtccccgcgtatgccaccagcaaggcggcggtgctgatgctgagcgagtgcctgcgcgcggagttcgcggagttcggggtcggagtgagcgtggtgtgcccgggcttcgtccgtacgtcgttcgcgtcggcgatgcatttcgccggtgtgccccggctggagcaggagcggctgcgggcgctgttcgccggtcgcggatgcagcgcggagaaggtggccgcggcggtactgcggtcggtggcgcgcgactcggccgtggtgaccgtgacggcggaagcgcggctgtcacggctgatgagccgcttcacgccacgcctgcgcgccgcggtggcgcggatggatcccccttcgtagggctggcggggatcccctccttgccttcgaacatcttccgacgatgggcagtgagagatgtcagatcattttctcttcatgagtgcgccgttctgggggcatgtgttccccagtctcgccgtggcggaggagctcgtgcaccggggccaccacgtcacctttgtgacgggcgcggaaatggccgatgcggtgcgttccgtgggcgctgatttcctgcggtacgagtccgccttcgagggtgtcgacatgtaccggctgatgaccgaggccgagccgaacgccatccccatgacgctgtacgacgagggcatgtccatgttgcgttcggtggaggagcacgtcggcaaggacgttccggacctggtggcctacgacatcgccacctccctcaacgtgggtcgtgtcctcgccgcctcctggagcaggccggccatgacggtcattcccctgttcgcgtccaacgggcgcttctccacgatgcagtcggtattggatccggattccgctcaggtcagtgcgccgccgccgcgcttctcggagcagatggagttgttcggcctcggggcgctggtgccgcgcctcgcggagctgctcgtttcccggggtatcacggaaccggtcgacgatttcctttccggaccggaggacttcaacctggtgtgtctgccgcgcgccttccagtacgcgggcgacaccttcgacgagcggttcgccttcgtcggaccatgtctgggtaagcgcaggggtctgggcgagtggacaccaccgggcagcgggcatccagtggtgctcatctccctcgggaccgtgttcaaccggcagctgtccttcttccgcacgttcgtccgggcgttcaccgacgtccccgtgcacgtcgtgatctcgctcggcaagggggtcgaccccgatgtgctgcggccgctgccgccgaatgtcgaggtgcaccggtgggtgccgcaccatgcggtgctggagcatgccagggctctggtcacgcacggcggtaccggcagtgtgatggaggcactgcacgcagggtgcccggtgctcgtcatgcccttgtcgcgggacgcgcaggtgaccggccggcggatcgccgagctggggctgggtcgtatggtgcagccggaggaggtcacggcgacgacgctgcgccggcacgtgctggacatcatctccgatgacgcgatcacccgacaggtcaggcagatgcagcgggccacggtcgaggcgggcggcgccctgcgggcagcggacgagaccgagcggtttctgcgccggacgcgccgtcactgaccggcagctcgggccgggcggtgagtggctcccacagggttcggttctccacgtaccactgaacggtctgtgccagcccctcctcgaagggcacgcggggcgcgtaaccgagctcggcggagatcttgctgatgtccagcgagtagcgccggtcgtgccccttgcggtcggtcacgggttcgaccatcgaccagtccacgccgagcaggtccaggagccgggcggtgagctcacggttggacagctccgtcccgcctccgatgtggtagatctcgccgggcctgtcgcgttcggcgaccagggcgatgccacggcagtggtcgtccacgtgcagccagtcgcggacgttttcgccgtcgccgtacaagggcaccttcgtgccgttcagcagatgggtgacgaaccgcgggatgagtttctccgggaactggtgggggccgtagttgttcgagcatcgggtgatgatcactggtaggccgtgcgtgcggtggaaggaccgggcgagcaggtcggaggacgccttggacgcggagtagggcgagttcggctccagcggggcgtcctcggtccacgagccggagtcgatggagccgtagacctcgtccgtcgagatgtacacgaagcggtccacggcggcgtcggtggcggcgcggagcagggtgtgagtgccgaggacattggtgcgtacgaactcggcggcgtcggccacggaccggtccacgtgtgactccgccgcgaagtggaccaccatgtcggagccgtccatcaggtccgcgaccaagggcccgtcgcagatgtcgccgtgcacgaagatcagggatgggcttcccaggaccggtgcgaggttctccaggcgacccgcgtaggtcagcttgtcgagcaccacgacctcggcaccggtgaacgccggatacgcgcccgtcagcaaccgccgtacgaaatgggaaccgatgaaaccggcgccgcccgtcacgagtaggcgcatcccgggctcctcaccgcggcttccgccgcaatactcatcagatactcgccgtagccggagccggccagttcgaccccgcgcagatagcagtcgtccgcgtcgatcagacccatccggaaggcgatctcctcgagacaggcgatccgtactccctggcgcttctccaggacctgcacatactgcccggcgtgcatcagcgagtcgtgcgtccccgcatcgagccaggtgaagccccggcccaggtccaccagccgggcccgcccctcggcgaggtaggccctgttgacgtcggtgatctccagctcgccgcgggccgacgagcggatgccccgggccacctcgatcacgtcgttgtcgtacaggtacaggcctgtgatcgccaggttggaccggggggcggtgggtttctcctcgacggacagcagctttccggaggcgtcgacctctccgactccgtaccgttcgggatccgtcaccgcgtatccgaacaacacacagccgtcgacatcgcgggtgtggctgcgcagcaggtgcgaaaagcccatgccatggaagatgttgtccccaaggacaagggacacctgatcctgaccgatgaaatcggcgccgatgaggaatgcctcggcgattcctcccggtcgctgctgcgcggcgtagtcgatgttcagcccgaggcggcttccgtctccgagcagtctccggaattgttcgagatgatcgggtgaggaaatcaccaggatgtcttttatgccgccgagcatcaacacggagagcgggtagtagatcatgggtttgtcgtagacagggagcagctgcttggaaagggcacgggtcaacgggtaaagccgagagccggttccccccgcgagcacgattcccttcatgtcggactccccgcagtcgacgttatatatctcgtgccgtctgcccgacggtaccaagtggcggaaaacgcaccaggaattcgagcgccgctagggggaagggctcaagaagataggggccaccagatggggcggttttcggtgtgcccgccccggccgaccggaatactgaagagcatgctgacgactgggatgtgcgaccgaccgctggtcgtcgtactcggagcctccggctatatcgggtcggccgtcgcggcggaactcgcccggtggccggtcctgttgcggctggtggcccggcgaccgggcgtcgttccgccgggcggcgccgcggagaccgagacgcgtacggccgacctgacggcggcgagcgaggtcgccctcgccgtgacggacgccgacgtggtgatccacctggtcgcgcgcctcacccagggagcggcatggcgggcggcggagagcgatccggtggccgagcgggtgaacgtcggggtgatgcacgacgtcgtcgcggccctgcggtccgggcgccgcgccgggccgcccccggtggtggtgttcgccgggtcggtctaccaggtgggccgcccgggtcgggtcgacggcagtgagccggacgagcccgtgacggcctatgcccgtcagaaactcgacgccgaacggacgttgaagtccgccacggtcgagggtgtcctgcgggggatctcgctgcggctgcccaccgtctacggcgcggggccgggcccgcagggcaacggcgtcgtgcaggcgatggtgctccgggcgctcgccgacgaggccctcaccgtgtggaacggaagcgtggtggagcgtgacctggtgcatgtggaggatgtcgcgcaggccttcgtgagctgcctggcgcacgcggatgcgctcgccgggcggcactggctgctcggcagcggtcgtcctgtgaccgtcccgcacctcttcggtgccatcgccgccggcgtgtccgcccgcaccgggcgccccgcggtgcccgtgaccgcggtggaccctccggcgatggcgacggcggcggacttccacgggaccgtcgtcgactcctcggcgttccgcgcggtcaccgggtggcggccgcggctgtcgcttcaggagggcctggaccacatggtggcggcttacgtgtagcgccggggtggcggccgggcccgggcggtgacggcccggatccgggtcggccgtcacagcttctcgtcgagggcggggctcgcgcggtactccggcaacatgccgcgtcgcagggcctgctggagagtcggcgcgcgcgccggtccgcgctcggagaggatcggtgcccgcccgaggtggtggccgaggggcagggcgaggtccggatcctcgggcgagagggcgtgttcgttctgcggaacgtagccgctcgacatcaggtacaccatcgccgtgtcgtcttccagcgccacgaacgcgtgcccgaccccgatcggcaggtagacggaacggaagcgctcctggtcgaggaggaccgagtcccactgcccgaaagtcggtgagccggtgcgcaggtcgacgacgaagtccagggcccgtccccgggcgcagtggacgtacttggcctggccgggtggtgtcgcggtgaagtgcacgccgcggacgacgccgcggcgcgagacgctctggcaggtctgcgcggtgggaaaccggtgcccgacggcctcgctgaggaccggttcctggtagggggtgacgaagagcccgcgctcgtcggggaagaccgtcggggtgaattcgacggcgccctcgacgacgagcctccggaccgtgacaccggcggcggtggcccgggcgcccgcgggcggggcgggccggtcggcggagctccggcgaggccggccaagggtcatcgctgcactctctctgtcgtgcgggttgtcatacgggtagtcgtacgggccggttccggagtcacagctcgacggcgcgggtggtgagcagggacagcagggtgcgggcctgcacgttcacgtaacggccgtaccgcagcagctgggtcagctggcccggggtgcaccagcggtaccccgggggcgggtcgttcggcgcctggctctcgtcggcctcgacgaacaggtagcgcgcctgtgcgtgcagaaagcgaccgccctcctccgagtggaccgccgcgtagcggatgcggtcgggcgcggcctccagcaccaggtcgaggaagcgcggcctggccggtcccgtgaggtgggcgtagttgcgcggggtgtactggaccgtcgggccgagttcgatcgtgtcgaggaagccgccctcgaccctgccgtgggcgagcaggtgcggtacgccgccgatccgccgggtcaggaaggcggtgatgccgtggccgcacggttcgatcaggggctgggtccaggcggcgacctcccggttggaggcctcgacacggaccgcgaccacacggaagtaccggtccgcgtggtgggcgatggactccgcgcccgtggtccagccggggatgccggccaggggcacgcggcgggcgtgcacggagtgccgggagcgttcggcggcgtaccaggagagcagttcggcgtcgctgtgcagggccgcgggctcgtcgaacggggtgggaaggcaggcgaggaccgtgcgtgcgtccatgttcaccaggttgtcccggtgcatcagttcgccgatctgccccagtgtcagccagcggaagtcgtcgtccagtggtacgtcctcgtcggtctccaccacgatgttgcggttgaacttccggtggaaccaggctccgtgctcggactggaggacgtcgaccaccacggtggcgcgccggggctgtgtgaagtactcgaggtacttcacggcggcgcccccgtggaccttggtgtagttgctgcgcgtggcctgcacggtgggcgacagctggaccaggttgatgttgccgggctccatcttggcctgcatcaggaagtgcaggaccccgtcgaacttcttggcgaggatgccgaggatgccgatctcgggctggtggatgatgggctgctgccattccgggaagggctgttcaccgcctcggacgtgcagtccctccacggagaagaaccggccgctgcggtgggccagattgccggttccggggtgaaacgaccaggcgtccatcccgtggaaggggatgcgctcgacccggaaccggtgggccccggaccgccgcgtccaccagccggtgaacgcgtcgagggacgtccgggcgccggtgtcgcccacggcggcggagcgggcgaggcacgcgggcagggcggcgtcgtgccgcgcggtgagcggtgctgggctcggtgtggtcggcatcggctcgtacgctcatgcaccccacgtcatgtagatcaccggtggctcgcggccgggcagttggcgcagtggggcgtggtcgaggccgaacgcctcgctcagcgccctggtctcccccggccatttggggtgggtgagttcgtcgaaggcgaggatgctgcccctggtcaggtgcggtgtgatgacgtccagcagttcgcgcgtggggcggtagaggtccaggtcgaagtaggccagcgcgatgacggtgtgcgggtgttccgccaggtattggggcaccgtttcgcgtacgtcgccctggaccacgaaggaacgctgggtgtggccgtagggttcgttcgcctcgtgcgccgcgagcacctgccgcaggtgctccacttcgccgtccggcacggcgaaccgcccagggaccgcgctggtgctgacctcgtccgcctcgtcgatgtcggggaagccggtgaacgtgtcgaagccgatgacgcggcgcagcgagttgtacggctcatagatgctgcgcagcgcggtcagcgtggcgaggtgccgtccgtgcagaacgccgaactccatgatgacgccggggacttccggcagcatgcggtacagcgcgtccatggagagcaggtcggcgagctggttgcgccgcatgtagacggacaggttgtcgatcaggtacttcggcgggatcgggctgtcgacgaggagcttggtcagctgctcgcgggcagcgcgttcctgctcggactcgtgcggcacgatccggggatcggtgaactcccgctcggtcatggaggcctttcctttcatgggtcggtaccgggcgcgccggacgtgccggtcgtaccgggcgtgccggcgggcacgacgctgtcgggtcaggacagccaggcgtcgggggcggatccgccgcggccgaccggggggaacagctcctccaggcgggccaggacgggctcgggcagcggggtgcgcagggcgtgcagtgccccgtccacgtgctgttcggtgcgcggcccgatgaccagcccggtcacgccgggccgcgacagcacccaggccatgccgacatgggcggggtcgaggccgtggtccgcgcacacgtcctcgtacgccgcgatggtggtgcggtggtgctccagggcctcgacggcccggccctgtgccgacttgaccgcggtgttctcccgcgtcttgcgcaggacaccgccgagcaggccgccgtgcagtggcgaccagaccaggacgccgacaccgtaggcggacgcggcggggatgacttccagctcggcgtgtcgggtcacgaggttgtagacgcactgctcggaggcgaggcccagggcgttgcgccgccgggccgcctcctgggcggaagcgatgtcccagcccgcgaagttggaggagccgacgtagcgcaccttgccctgcgtgatgagcaggtccatcgcctgccacacctcgtcccagccggcgcggcggtcgatgtggtgcagctggtacaggtcgatccagtcggtgcgcagtcggcgcagcgaggcgtcgcaggcggccacgatattgcgtacggacagtccgtgatcgttggggccgctgcccatcggatcgccgaccttggtggccagcaccacctgctcacgccgggcggggcggtccgccagccacctgccgatgacctcttcggtgtaccccttgtggacgcgccagccgtaggtgttggcggtgtcgaacagggtgatgccctgagccagggcgtgatccatcagtcggcgcgcttcgggctcctccacccgtccgccgatgttgaccgttccgagcgccagtcggctgatcctcagccgggtcctgcccagttcggtgtggaggggagcactgctgttgctgtcggactggacgggtgcgggctcggccgtcgtaggcatcatcgatcagtcgacactccctcgtgcgtgagcggcgggcgctcgagcaggaccctgacctgaggcccaggaggctaccggcgatcatgcgatacaggcagccgctcgatggtgggacacgggctgccgtcgccgggcataggggctgatgggggttgtccggtgcgggtccggctgacagcctcgtggacaccaagttgatccagttgatccactccgaaaggcagaggctgcag

SEQ ID NO: 989 - protein, 274 aa, Streptomyces avermitilis
MAPDMNSQRFGGRLALVTGAGGGIGRATCALGSAGARVVCVDRDGRGAGVTPTWPERGARAAWPEVADVSDGAAMERLPERVAETYGVVDLLVNNAGIGMAGRFLDTSVEDWQRTLGVNLWGVIHGCRLIGRQMAERGQGGHIVTVASAAAFQPTRAVPAYATSKAAVLMLSECLRAEFAEFGVGVSVVCPGFVRTSFASAMHFAGVPRLEQERLRALFAGRGCSAEKVAAAVLRSVARDSAVVTVTAEARLSRLMSRFTPRLRAAVARMDPPS

SEQ ID NO: 990 - DNA, 813 bp, Myxococcus xanthus
  CDS (1)..(813): transl_table=11
atgaagacccaacccttcaagggccgggtggtcctcatcacgggggcttccggaggcattggcaggacggcggcgagggcctacgcggccgcgggcgcggatgtcgtcctggccgcgcgccggctccccgagctcgaggacgcggcccgtgaagtggcgtcactgggcgtgagggcactgccggtgcggtgcgacgtcacggtgggcgacgacgtgacgcggctggtgcgcgagacggacgccgccttcggtgggctggatgtgctcgtcaacaacgcgggccaaggtctctacggaccgctggagggcgttggggaggagcaactccggcaggtcttcgagctgaacgtcttcagcctgtggcggatgacgcgcgaggcactgccgctgctgcgcaagcggcgtggcgctcaggtggtcaacgtcagctccgtgctgggccaccggggactgccgctgctgggcggctactgcgcgtccaaggccgcggtgaatgcgatgacggagtcgctgcgcgcggagctggccgccgagggcatccgggtactgctcgtgtcgcctggcttcaccgaaagcgacttccgggagaaccgccttcatgcggagggctggcgacaggacgccattccgctgaaggccatgtccgcggaagaagtcgccgacgcaatggttcgtgcgagccggagtggacggcgcgacaccgtgctcacgctgcccggccgggtgatggtggtggccaaccggtgggtgccttccctgttcgaccgtgtcgcccgccgcatggcgcttgcttcgaagaagaaggacgcatga

SEQ ID NO: 991 - protein, 270 aa, Myxococcus xanthus
MKTQPFKGRVVLITGASGGIGRTAARAYAAAGADVVLAARRLPELEDAAREVASLGVRALPVRCDVTVGDDVTRLVRETDAAFGGLDVLVNNAGQGLYGPLEGVGEEQLRQVFELNVFSLWRMTREALPLLRKRRGAQVVNVSSVLGHRGLPLLGGYCASKAAVNAMTESLRAELAAEGIRVLLVSPGFTESDFRENRLHAEGWRQDAIPLKAMSAEEVADAMVRASRSGRRDTVLTLPGRVMVVANRWVPSLFDRVARRMALASKKKDA

SEQ ID NO: 992 - DNA, 801 bp, Myxococcus xanthus
  CDS (1)..(801): transl_table=11
atgcgaggaaaaacggtggtcgtcacgggcgcctcggcgggcattggcgaggcgctggcggtggtgctggccggacgcggcgccaacctggtgctggcggcgcgaaatgaggaagcgctccagcgggtgaaggcccggtgcgagtcggccggcgggcgcgcggtggtagtgcccaccgatgtaggtgacgcggaggcctgccgccacctggtggagcgggcggtggaggcctttggcggcgtcgacgtgctggtcaacaacgcgggcgtgacgatggacgcgcgcgtggacgaggtgaaggacctgtccctcttcgaccggctgatgcgcatcaactacctgggcgcggtgtactgcacccaccacgccctgccccacctcaaggcgcggcgcggactggtggtggccgtgtcgtccctcacgggcaagacgggcgtgcccaaccgcagcggctacgcggccagcaagcacgccatgcacggcttcttcgactcgctgcgcatcgagctgcgcggcaccggtgtggacgtgacggtggtgtgccccggcttcgtcgccaccaacatccgcgacagcgcgctgggcgcggacggccagcccgtgcggcagagcaagcacgacgagagcgcgggcaacatggacgtggacacctgcgtggccatcatcctgcgcgccatggagcgccgcgagcgcgaggtggtgatgaccaccaaggcccgcgtcgcccagttcctcaagctggtggccccgggcgtggtggaccgcatcaccgcgaagaccatccaggaccggcggcgctga

SEQ ID NO: 993 - protein, 266 aa, Myxococcus xanthus
MRGKTVVVTGASAGIGEALAVVLAGRGANLVLAARNEEALQRVKARCESAGGRAVVVPTDVGDAEACRHLVERAVEAFGGVDVLVNNAGVTMDARVDEVKDLSLFDRLMRINYLGAVYCTHHALPHLKARRGLVVAVSSLTGKTGVPNRSGYAASKHAMHGFFDSLRIELRGTGVDVTVVCPGFVATNIRDSALGADGQPVRQSKHDESAGNMDVDTCVAIILRAMERREREVVMTTKARVAQFLKLVAPGVVDRITAKTIQDRRR

SEQ ID NO: 994 - DNA, 786 bp, Micromonospora sp.; strain 046-EC011
  CDS (1)..(786)
atggaactgaccggaatcgagtcgaaggtcgccctggtcacgggcgcggggcagggcatcggcgccgccgtggccggtgtcctggcgagggcgggcgcgcaggtggcggcggtggaccgcaacgccgaggcgctgaccaccgtcgtgacgaagctcgccgccgagggcgactcggcgcgcgcctactgcgtcgacgtgtgcgacagcgaggcggtggacgcgctggtgcgccgggtcgaggacgagatggggccggtcgccatcctggtcaacgccgccggcgtgctgcacaccggacgggtcgtcgagctgtcggaccggcagtggcgccggaccttctcggtgaacgccgacggcgtgttccacgtgtcccgggcggtggcgcggcggatggtgggccgccgtcgtggcgcgatcgtcaccgtggcgtcgaacgccgccggggtgccgcgtaccgagatggccgcgtacgccgcctccaaggccgcgtccgcgcagttcacccgctgcctggggcttgagctgtccggctacggcatccggtgcaacgtggtctcgcccggctccaccgacacccccatgctgcgggccatgctcggcgagggcgccgacccgagcgcggtgatcgagggcacgccgggcgcgtaccgcgtcggcatcccgctgcgcaagctggcccagccgcgcgacgtggccgaggcggtcgcctatctggtgtccgaccaggcgggccacgtgaccatgcacgacctgtacgtcgacggcggcgcggccctgcacgtgtga

SEQ ID NO: 995 - protein, 261 aa, Micromonospora sp.; strain 046-EC011
MELTGIESKVALVTGAGQGIGAAVAGVLARAGAQVAAVDRNAEALTTVVTKLAAEGDSARAYCVDVCDSEAVDALVRRVEDEMGPVAILVNAAGVLHTGRVVELSDRQWRRTFSVNADGVFHVSRAVARRMVGRRRGAIVTVASNAAGVPRTEMAAYAASKAASAQFTRCLGLELSGYGIRCNVVSPGSTDTPMLRAMLGEGADPSAVIEGTPGAYRVGIPLRKLAQPRDVAEAVAYLVSDQAGHVTMHDLYVDGGAALHV

SEQ ID NO: 996 - DNA, 765 bp, Streptomyces cyaneogriseus
  CDS (1)..(765): transl_table=11
atggatcgttacgcgaagcgtttcgaggaccggctggtcctggtcacgggggcggggagcggcatcgggcgggcgacggcctgccggttcggtgccgccggggcgcggctggtgtgtgtggaccgggacgggcccggcgcggaggcgaccgccgaactggcgcgtgcgcggggggcgcgggcggcgtgcgccgaggtggccgacgtctcggacgaggtggcgatggagcggctcgccgcgcgcgtcacggccgcgcacggcgtgctggacgtgctcgtgaacaatgccggtatcggcatgtcggggcggtttctcgacacgtcggccgaggactggcgccgcaccctgggggtgaatctgtggggcgtcatccacgggtgccggctcctcggccggggcatggccgagcgccggcagggcggtcacatcgtgacggtggcctcggcggccgcgttccagccgacccgggtcgttccggtgtacgccaccagcaaggccgcggccctgatgctgagcgagtgtctgcgcgcggagttggcggagttcggcatcggtgtgagcgtggtctgccccggcctggtccgtacgccgttcgcgtccgcgatgtacttcgccggcgcgtcccccgacgagcacacccggctgcgtgagtcctccgcccgccgcttcgcgggccgcggctgcccgccggagaaggtcgcggacgccgtcctgcgcgcgatcatgcggacggccttgccgacggtgaccgggtcgacgccgtag

SEQ ID NO: 997 - protein, 254 aa, Streptomyces cyaneogriseus
MDRYAKRFEDRLVLVTGAGSGIGRATACRFGAAGARLVCVDRDGPGAEATAELARARGARAACAEVADVSDEVAMERLAARVTAAHGVLDVLVNNAGIGMSGRFLDTSAEDWRRTLGVNLWGVIHGCRLLGRGMAERRQGGHIVTVASAAAFQPTRVVPVYATSKAAALMLSECLRAELAEFGIGVSVVCPGLVRTPFASAMYFAGASPDEHTRLRESSARRFAGRGCPPEKVADAVLRAIMRTALPTVTGSTP

SEQ ID NO: 998 - DNA, 774 bp, Arabidopsis thaliana
  CDS (1)..(774)
atgtcgggactcagattggatggcaaaatcgcaataataacaggcggagctagcgggattggagccgaagcggttaggctgttcacggaccacggagctaaggtggtcatcgttgactttcaagaagaacttggtcaaaacgttgccgtttctgtcgggaaagacaaagcaagtttttaccgttgcgatgttacaaacgaaaaggaggtagaaaacgccgttaagttcaccgtcgaaaagtacgggaagcttgacgttctctttagtaacgccggcgttatggaacagccgggaagctttctcgacttgaatctggaacagtttgaccgaaccatggcggtcaacgttcgtggtgcggctgcgtttatcaaacacgctgcacgagccatggtggagaaaggcacgcgtgggtcaatcgtatgtacgaccagcgtcgcgtcggagatcggtggtccaggacctcacgcgtacacggcgtctaagcacgctcttctcgggctggttaaatcggcttgtggcgggctagggaagtacgggattagagtcaacggcgttgcaccatacgcggtggcgacggcgataaatagccgtgacgaggaaacggtgaggatggtggaggaatatagcgcagccacggggattctcaaaggtgtggtgcttaaggctcgccatgtggcagaggcggctttgtttctggcttcggatgattcggcttacgttagcggtcagaatctggctgttgacgggggttatagcgtcgttaagcccatttga

SEQ ID NO: 999 - protein, 257 aa, Arabidopsis thaliana
MSGLRLDGKIAIITGGASGIGAEAVRLFTDHGAKVVIVDFQEELGQNVAVSVGKDKASFYRCDVTNEKEVENAVKFTVEKYGKLDVLFSNAGVMEQPGSFLDLNLEQFDRTMAVNVRGAAAFIKHAARAMVEKGTRGSIVCTTSVASEIGGPGPHAYTASKHALLGLVKSACGGLGKYGIRVNGVAPYAVATAINSRDEETVRMVEEYSAATGILKGVVLKARHVAEAALFLASDDSAYVSGQNLAVDGGYSVVKPI

SEQ ID NO: 1000 - DNA, 828 bp, Mycobacterium tuberculosis H37Rv
  CDS (1)..(828): transl_table=11
atggacgggtttcccgggcgcggtgcggtcatcactggcggtgccagtggcatcgggttggctaccggcaccgagttcgcccgccgcggagccagagtcgtgctaggggacgttgacaagccgggacttcggcaggcggtgaaccacctgcgtgccgaggggttcgatgtgcacagcgtgatgtgcgacgtccggcatcgagaagaggtcactcacctcgcggacgaggctttccgcctgctcggccacgtcgatgtcgtattcagcaacgccggcatcgttgtcggcggtccgatcgtggagatgacgcacgacgactggcgttgggtgatcgacgtcgacctgtggggctcgatccatacggtcgaagcgttcctgccgaggttgcttgagcagggcacgggcgggcatgtggtgttcaccgcgtcctttgccgggctggtgcccaatgccggactcggcgcatacggcgttgccaagtacggggttgtcggtctggcggagacgctggcccgcgaggtcaccgccgacggcattggggtgtcggtgctctgcccgatggtcgtcgaaaccaatctggttgccaactctgaacgaatccgaggcgcggcttgcgcgcagtcctcaacgacgggatcgcccggtccactccccctgcaggacgacaacctgggcgtcgacgatatcgcccagctaacagccgatgcgattctggccaaccgcctctacgtccttccgcatgcggcctcgcgcgcttcgatccgccgcaggttcgagcgcattgaccgcaccttcgacgaacaggccgccgaggggtggcggcattag

SEQ ID NO: 1001 - protein, 275 aa, Mycobacterium tuberculosis H37Rv
MDGFPGRGAVITGGASGIGLATGTEFARRGARVVLGDVDKPGLRQAVNHLRAEGFDVHSVMCDVRHREEVTHLADEAFRLLGHVDVVFSNAGIVVGGPIVEMTHDDWRWVIDVDLWGSIHTVEAFLPRLLEQGTGGHVVFTASFAGLVPNAGLGAYGVAKYGVVGLAETLAREVTADGIGVSVLCPMVVETNLVANSERIRGAACAQSSTTGSPGPLPLQDDNLGVDDIAQLTADAILANRLYVLPHAASRASIRRRFERIDRTFDEQAAEGWRH

SEQ ID NO: 1002 - DNA, 882 bp, Mycobacterium tuberculosis H37Rv
  CDS (1)..(882): transl_table=11
atgacatcgctgcaaggcaaggtcgtcttcattaccggtgctgcccggggaatcggggctgaggtcgcccgtcggctgcacaacaagggcgccaaactggtgctgaccgacctgagcaaatcagagctggcggtgatgggcgccgaactcggcggcgacgaccgcctactcaccgtggtagccgacgtgcgcgacctgcccgccatgcaggccgcagccgagacggccgtcgaacgattcggcggcatcgacgtcgtcgtggccaacgccggcatcgccagctacggctccgtgctgaaggtcgacccgcaggcgttccggcgggtgttggacgtcaatttgctgggtaacttccacacggtgcgggcgacgttgcccgcgctgatcgaccgccgcggttacgtattgatcgtctcgtcgcttgccgcgttcgcggcgccgcccgggatggcgccctacaacatgtcgaaggcgggtaacgagcacttcgccaacgcgttgcgactcgaggtcgcacacctgggcgtcagcgtcggctcggcgcacatgtcgtggatcgacaccgcgttggttcgcgataccaaggccgacctgcctgcgttcgccgaattgctggcgcgcctcccttggccgttgaacaagaccacgtcggtcaacaagtgtgcggccgcattcgtcaacggcattgagggccgaaaagatcgcgtgtactgcccgggctgggtggccctgttccgttggctcaagccgttgttgtccacccgggtaggccaacgtcccatccgcaacaccgttgccaagctgatgccccagatggatgccgaggtcgccgcgctcggccgctttgccagcgcctacaccgaatcactcgagaattcctag

SEQ ID NO: 1003 - protein, 293 aa, Mycobacterium tuberculosis H37Rv
MTSLQGKVVFITGAARGIGAEVARRLHNKGAKLVLTDLSKSELAVMGAELGGDDRLLTVVADVRDLPAMQAAAETAVERFGGIDVVVANAGIASYGSVLKVDPQAFRRVLDVNLLGNFHTVRATLPALIDRRGYVLIVSSLAAFAAPPGMAPYNMSKAGNEHFANALRLEVAHLGVSVGSAHMSWIDTALVRDTKADLPAFAELLARLPWPLNKTTSVNKCAAAFVNGIEGRKDRVYCPGWVALFRWLKPLLSTRVGQRPIRNTVAKLMPQMDAEVAALGRFASAYTESLENS

SEQ ID NO: 1004 - DNA, 837 bp, Pseudomonas aeruginosa PAO1
  CDS (1)..(837): transl_table=11
atgccgcgcaaggtattcagcagccaggcctaccgccacaaggtggtgctggtcagcggcggctgttccggcatcggtcgcgcgctggcgctgcgtttcgcccgggccggtgcgcgactggcgatcctcgacctcgaccaggcggcgctggacagtttggtccagcacctgcgcgaccatctcggcggcgaggcgctcggcctgcgctgcgacgtcgccgacgccgatgcggtggagcgtgccgtggcgctggcggtggagcgcttcggcggcatcgacgtgctggtcaacaacgccggcatcacccaccgcggtaccttcgccgaaaccggcctgggggttttccgcaaggtcatggcggtgaacttcttcggcgccgtgcattgcacccgcgcggcgctgccgagcctgctcgaacggcgcgggcagatcgtcgtgctcggttcgctgaccggcttcgccccgttgctctaccgcagcgcctacaacgccagcaagcatgccttgcacggtctgttcgataccctgcggatggagctggaaggcaccggcgtcagcgtgaccctggcctgcccgggattcaccgccaccgacctgcgcaagaacgcgctggtcggcgatggctcggtgactcgccagccggtgcaagtgctgggcagccaggtggcatcgccggtggaggtcgccgaggcgatcttccagggcgccgcgcggcgccggcgcctgctggtgctgtccaacgtcaactggcgggcgcggctgctggcgcgcttctttccgcgtctcttcgaaaagctgctggtgccgcgcctgtcgggactcaagccgcaaccctga

SEQ ID NO: 1005 - protein, 278 aa, Pseudomonas aeruginosa PAO1
MPRKVFSSQAYRHKVVLVSGGCSGIGRALALRFARAGARLAILDLDQAALDSLVQHLRDHLGGEALGLRCDVADADAVERAVALAVERFGGIDVLVNNAGITHRGTFAETGLGVFRKVMAVNFFGAVHCTRAALPSLLERRGQIVVLGSLTGFAPLLYRSAYNASKHALHGLFDTLRMELEGTGVSVTLACPGFTATDLRKNALVGDGSVTRQPVQVLGSQVASPVEVAEAIFQGAARRRRLLVLSNVNWRARLLARFFPRLFEKLLVPRLSGLKPQP

SEQ ID NO: 1006 - DNA, 837 bp, Mycobacterium tuberculosis CDC1551
  CDS (1)..(837): transl_table=11
ttgcgtgctgtggacgggtttcccgggcgcggtgcggtcatcactggcggtgccagtggcatcgggttggctaccggcaccgagttcgcccgccgcggagccagagtcgtgctaggggacgttgacaagccgggacttcggcaggcggtgaaccacctgcgtgccgaggggttcgatgtgcacagcgtgatgtgcgacgtccggcatcgagaagaggtcactcacctcgcggacgaggctttccgcctgctcggccacgtcgatgtcgtattcagcaacgccggcatcgttgtcggcggtccgatcgtggagatgacgcacgacgactggcgttgggtgatcgacgtcgacctgtggggctcgatccatacggtcgaagcgttcctgccgaggttgcttgagcagggcacgggcgggcatgtggtgttcaccgcgtcctttgccgggctggtgcccaatgccggactcggcgcatacggcgttgccaagtacggggttgtcggtctggcggagacgctggcccgcgaggtcaccgccgacggcattggggtgtcggtgctctgcccgatggtcgtcgaaaccaatctggttgccaactctgaacgaatccgaggcgcggcttgcgcgcagtcctcaacgacgggatcgcccggtccactccccctgcaggacgacaacctgggcgtcgacgatatcgcccagctaacagccgatgcgattctggccaaccgcctctacgtccttccgcatgcggcctcgcgcgcttcgatccgccgcaggttcgagcgcattgaccgcaccttcgacgaacaggccgccgaggggtggcggcattag

SEQ ID NO: 1007 - protein, 278 aa, Mycobacterium tuberculosis CDC1551
MRAVDGFPGRGAVITGGASGIGLATGTEFARRGARVVLGDVDKPGLRQAVNHLRAEGFDVHSVMCDVRHREEVTHLADEAFRLLGHVDVVFSNAGIVVGGPIVEMTHDDWRWVIDVDLWGSIHTVEAFLPRLLEQGTGGHVVFTASFAGLVPNAGLGAYGVAKYGVVGLAETLAREVTADGIGVSVLCPMVVETNLVANSERIRGAACAQSSTTGSPGPLPLQDDNLGVDDIAQLTADAILANRLYVLPHAASRASIRRRFERIDRTFDEQAAEGWRH

SEQ ID NO: 1008 - DNA, 933 bp, Mycobacterium tuberculosis CDC1551
  CDS (1)..(933): transl_table=11
atgccctgctcggggtggacctgtagccggcgcggcggtacgttttcggccatgacatcgctgcaaggcaaggtcgtcttcattaccggtgctgcccggggaatcggggctgaggtcgcccgtcggctgcacaacaagggcgccaaactggtgctgaccgacctgagcaaatcagagctggcggtgatgggcgccgaactcggcggcgacgaccgcctactcaccgtggtagccgacgtgcgcgacctgcccgccatgcaggccgcagccgagacggccgtcgaacgattcggcggcatcgacgtcgtcgtggccaacgccggcatcgccagctacggctccgtgctgaaggtcgacccgcaggcgttccggcgggtgttggacgtcaatttgctgggtaacttccacacggtgcgggcgacgttgcccgcgctgatcgaccgccgcggttacgtattgatcgtctcgtcgcttgccgcgttcgcggcgccgcccgggatggcgccctacaacatgtcgaaggcgggtaacgagcacttcgccaacgcgttgcgactcgaggtcgcacacctgggcgtcagcgtcggctcggcgcacatgtcgtggatcgacaccgcgttggttcgcgataccaaggccgacctgcctgcgttcgccgaattgctggcgcgcctcccttggccgttgaacaagaccacgtcggtcaacaagtgtgcggccgcattcgtcaacggcattgagggccgaaaagatcgcgtgtactgcccgggctgggtggccctgttccgttggctcaagccgttgttgtccacccgggtaggccaacgtcccatccgcaacaccgttgccaagctgatgccccagatggatgccgaggtcgccgcgctcggccgctttgccagcgcctacaccgaatcactcgagaattcctag

SEQ ID NO: 1009 - protein, 310 aa, Mycobacterium tuberculosis CDC1551
MPCSGWTCSRRGGTFSAMTSLQGKVVFITGAARGIGAEVARRLHNKGAKLVLTDLSKSELAVMGAELGGDDRLLTVVADVRDLPAMQAAAETAVERFGGIDVVVANAGIASYGSVLKVDPQAFRRVLDVNLLGNFHTVRATLPALIDRRGYVLIVSSLAAFAAPPGMAPYNMSKAGNEHFANALRLEVAHLGVSVGSAHMSWIDTALVRDTKADLPAFAELLARLPWPLNKTTSVNKCAAAFVNGIEGRKDRVYCPGWVALFRWLKPLLSTRVGQRPIRNTVAKLMPQMDAEVAALGRFASAYTESLENS

SEQ ID NO: 1010 - DNA, 864 bp, Mycobacterium tuberculosis CDC1551
  CDS (1)..(864): transl_table=11
atgttgcagaggggagccggacagtatttcgcgggtaagcggtgctttgtcaccggcgcggccagtggcatcggtcgcgcgaccgcgttgcgcctcgcggcgcaaggtgccgagctgtatctgaccgaccgcgaccgtgatggcttggcgcaaaccgtgtgtgacgcccgtgcactcggcgctcaggtgcccgagcatcgagttctggacgtctccgactaccaggacgtggcggcattcgcggccgatatccacgcccgtcatcccagcatggacgtggtactaaacatcgccggtgtgtcggcctggggcaccgttgaccagctcacgcacgatcagtggagcaggatggtcgcgatcaatctcatgggcccaatccacgtcatcgagaccttggtcccaccgatggtcgccgccggtcggggcgggcacctggtcaatgtgtcctcggcggccgggctggttggcttgccgtggcatgcggcctatagcgctagcaagtacgggttgcggggactttctgaggtgctgcgcttcgatctggcccggcacggcatcggggtgtcggtcgtggtgcctggcgccgtcaagaccccgctggtcaatacggtcgagatcgccggagtggatcgcgacgacccgagggtcaaccgctgggtcgaacggttcagtggtcacgccgtgacgccggagaaggcggccgacaaaattttggccggggtcacaaggaacagatacctggtctatacgtcggcggacatccgggcgctgtatgcgttcaagcgatatgcgtggtggccatacaccctggtgatgcgacgagtcaacgtgttcttcacgcgcgcgcttcggcccgggccatag

SEQ ID NO: 1011 - protein, 287 aa, Mycobacterium tuberculosis CDC1551
MLQRGAGQYFAGKRCFVTGAASGIGRATALRLAAQGAELYLTDRDRDGLAQTVCDARALGAQVPEHRVLDVSDYQDVAAFAADIHARHPSMDVVLNIAGVSAWGTVDQLTHDQWSRMVAINLMGPIHVIETLVPPMVAAGRGGHLVNVSSAAGLVGLPWHAAYSASKYGLRGLSEVLRFDLARHGIGVSVVVPGAVKTPLVNTVEIAGVDRDDPRVNRWVERFSGHAVTPEKAADKILAGVTRNRYLVYTSADIRALYAFKRYAWWPYTLVMRRVNVFFTRALRPGP

SEQ ID NO: 1012 - DNA, 786 bp, Agrobacterium tumefaciens str. C58
  CDS (1)..(786): transl_table=11
atgacattggcttatcgcaaagttgctctcgtcaccggtgcaggttccggtatcggtcgcgccgccgccctccatctggccgcggcaggcttttcggttggcctgctcgggcgcaccgaatccgaattgcagaccgtggctgctgagatagaggccgcatccggctcttcgagacttcttctcgccgatgtctcggatgaggcggccatgcgtcatgcggtagcaacgcttgtggacgatttcggtcggctggatgtcgtggtggcgaatgccggggtgaacggagtctgggcgcccatcgatgagttgaagccttccgactgggacgacacgatccgcatcaacctgcgcggcacctatctcaccgtccacgccagcgtgccgcatctgaaagcggccggcggcgggtccatcgttatcgtgtcgtccatcaacggcacccgcacgtttacctcgcccggtgcgaccgcctattccgtgacaaaggcgggacagcttgccatggcccagcaactggcgctggagcttggccgccaccggatccgcgtcaatgcggtgtgcccgggcgagatcgaaacggcaatcaatgagaacaccgacatccgcgggagggaaaggaccgaagtgccggttcgttttccggcgggcgacattccggtgacgggcggtgtcgccgggacgagcgaggatgtcgccgaactcatcggttttctcgcctcggatgcatcgcgtcacattaccggcacaccggtatggatcgacggcggtcagggccttctccgataa

SEQ ID NO: 1013 - protein, 261 aa, Agrobacterium tumefaciens str. C58
MTLAYRKVALVTGAGSGIGRAAALHLAAAGFSVGLLGRTESELQTVAAEIEAASGSSRLLLADVSDEAAMRHAVATLVDDFGRLDVVVANAGVNGVWAPIDELKPSDWDDTIRINLRGTYLTVHASVPHLKAAGGGSIVIVSSINGTRTFTSPGATAYSVTKAGQLAMAQQLALELGRHRIRVNAVCPGEIETAINENTDIRGRERTEVPVRFPAGDIPVTGGVAGTSEDVAELIGFLASDASRHITGTPVWIDGGQGLLR

SEQ ID NO: 1014 - DNA, 792 bp, Streptomyces coelicolor A3(2)
  CDS (1)..(792): transl_table=11
atgccgcacacccccactcccccgtcccccgaactcgccggtctcgcggccgtcgtcacgggcggcgcgtcggggatcgggctcgccacggccaggctcctggcccgccgcggcgcccgggtcgccgtcctcgacctcgcgccggacgccgtgccggccaccgacctcgaggccctgctgcccgtcgggtgcgacgtcaccgacgacgcctccgtccgggccggcctcgaccgcgcggtggacctgctgggcggcctggacatcctggtgaacaacgcgggcgtcggcgcccaggggacggtcgcggacaacgacgacgccgagtggcaccgcgtcctggacgtcaacgtcctcggcatcgtgcggaccacccgggccgcactgccccacctgcgcgcctcgcggcacgcggcggtggtcaacacctgctcggtcgcggcgaccgcggggctgccccggcgggcgctgtacagcgcgagcaagggcgccgtgcagtccctgaccctcgccatggccgccgaccacatccgtgagggaatccgggtgaactgcgtcaaccccggtacggcggacaccccgtggatagaccggctgctgtcgagtgccgacgacccggccgccgagcgcaccgcgctcaacgcccgccagccgaccggccgtctggtgagcgccgaggaggtcgccgcggccatcggctacctggcgtccccggcggcggcgtccgtcaccggcacggccctcgccgtggacggtggcatgcagggtctgcggctgcgccccgacggcggctga

SEQ ID NO: 1015 - protein, 263 aa, Streptomyces coelicolor A3(2)
MPHTPTPPSPELAGLAAVVTGGASGIGLATARLLARRGARVAVLDLAPDAVPATDLEALLPVGCDVTDDASVRAGLDRAVDLLGGLDILVNNAGVGAQGTVADNDDAEWHRVLDVNVLGIVRTTRAALPHLRASRHAAVVNTCSVAATAGLPRRALYSASKGAVQSLTLAMAADHIREGIRVNCVNPGTADTPWIDRLLSSADDPAAERTALNARQPTGRLVSAEEVAAAIGYLASPAAASVTGTALAVDGGMQGLRLRPDGG

SEQ ID NO: 1016 - DNA, 801 bp, Streptomyces coelicolor A3(2)
  CDS (1)..(801): transl_table=11
atgacggacaccaggcgattcaccgattacgcggcactcgtgacgggcgcggcccggggcatcggcgcggccaccgcacgccggctcgccacggagggagcccgggtactgctgaccgacgtggacctcgtgggggcgcggcggaccgcggcggaactggcggacgacgggctcgacgcgaccgcgttcgcctgcgacgtgagcgaccgggagtccgtggagacggccgtcgcccatgccgtggaaaccttcggcggtctggacgtactggtcaacaacgccttcgcctgtacgccggacgccccgctcttcgaggacgaaccggacgacgtctgggcccgcgacctcgatgtcaccctcaccggcgcccaacgctgctgccgggccgcgctgccccacctcgcggcctccggccgcggcgcgatcgtgagcatcggttcggtcaatggggtccaggacttcggcaaccacgcctacagcgcggcaaaggcgggtctcgcctcgctgacccgcaccctcgccggacacgcgggcccgcgcggcgtccgcgtcaacctcgtcacgccgggcacggtgcgcaccacggcctgggagggccgggacgaggaactggccgcggtgcgggggctgtacccgctggggcgggtcggcgagcccgaggacgtcgcggcggccgtcgccttcctcgcctcgcgcgacgccgcctggatcaccgggaccaccctggccgtcgacggcggtctgaccgcggtcaacaccggcttccggcaggcgatcgcgcgggcggagggctcggactga

SEQ ID NO: 1017 - protein, 266 aa, Streptomyces coelicolor A3(2)
MTDTRRFTDYAALVTGAARGIGAATARRLATEGARVLLTDVDLVGARRTAAELADDGLDATAFACDVSDRESVETAVAHAVETFGGLDVLVNNAFACTPDAPLFEDEPDDVWARDLDVTLTGAQRCCRAALPHLAASGRGAIVSIGSVNGVQDFGNHAYSAAKAGLASLTRTLAGHAGPRGVRVNLVTPGTVRTTAWEGRDEELAAVRGLYPLGRVGEPEDVAAAVAFLASRDAAWITGTTLAVDGGLTAVNTGFRQAIARAEGSD

SEQ ID NO: 1018 - DNA, 792 bp, Streptomyces coelicolor A3(2)
  CDS (1)..(792): transl_table=11
atgaacaccgtgagaaccaccgacgaggaaagcgccggcgcgcggaaggtcgccgtcgtcacgggtgccggatccggcatcggccgggcggtcgccgtcgaactgctcaccgccggctggtcggtcgccctggccggccgtcgccccgagcccctggccgagacggccgcggcggcaccggcgggcggcggcacggcgctcaccgtccgcgccgacgtgtcgcgcccggaggacgtggcggctctgttcggcgcggtgcgcgaccggttcgggcgactggacctgctgttcaacaacgcggggacgttcggtcccggcggcgtaccggtcgaggaccttccctacgaggcctggcggcacgtggtggacaccaacctcaacggggcgttcctgtgcgcacaggcggcgtaccggcagatgaaggagcaggacccgcggggcggccggatcatcaacaacggctcgatctcggcacacacgccgcgtccgcactcggtggcgtacaccgcgaccaagcacgcgctgacgggtctgaccaagtcactgtcgctggacggccgcccctacggcatcgcggtcggccagatcgacatcggcaacgcggcgaccgagatgacggccgggatgcagaccggcgcgctccaggccaacggggagacggcacccgagcccgtgatggacgtcgccgacgtggcgcgcacggtgcggcacatggccgagctgcctctggaggccaacgtgcagttcgcgacggtcatggcgacggcgatgccgtacgtggggcgcggctga

SEQ ID NO: 1019 - protein, 263 aa, Streptomyces coelicolor A3(2)
MNTVRTTDEESAGARKVAVVTGAGSGIGRAVAVELLTAGWSVALAGRRPEPLAETAAAAPAGGGTALTVRADVSRPEDVAALFGAVRDRFGRLDLLFNNAGTFGPGGVPVEDLPYEAWRHVVDTNLNGAFLCAQAAYRQMKEQDPRGGRIINNGSISAHTPRPHSVAYTATKHALTGLTKSLSLDGRPYGIAVGQIDIGNAATEMTAGMQTGALQANGETAPEPVMDVADVARTVRHMAELPLEANVQFATVMATAMPYVGRG

SEQ ID NO: 1020 - DNA, 831 bp, Streptomyces coelicolor A3(2)
  CDS (1)..(831): transl_table=11
atgaacaaggtgtggctgatcaccggggcgagcagcggcttcgggcgggcgatcgccgaggcggccctggccgacggcgacgtcgtggtcggcgcggctcggcgccccgaggcgctggacgacctcgtggccgcgcacccggaccagatggaggcgctgcgcctggacgtcgccgacacggccgccgccggggacgccgtacgggacgtggtggcgcggcacggcagggtggacgtattggtcaacaacgcgggccgcacacacgtcggtgccctcgaggagaccggcgaggacgaactgcgggcgctgttcgacgtgcacgtcttcggcccggccgcgctgacgcgcgcggtactgccgtccatgcgggagcggcgttcgggcgcgatcgtgcagatgagcagcatgggcgggcagatgtccttcgcgggcttctccgcgtacagcggcacgaagttcgccctggagggcatgtccgaggggctcgcggacgaggtccgggacttcggcatcaaggtgctgatcgtcgagccgggctccttccgcaccggcctgttcgaggccgggaacgccgggatcagcgccgacagcggcgtgtacgccaaggtcggcgagacccgcgggatgatcgccgcgggcgacggcagccagcccggcgaccccgccagggcggccgcggtcatccgcgcggccctcgcggccgagcacactccgctgcgcctgccgctgggcgacgacggcgtcaccgcggtcctcggccacctcgaccgggtccgcgaggaggtcgagacctgggagaagcagacccgggccacggcgttcgacgactga

SEQ ID NO: 1021 - protein, 276 aa, Streptomyces coelicolor A3(2)
MNKVWLITGASSGFGRAIAEAALADGDVVVGAARRPEALDDLVAAHPDQMEALRLDVADTAAAGDAVRDVVARHGRVDVLVNNAGRTHVGALEETGEDELRALFDVHVFGPAALTRAVLPSMRERRSGAIVQMSSMGGQMSFAGFSAYSGTKFALEGMSEGLADEVRDFGIKVLIVEPGSFRTGLFEAGNAGISADSGVYAKVGETRGMIAAGDGSQPGDPARAAAVIRAALAAEHTPLRLPLGDDGVTAVLGHLDRVREEVETWEKQTRATAFDD

SEQ ID NO: 1022 - DNA, 783 bp, Streptomyces coelicolor A3(2)
  CDS (1)..(783): transl_table=11
atgacaacgaccggttccgcactgtccggcgcgctgcccttcgccggtctcaccgcgctggtcaccggcggcgcctccgggatcggcctggccaccgcccggctgctcaccgcccagggcgcccgcgtggccgtcctggacctgtccgaaccgcagcccgccggcttcgcggcggccctgcgcgcggacatacgcgacgacgcctcggtggtggccgccgtcgacgcggcggtctcccggctcggcggactcgacatcgtggtcaacaacgcggggatcggggcgcagggcggcgtcgaggacaactccgacgaggagtggcaccgcgtcctggacaccaacgtcgtcggcatggtccgggtcacccgggccgcgctgcccgccctgcgggcctcccggcacgcggcggtcgtcaacgtcggttccatcgccgccaccgccgggctgccccagcgggtgctgtactcggccggcaagggcgccgtggtggcgatgacccgggccatggccgccgacctgctgccggagggcatccgggtcaacgcggtcaaccccgggaccgcggacacgccctggatcggccggctgctggaccgggccgccgatcccgccgccgagtacaccgccctggcggcccggcagccgcacggccgcctggtcgccgccgacgaggtcgccgccgcgatcgcctacctcgcctcgccggccgccgggtccaccacgggcacgtgcctggccgtggacggcggcatggacggcctgcggctgcgcaaggaggggtga

SEQ ID NO: 1023 - protein, 260 aa, Streptomyces coelicolor A3(2)
MTTTGSALSGALPFAGLTALVTGGASGIGLATARLLTAQGARVAVLDLSEPQPAGFAAALRADIRDDASVVAAVDAAVSRLGGLDIVVNNAGIGAQGGVEDNSDEEWHRVLDTNVVGMVRVTRAALPALRASRHAAVVNVGSIAATAGLPQRVLYSAGKGAVVAMTRAMAADLLPEGIRVNAVNPGTADTPWIGRLLDRAADPAAEYTALAARQPHGRLVAADEVAAAIAYLASPAAGSTTGTCLAVDGGMDGLRLRKEG

SEQ ID NO: 1024 - DNA, 792 bp, Streptomyces coelicolor A3(2)
  CDS (1)..(792): transl_table=11
atgagcaccaccggaaccacccccgccaccaccgggtacgccgccgagttcgccggccgtaccgccctcgtcaccggtgccgcctccggtatcggcctggccaccgcccgccggctcggcgccggcggcgcccgggtcgtcgtcgccgacttcaacgccgagggcgccgagaaggccgccgccgagctgcgggccggtggcgtcgaggccgccgcggtcgagctggacgtcacccgtccggagtccgtcgaggcggccgtcgggttcgccgtcgacacgttcggctcgctggacctcgccgtcaacaacgccggcatcggcggccccagcgccccgaccggcgagtacgacgtggcggcctaccagcgcgtcgtgcgcaccaacctcgacggcgtcttctactcgatgcgctacgaactgcccgccatcgaggcggccggcaagggcggctcgatcgtgaacgtcgcctccatcctcggctcggtcggcttcgccggctcccccgcctacgtcgccgccaagcacggcgtggtcgggctgacgaaggcggccgccgccgagtacgccgcccgcggcatccggatcaacgcggtcggtccgggcttcatcgacacccccctgctcaagaccatggacgaggccgcctacaaggggctggtcgccctgcacccggccggccgcctcgggcgctccgaggaggtcgcggagctgatcgccttcctgctgtccgaccgcgcgtccttcgtcgcgggcagctatcacctggtcgacggcgcctacaccgccgtctga

SEQ ID NO: 1025 - protein, 263 aa, Streptomyces coelicolor A3(2)
MSTTGTTPATTGYAAEFAGRTALVTGAASGIGLATARRLGAGGARVVVADFNAEGAEKAAAELRAGGVEAAAVELDVTRPESVEAAVGFAVDTFGSLDLAVNNAGIGGPSAPTGEYDVAAYQRVVRTNLDGVFYSMRYELPAIEAAGKGGSIVNVASILGSVGFAGSPAYVAAKHGVVGLTKAAAAEYAARGIRINAVGPGFIDTPLLKTMDEAAYKGLVALHPAGRLGRSEEVAELIAFLLSDRASFVAGSYHLVDGAYTAV

SEQ ID NO: 1026 - DNA, 879 bp, Streptomyces coelicolor A3(2)
  CDS (1)..(879): transl_table=11
atgacagacagtcccctccagaaccgcaccgtcgtggtgaccggcgccgcgcgcggactcggcgccgccctggcccgcgcctgcgcactccgcggcgcccggatcgcgctgctcggtctcgagaagccccgactggacgccctcgcggcggacctgccgaccccggcgctcgccgtcgaggccgacgtcaccgaccccgccgcgctggccgacgcggccggtgagacgcgccggcgcctggggagaccgtcggtcgtggtggcgaacgccggggtcgcgcacggcggtcccttcgccacgtcggaccccgccgagtggggccgtgtcgtcgacgtgaacctgaccggcagcgcccacacggcccgcgccttcctgccggacctgctcgacaccgcgggctaccacctccagatcgcctcgctggcctcgctgggtgccgcgcccatgatgagcgcctactgcgcctccaaggcgggcgtggaggccttcgcccactcgctgcgcgccgaagtggcccaccgcggcgtcgccgtgggcatcgcctacctcaactggatcgacaccgacatgatccgcgacgccgaccgccatccggtcctgcgcgaactgcgcgcccacatgccgcccccggcccgccgcaccttttcggcggacgacgtcgccgcccggctggtccgcgcgctggagcgccgccgtaccgccgtgtacgtgccgggctggctgcgcctggtgcagctggggcgcgcgtcactgccgcccgtggtggcacggctgtcccgccgcgaactgccccgtctggaggccgaggaggaactgggacccaccggtccgctcggcgcgggcggccgggccggccacgcggcgggaacacgtacgtag

SEQ ID NO: 1027 - protein, 292 aa, Streptomyces coelicolor A3(2)
MTDSPLQNRTVVVTGAARGLGAALARACALRGARIALLGLEKPRLDALAADLPTPALAVEADVTDPAALADAAGETRRRLGRPSVVVANAGVAHGGPFATSDPAEWGRVVDVNLTGSAHTARAFLPDLLDTAGYHLQIASLASLGAAPMMSAYCASKAGVEAFAHSLRAEVAHRGVAVGIAYLNWIDTDMIRDADRHPVLRELRAHMPPPARRTFSADDVAARLVRALERRRTAVYVPGWLRLVQLGRASLPPVVARLSRRELPRLEAEEELGPTGPLGAGGRAGHAAGTRT

SEQ ID NO: 1028 - DNA, 1032 bp, Streptomyces coelicolor A3(2)
  CDS (1)..(1032): transl_table=11
atgagcggcgcccgaggtcacggacaggtcgtcgtcgtcacgggcgcgaccggcggcgtcggccgggccgccgcccgggccttcggcgcgcgcggggccgcggtcgccctcctggcccggggcgagtacgccctggaacgggcggccgaggagattcgcgaggccggcgggcgggcgctgccgctggtcgtggacgtcgccgacgcggaggccgtggacgcggcggccggccgggtcgaggaggaactcggcccgatcgacgtatgggtgaacgccgcgttctcgaccgtcttcgcgcccgtgccggagatccggcccgaggagctgaggcgggccaccgaggtcacctacttcggcttcgtccacggcacccaggccgccctgcggcgcatgacgccgcgcgaccgcggcaccatcgtccaggtcggctcggccctggccgaacgcagcgtcccgctccaggccgtctactgcggggccaagcacgccatccaggggttcaccgagtcgctgcgctgcgaactgctgcacgaccgcagcggggtgcgggtgaccatggtgcagatgccgggcctcaacacgccccagttcagctgggtcctcacccggctgccccgccatccgcgcccggtggcccccgtctaccagcccgaggtcgccgcccgggccgtgctgcacgccgccgaccatcccgagcggcgcatgtactgggtcggcggctccaccgtcgccaccctgctcggccagaagctcgccccggggctcctcgaccgctatctggcgcgcaccgggtacgacgggcagcagacggaccggcccgtcgatccgtcgcggccggccaacctctggaagccgccggacgacaccgcaccggacgactacggcgcacacggcatcttcgacgacgaggcccatgcgcgcagcgtccagttctggatctcccgcaaccgccgccggctggccctggccacggccgtgaccggggcggtcgccgcggccctggccgggggcctgggccgacgcgcgggctga

SEQ ID NO: 1029 - protein, 343 aa, Streptomyces coelicolor A3(2)
MSGARGHGQVVVVTGATGGVGRAAARAFGARGAAVALLARGEYALERAAEEIREAGGRALPLVVDVADAEAVDAAAGRVEEELGPIDVWVNAAFSTVFAPVPEIRPEELRRATEVTYFGFVHGTQAALRRMTPRDRGTIVQVGSALAERSVPLQAVYCGAKHAIQGFTESLRCELLHDRSGVRVTMVQMPGLNTPQFSWVLTRLPRHPRPVAPVYQPEVAARAVLHAADHPERRMYWVGGSTVATLLGQKLAPGLLDRYLARTGYDGQQTDRPVDPSRPANLWKPPDDTAPDDYGAHGIFDDEAHARSVQFWISRNRRRLALATAVTGAVAAALAGGLGRRAG

SEQ ID NO: 1030 - DNA, 795 bp, Drosophila melanogaster
  CDS (1)..(795)
atgggcagcaagggcaaggctggtctggacttctccggcaaagtggtgcttatcacgggcgcagcctccgggatcggggccgccgcggcggagatgttctcgaagctgggtgcctgcctggccctggtggatcgggaggaggagggcctcatatgtgtgatgaaacgctgcatgaagatgggccacgagccgtacggcatagccggagatctgctcaagcctccggagatcgaatgcattgcgcggaagaccacggagcgctacgagggcaagctggatgtgctggtaaatggggctggcatcatgcccacgggaacgctgcagagcacggaactggcctgcttcacccacgtgatggaggccaatgtgcgttctgggttttatctgaccaagttgctgctgccccagttgctgcagtgtaagggcagcattgtcaacgtgtccagcgtctgcggacttcgcgcttttcccaatctggtggcctacaacatgtccaaggcggcggtggaccagtttacccgctcccttgccctggatctgggtccccagggtgttcgggtgaatgcggtcaatccgggtgtgattcgcaccaatctgcaaaaggcggggggcatggacgagcagagctacgccgaatttctggagcactcgaagaagacccacgccctgggccggattggggagccaaaggaggtggcggccgccatttgcttcctggccagcgagctggccagcttcgtgaccggcgtgacccttcctgtggacggtggcaagcaggtcatgtgtccgcgctag

SEQ ID NO: 1031 - protein, 264 aa, Drosophila melanogaster
MGSKGKAGLDFSGKVVLITGAASGIGAAAAEMFSKLGACLALVDREEEGLICVMKRCMKMGHEPYGIAGDLLKPPEIECIARKTTERYEGKLDVLVNGAGIMPTGTLQSTELACFTHVMEANVRSGFYLTKLLLPQLLQCKGSIVNVSSVCGLRAFPNLVAYNMSKAAVDQFTRSLALDLGPQGVRVNAVNPGVIRTNLQKAGGMDEQSYAEFLEHSKKTHALGRIGEPKEVAAAICFLASELASFVTGVTLPVDGGKQVMCPR

SEQ ID NO: 1032 - DNA, 783 bp, Pseudomonas putida KT2440
  CDS (1)..(783): transl_table=11
atgacccgttacgccatgatcactggtgcttccagcggcctgggcctggccttggcggaagcgctggcacggcgcgggcgcaatctgatcctggtggcacgccaacgagaaacgctggagcctgttgccatcgagctgacccagcgtttcggcgtcgaggtgctgttccgcgcctgcgacctcagccagccgctgcgcctttcaggcttcgtgctagagctggaagaaggcgagcggcgtatcgatttgctggtcaactgcgcgggcttgcgcacctatgggccgttcctggcccatgaatgggccgacgaacaggatctgctggaagtcaacgtgctggccctgagccgcctgtgccatgccatcggtaacctgatggctgtacagggtggcgggcagattctcaacgtcgccggcctggccggggtggcgcctggcccatggatggccgcctatgccgccagcaaggcctacgtgttgagcttttcccaggccctgcgcgaagaactcaagcgcaccggcatcaaggtctcggtactgtgccctggcccggtacgttccgcacgccggcgcattgcgcggctcgatggcaagccgcgctgcctcagccccgaggaagtggcgctgtacaccgtgcgggcactggacaagaaccgcgcactgatcatgcccggccggcgcaaccgctggctggcgttcgcaccgcggctgctgccgcgctggctggtgcgcaagctggccggggccatccaccgccgctattgcccctcaggcatggaatag

SEQ ID NO: 1033 - protein, 260 aa, Pseudomonas putida KT2440
MTRYAMITGASSGLGLALAEALARRGRNLILVARQRETLEPVAIELTQRFGVEVLFRACDLSQPLRLSGFVLELEEGERRIDLLVNCAGLRTYGPFLAHEWADEQDLLEVNVLALSRLCHAIGNLMAVQGGGQILNVAGLAGVAPGPWMAAYAASKAYVLSFSQALREELKRTGIKVSVLCPGPVRSARRRIARLDGKPRCLSPEEVALYTVRALDKNRALIMPGRRNRWLAFAPRLLPRWLVRKLAGAIHRRYCPSGME

SEQ ID NO: 1034 - DNA, 768 bp, Pseudomonas putida KT2440
  CDS (1)..(768): transl_table=11
atgcacatagccaataaacatttcatcgtcagcggcgccgcttccgggctgggtgccgcgactgcacagatgctggtcgaggctggcgccaaggtcatgctggtcgacctcaatgcccaggctgtcgaagccaaggcccgcgaactgggcgacaatgcccgtttcgccgtggctgatatcagtgacgagcaggcggcccagtcggctgtcgatgcagctgtcagcgcctttggcagcttgcatgggttggtcaattgtgccggcatcgtcggtgccgagaaggtgctgggcaagcagggcccgcatggcctggccagcttcgccaaggtcatcaacgtcaacctgatcggcagcttcaacctgttgcgtctggctgcggcggccatggccgaaggggctgccgatgagagcggcgagcgtggggtcatcatcaacacggcctccattgccgcctatgacggccagattggccaggccgcctacgccgcctccaagggtgccattgccagcctgaccttgccggccgcgcgcgaactggcacgcttcggcatccgtgtgatgaccatcgctccgggtatctttgaaacccctatgatggccggcatgagcgatgaggtacgtgcttcgctggctgccggcgtgccgttcccgccccgcttgggccgcccgcaggaatacgccgcgctggcccgccacatcatcgagaacagcatgctcaacggtgaggtcatccgcctcgacggtgcgctgcgcatggctgccaagtaa

SEQ ID NO: 1035 - protein, 255 aa, Pseudomonas putida KT2440
MHIANKHFIVSGAASGLGAATAQMLVEAGAKVMLVDLNAQAVEAKARELGDNARFAVADISDEQAAQSAVDAAVSAFGSLHGLVNCAGIVGAEKVLGKQGPHGLASFAKVINVNLIGSFNLLRLAAAAMAEGAADESGERGVIINTASIAAYDGQIGQAAYAASKGAIASLTLPAARELARFGIRVMTIAPGIFETPMMAGMSDEVRASLAAGVPFPPRLGRPQEYAALARHIIENSMLNGEVIRLDGALRMAAK

SEQ ID NO: 1036 - DNA, 762 bp, Bradyrhizobium japonicum USDA 110
  CDS (1)..(762): transl_table=11
atgtccggattgccgcactcgccgcacgcactggtaaccggtggcggccgtggaatcggccgcgcgattgcagcatccctcgtcggcgccggcgccaccgtgacggtgcttggccggaatgccgcaattctggacgaggcggtccgcgcgggagcggcgcattttgcagctgtcgccgatgtctcggacgaagctgcgctgaaagcagccatcgtggaggcgcatgcgcgaaagccgatcgacattctgatcgccaacgcgggcagtgcggagtccgcaccgttctccaaatcggacagcgccctgtttgcgcgcatgatggacgtcaatttcatgggcgtggtccatgccgttcgcgccgtactgccggggatgaaggatcgcccctatggccgcatcgtcgcggtggcgtcgacggcggggctgaaggggtacgcctatgtcagcgcgtacaccgcggccaagcatgcagtggtcggtctcgtgcgttcgctcgccctcgagatggccggcagcaacgtgaccgtgaatgcggtgtgtcccggcttcacggacaccgatctggtcgccggcagcatcgaaaacatcatgaagaagacagggcgaacccgcgagcaggcgatcgccgagctcgccaagcacaacccgcaagggcggctgatctcgcctcagcaggtggccgacgccgtgctttggttgtgcggcgagggtgccggtgcgatcacggggcaggcgattgccgttgccggcggtgagatctag

SEQ ID NO: 1037 - protein, 253 aa, Bradyrhizobium japonicum USDA 110
MSGLPHSPHALVTGGGRGIGRAIAASLVGAGATVTVLGRNAAILDEAVRAGAAHFAAVADVSDEAALKAAIVEAHARKPIDILIANAGSAESAPFSKSDSALFARMMDVNFMGVVHAVRAVLPGMKDRPYGRIVAVASTAGLKGYAYVSAYTAAKHAVVGLVRSLALEMAGSNVTVNAVCPGFTDTDLVAGSIENIMKKTGRTREQAIAELAKHNPQGRLISPQQVADAVLWLCGEGAGAITGQAIAVAGGEI

SEQ ID NO: 1038 - DNA, 912 bp, Streptomyces avermitilis MA-4680
  CDS (1)..(912): transl_table=11
atggcagcaccgcccaaacacccgaatacgtccagccggagagaccacgacaagctcgcccgcacacaaccgctgaccggccgagtgatcgcggtcaccggggcgggccgcggaatcgggcgtgccgtcgcagcccggctcgccgcggccggagccgccgtggcgatcggcgatctcgacacgcggctcgccacggaggcggccggtgccctcagcacgcgtcccggtggccggctgctcgggctgcctctcgacgtcaccgatacaccttccttcgaagacttcctgcgcaccgtcgagacccggctgggaccgatcgacgtactcatcaacaacgccggaatcatgtgggtgggccccttcgcggaagaaccggaggaagccgccctgcgccagttcgacgtcaacgtccacggcgtactgcgcgggatgaaactcgtgatcccgggaatgcggaaacgcggtcgcggccacgtggtgaacatcgcctccgccgccagcaaggtcgccccggccggcgaggcgacctacgcggcgacgaagcacgcactccacggctacagcacagccgtccgcgccgaactgcgcggcaccggcgtgcacatgtccctggtgatgcccggagtcgtggacaccgagctggccgtgggcaccgcgaccggacccacccgacgcctgacgacggatcaggtggccgacgcggtgctcgacgtcgtgctgcgcccgcggttcgaggtcttcgttccccgccaggtagccgccctgacccgcttggccgcgctgctgccgggccgagcccgcgacgccctgcatcacctcctcgtccccaaccagctcgccgccctgtccgaccggtcggtccgcgcggcctacgagcagcgcacccgcaccgcccgccaccccgaaagttga

SEQ ID NO: 1039 - protein, 303 aa, Streptomyces avermitilis MA-4680
MAAPPKHPNTSSRRDHDKLARTQPLTGRVIAVTGAGRGIGRAVAARLAAAGAAVAIGDLDTRLATEAAGALSTRPGGRLLGLPLDVTDTPSFEDFLRTVETRLGPIDVLINNAGIMWVGPFAEEPEEAALRQFDVNVHGVLRGMKLVIPGMRKRGRGHVVNIASAASKVAPAGEATYAATKHALHGYSTAVRAELRGTGVHMSLVMPGVVDTELAVGTATGPTRRLTTDQVADAVLDVVLRPRFEVFVPRQVAALTRLAALLPGRARDALHHLLVPNQLAALSDRSVRAAYEQRTRTARHPES

SEQ ID NO: 1040 - DNA, 756 bp, Streptomyces avermitilis MA-4680
  CDS (1)..(756): transl_table=11
atgaccgacttcgagggcctcaaggcgctggtgaccggcggagcgtccggcatcggccgcgccaccgccgaactcctcgccgcccgtggcgcccaggttgccgtgctcgacctcgacccgagcggtgtcgacaagccgctgttcggccatcgcgccgacgtcaccgacgacagctccgtacgcgaggccgtggccgccgccgtcagcgacctcggcggactcgacgtactgatcaacaacgcgggcatcggagcccagggcacggtcgaggacaacgacgacgcgcagtggcaccgggtcctggacgtcaacgtcctcggcatcgtgcgcacgacgcgtgccgccctgcccctgctgcgcgcctccgcacacgccgcgatcgtcaacacctgctccatcgccgccacggcaggtctgccgcagcgcgccctgtactccgcctccaagggcgccgttctcgccctcaccctcgccatggccgccgaccacgtccgcgagggcatccgcgtcaactgcgtcaaccccggcacggtggacaccccctgggtcggccggctcctcgacgcggcgcccgaccccgccgccgaacgcgcggcactggaggcccgccagcccaccggccgcctcgtgagcgcagccgaggtcgcgggcgccatcgcctacctggccggcccgctgtccgacgccaccaccggcaccgcgctcgccgtggacggcggtatgcaggggctgcggctgcgcccggtgggacagtga

SEQ ID NO: 1041 - protein, 251 aa, Streptomyces avermitilis MA-4680
MTDFEGLKALVTGGASGIGRATAELLAARGAQVAVLDLDPSGVDKPLFGHRADVTDDSSVREAVAAAVSDLGGLDVLINNAGIGAQGTVEDNDDAQWHRVLDVNVLGIVRTTRAALPLLRASAHAAIVNTCSIAATAGLPQRALYSASKGAVLALTLAMAADHVREGIRVNCVNPGTVDTPWVGRLLDAAPDPAAERAALEARQPTGRLVSAAEVAGAIAYLAGPLSDATTGTALAVDGGMQGLRLRPVGQ

SEQ ID NO: 1042 - DNA, 828 bp, Mycobacterium bovis AF2122/97
  CDS (1)..(828): transl_table=11
atggacgggtttcccgggcgcggtgcggtcatcactggcggtgccagtggcatcgggttggctaccggcaccgagttcgcccgccgcggagccagagtcgtgctaggggacgttgacaagccgggacttcggcaggcggtgaaccacctgcgtgccgaggggttcgatgtgcacggcgtgatgtgcgacgtccggcatcgagaagaggtcactcacctcgcggacgaggctttccgcctgctcggccacttcgatgtcgtattcagcaacgccggcatcgttgtcggcggtccgatcgtggagatgacgcacgacgactggcgttgggtgatcgacgtcgacctgtggggctcgatccatacggtcgaagcgttcctgccgaggttgcttgagcagggcacgggcgggcatgtggtgttcaccgcgtcctttgccgggctggtgcccaatgccggactcggcgcatacggcgttgccaagtacggggttgtcggtctggcggagacgctggcccgcgaggtcaccgccgacggcattggggtgtcggtgctctgcccgatggtcgtcgaaaccaatctggttgccaactctgaacgaatccgaggcgcggcttgcgcgcagtcctcaacgacgggatcgcccggtccactccccctgcaggacgacaacctgggcgtcgacgatatcgcccagctaacagccgatgcgattctggccaaccgcctctacgtccttccgcatgcggcctcgcgcgcttcgatccgccgcaggttcgagcgcattgaccgcaccttcgacgaacaggccgccgaggggtggcggcattag

SEQ ID NO: 1043 - protein, 275 aa, Mycobacterium bovis AF2122/97
MDGFPGRGAVITGGASGIGLATGTEFARRGARVVLGDVDKPGLRQAVNHLRAEGFDVHGVMCDVRHREEVTHLADEAFRLLGHFDVVFSNAGIVVGGPIVEMTHDDWRWVIDVDLWGSIHTVEAFLPRLLEQGTGGHVVFTASFAGLVPNAGLGAYGVAKYGVVGLAETLAREVTADGIGVSVLCPMVVETNLVANSERIRGAACAQSSTTGSPGPLPLQDDNLGVDDIAQLTADAILANRLYVLPHAASRASIRRRFERIDRTFDEQAAEGWRH

SEQ ID NO: 1044 - DNA, 852 bp, Mycobacterium avium subsp. paratuberculosis K-10
  CDS (1)..(852): transl_table=11
atgcaagggttcgccggcaaggtcgccgtggtcaccggcgccggatcgggcatcgggcaggcgctggcggtggagctgggccgggccggggccaagctggcgatcagcgacgtggacaccgcggggctggcgcagacggcggagcagcttgccgcgatcggcgcgccggtcaaggcggatcggctcgacgtgaccgaacgcgaggcgttcctggcctacgccgacgcggtcaacgagcattacggccgggtcaaccagatctacaacaacgccggcatcacgttcatcggctccatcgaggacagccggttcaaggacatcgagcgggtggtcgacgtcgacttctggggcgtggtcaacggcaccaaggcgttcctgccccacctgatcgcctccggcgacggacacgtgatcaacatctccagcgcgctcggcctgttctcggcgcccgggcaggcggcctacgtgtcggccaagttcgccgtccgcggcttcaccgaggcgctgcatcaagagatgctgcgcgccggtcacccggtccgggtcaccacggtgcaccccggcggcatcaaaaccgcgttcgcccgcaacgccaccggtgtcgagggcctcgaccacgccgagctggccagcctgttcgaggaacagcaggccaagacgacgccgcagcgcgccgcccagctcatcctggacggggtgcgccgcaacaaggcccgggtgctggtcggacccgacgtcaaggccatggacctgctggtgcgggcggccggccccaactacgagcggctgctggccggtccggtgatgggccgggtcaaggagttcgtgacccggttgctgcccaagcgttaa

SEQ ID NO: 1045 - protein, 283 aa, Mycobacterium avium subsp. paratuberculosis K-10
MQGFAGKVAVVTGAGSGIGQALAVELGRAGAKLAISDVDTAGLAQTAEQLAAIGAPVKADRLDVTEREAFLAYADAVNEHYGRVNQIYNNAGITFIGSIEDSRFKDIERVVDVDFWGVVNGTKAFLPHLIASGDGHVINISSALGLFSAPGQAAYVSAKFAVRGFTEALHQEMLRAGHPVRVTTVHPGGIKTAFARNATGVEGLDHAELASLFEEQQAKTTPQRAAQLILDGVRRNKARVLVGPDVKAMDLLVRAAGPNYERLLAGPVMGRVKEFVTRLLPKR

SEQ ID NO: 1046 - DNA, 819 bp, Magnaporthe grisea 70-15
  CDS (1)..(819)
atgacaggccgcctcgccaacaaagtcgccatcataaccggcgcatcctcgggcatcgggcgcgcgacggccctgctgatggcccgcgagggcgccgccgtcgtgtgcagcgacatccgacagggcccgccgacggactccaacagcagcagcagcatcagcacgcacgaggagattcagcgcctcggcgggcgggccacttttgtgtcgtgcgacacgtcagactcggcgcaggtgcaggcgctcgtcaagtcggccgtggccgagtttgggcgcctcgacatcatgttcaacaacgccggcgtcggcaaggagggggacaattaccccgacaccatgatttggcagtacgacgaggacgactttgacctcaccatggccgtcaacgtcaagggggtgtttttgggctgcaagtacgctgccgcgcagatgaaggaccaggagccgctcgtccccggcggcgatcgtggttggatcgtcaacacggggtccatactgggggttaatgccatcaagggcgtcacggcctatgcggcgtcgaagcatgccgtcttgggtatcaccaaggcggcggctttggattgcgccccttttaatattcacgtcaacgcggttaaccccggctttgtcaagacggtaatgacaaagaatatgttggaggatagcgttggcagtgaggccttggctgcgcggcatccgttcaaggggataggaaacgtcgaggacatagccaagacggtgctgttccttgtcagcgacgatgcgtcctggatcacgggtacgagcctttgtgtcgatggtggatacactacaatgtga

SEQ ID NO: 1047 - protein, 272 aa, Magnaporthe grisea 70-15
MTGRLANKVAIITGASSGIGRATALLMAREGAAVVCSDIRQGPPTDSNSSSSISTHEEIQRLGGRATFVSCDTSDSAQVQALVKSAVAEFGRLDIMFNNAGVGKEGDNYPDTMIWQYDEDDFDLTMAVNVKGVFLGCKYAAAQMKDQEPLVPGGDRGWIVNTGSILGVNAIKGVTAYAASKHAVLGITKAAALDCAPFNIHVNAVNPGFVKTVMTKNMLEDSVGSEALAARHPFKGIGNVEDIAKTVLFLVSDDASWITGTSLCVDGGYTTM

SEQ ID NO: 1048 - DNA, 1489 bp, Aedes aegypti
  CDS (254)..(1168)
cgtgtctacattggtgagagcaaaggtcaataacttttttttggaagtgcttgaaatgggaccgatgcaggagtgacgcattacttcgcgtttaattagattagggcttggttcggaaaatgtttactgttatttcgtgtgatgcaagaatattttttaccagaatccattacatcagctacgacgtaaatatcaggattcgcaagcttcatacattccgaactggctcgagtgccataggaaaccagtcacaatgatcctgcggttgtactctagtataattctcctctgggacttttgcatcatcctgttatactttgccatgcagcttcttcggtcactctatcaaatagttcgacctccgaagcgtaagtccgtagctggcgagattgtagcgatcttcggaacaagtagaggagtaggccgtgacctagcaattcagatggccgaattgggcgccaaagtagcttgcgttgatatcaactcatccgagaacgacatgctagtgaagagtattaacggcagtggctacgttgcccatgctttcgaatgtgacctcacgaacaagaacgacattattcgcacgataaatgccatcgaaaagcgattcggccaaattaccatgttcttccactgctgtggcgtccctagtccgagatcactcatcaccgatccaccgccaattcaagccactctaaatctgagtgtcgtctcgcacttctggcttctggaagcgatcctgccaaaaatgaaacgtaacaatcacggccacatcgtgttcctcacttcggtggcaggcctgagtggagttaagcatcagacgcctctctccgtggcgcaattcgctgtccagggcctcttcgaatcaatcctcgatgaactgcgcatcgaaaagttcctccgcaccattccgatctccttggtgcacctgtatccgtttgtcctggcggaaaactgccgtaacgacatccgaatgcgcattccgtccgcatttggtaccatccggtcggaagatgccgcccgcaggatcatcgatggcgtccgacgcaacgagctggagatcagtattcccaagtattgcctagcgttgggccacgtgctcaagttgctaccgcgacgggcgacgttgctgcttcggaatctcttcgataccggagtggatttctagtaccttgcagctcaaagactgttctccgatgctgcggttgatatatttgccatagagtgattctaatcgttggttgttttttgacatatctctatagaactcgacaagcttgatacctaagacttgaaaagcttgtagtagagtaagattcatatacgtctagtgagagacagtcggatcccctctaagggacgcgatccagtgatgaatttgactaaataaagatgatatgtattggaaaatttattagttacgttatatttaaagtgtaaatttctttaatgtattgtgaaattatatcgtatgatttgtttatctggg

SEQ ID NO: 1049 - protein, 304 aa, Aedes aegypti
MILRLYSSIILLWDFCIILLYFAMQLLRSLYQIVRPPKRKSVAGEIVAIFGTSRGVGRDLAIQMAELGAKVACVDINSSENDMLVKSINGSGYVAHAFECDLTNKNDIIRTINAIEKRFGQITMFFHCCGVPSPRSLITDPPPIQATLNLSVVSHFWLLEAILPKMKRNNHGHIVFLTSVAGLSGVKHQTPLSVAQFAVQGLFESILDELRIEKFLRTIPISLVHLYPFVLAENCRNDIRMRIPSAFGTIRSEDAARRIIDGVRRNELEISIPKYCLALGHVLKLLPRRATLLLRNLFDTGVDF

SEQ ID NO: 1050 - DNA, 1041 bp, Aedes aegypti
  CDS (53)..(790)
gagtgctctcgattgagacagacatcccaaacgtatcaggattgtagcaaatatggaacgttgggctggtaaggtggccgttataaccggagctagttctggcattggtgcagctattgcaaaacagttggccaatgccggtatggtagtaatcggtttggctcgccgagttgaacgcgttgaagaacttaagaagcatctaccggttgaggctgcttcgagattgcatgcgctgaaatgcgacgtatcgaaagaagaatcagtttctagtgcctttgaagagatccaacggaaattttccggagtagacgtgttggttaacaatgcaggaatagttaagcatactttgctactatgcgatgatgatttccaacaattaagagatcttatggatactaatgtgatgggactagctctatgtagtcgtaaagcattcaaatcgatgaaagaacgatgcgttgccggacatataatacatattaatagcgtcgctggacatacggtttccaaatttcctcatatgaatatgtatgcggcgagcaaacatgcagtaacagccatcactgaaacgatgcgaaatgaaatacgagagcttggctccaaagtcaaagtgaccagtatcagtcccggagtggtaaaaactgagatagtgagagggctgcatagttctgaagagttccctatgttggaaagcgaagacattgcccaagctgttttatatgtcctgggaactccccctcacgtgcaggttcacgagcttaccataaaaccagtgggagaaaatttttaaattttaatgattcgatggatggcacatactagtacacttcgttgttatttcctcaatacatcttatagaaggaggttaaagctttccataaagtgtcattaaatacttcacataattttgagaaagaatatctgaaaaaatcctcacctcatctagttttttcttctttctttgaatctagatatcatgatatgcatgcatactcttaaacttcaataaatgtaaattaataaccatgccaaatttcagct

SEQ ID NO: 1051 - protein, 245 aa, Aedes aegypti
MERWAGKVAVITGASSGIGAAIAKQLANAGMVVIGLARRVERVEELKKHLPVEAASRLHALKCDVSKEESVSSAFEEIQRKFSGVDVLVNNAGIVKHTLLLCDDDFQQLRDLMDTNVMGLALCSRKAFKSMKERCVAGHIIHINSVAGHTVSKFPHMNMYAASKHAVTAITETMRNEIRELGSKVKVTSISPGVVKTEIVRGLHSSEEFPMLESEDIAQAVLYVLGTPPHVQVHELTIKPVGENF

SEQ ID NO: 1052 - DNA, 1213 bp, Anopheles gambiae str. PEST
  CDS (85)..(1038)
ggccagttcgtcgtcagtagcagattagacagggcaatcgaaaccaccagtaaaggcaaacagtggaatcggctggaaaacaaaatgaagaaccttgcagagcgttccgctgggtcgctttactggtggctgctggccacactattcctaccgatagccattcccggtctagtgctgaagctgctgacgatgatgaaggaacaacgcaacgcgcgccatttaaacgggaaggtcgttctcattactggcgctagctcgggcttgggggaagcgttggcgcacagcttctttctggccgggtgcaaggtagtgctggccgcccggcgtaaggatgagctggaacgggtgcgaaaggatctgcttgagctgcatgcgaccgtgccgacccatccgccgattattttgccgctcgacctttccgatctgaacagcatcggcggcaaggtgcagagcgtgctggaaatacacggcgccatcgacatactggtcaacaacggcggtatcagtgtgcggggcgatgccctctcgacggcaatcgatgtggacatacggataatgctggtcaactacttcggctcggtcgcgctcacgaaagcttgcctaccgtcgatgatggcacgcaaggaggggcgcatcgtgagcatttccagcgtgcagggcaagtttgccatcccgcaccgttccgcgtacagtgcatcgaagcatgcgatgcaagcgttctgcgacagcttgcgggccgaggtggcgaaggataacatcaaggtgacgctgatatcgcccggttacatcaatacggcgctgtcactgaacgcgcttaccgggaccggtgcatcgtatggcaaaatggacgccgcaacggcgggtggcgcatcgccccaggacacagcgtccagcatactgaaggcgatcgcgcgggacgaaaaggatgttatgctggcgccgattgctccgcgcgcagcctactggttgcgccacctggcgccttccgtttacttctggataatgaagaaacgggcggaaaaactaaactccacgtaaacaaacaccaaagaacgacaaaccaacctacacattctttctagttcctttcatttcaatcgacaacgggtgtgtgaccatggcagggcgcattatatgtttttttttattgttagtttacaattattggtagctatttaaaactataacgtttaccaccccgaaccctcattca

SEQ ID NO: 1053 - protein, 317 aa, Anopheles gambiae str. PEST
MKNLAERSAGSLYWWLLATLFLPIAIPGLVLKLLTMMKEQRNARHLNGKVVLITGASSGLGEALAHSFFLAGCKVVLAARRKDELERVRKDLLELHATVPTHPPIILPLDLSDLNSIGGKVQSVLEIHGAIDILVNNGGISVRGDALSTAIDVDIRIMLVNYFGSVALTKACLPSMMARKEGRIVSISSVQGKFAIPHRSAYSASKHAMQAFCDSLRAEVAKDNIKVTLISPGYINTALSLNALTGTGASYGKMDAATAGGASPQDTASSILKAIARDEKDVMLAPIAPRAAYWLRHLAPSVYFWIMKKRAEKLNST

SEQ ID NO: 1054 - DNA, 1196 bp, Anopheles gambiae str. PEST
  CDS (213)..(1196)
tcggaaaaggccaaatttatgtatgaaaagctgagccaaacttccgaaaagtgcatcatactcgtgtccacattcagcaggaagctatcggagggaaactacgcacaccttcatcgcttatcagcattttaaacaattcttctgtcagtcagcccaaaagtctgtgagcaaccccgaagaggagctgcaggccgtgctgcgaagcgcacaccatggagcactctaccgaaatcattctcaccattgccggcattgtgctggtgcacggattgatattctactttctcacgcgcaaatcgcgccttatcaagggcaagcatgtggtcgttacgggtggttccagcggaatcggtctgtgggccgccatagagtgcgtccggttaggggcgcacgttaccatcattgcacgcaatgtgtctttactggaaaaagccatagaagagctggaaaagcgacgcgtccgtgacacgcagatgatacagttccgttcgttggatcttgcccagagctacggcgcggtaacgagcacgctggaagagctggaacgtacggtcggtgcgatttacatgctgatcaactgtgccgggatggcgatttgtggcacggtcgaggacacatcggtcgaggacgcccgcaagctgatggacgtgaactatttcgccacctactaccccacacggcacgttttgccaaagatgaaggaagcgggcgacggcattatcgtgattaccgcgtcgcaggccgcgctgatgggcatctacgggtacggggcctacgccgcctccaagttcgctctgcgcgggctggcggaaacgattgcgatggaagcgcgacatcggggcgtcagtgtgacgcttgccctaccggccgataccgatacgcctggatttgagaacgaaaatcgcaccaagccggaggaaacgaaaattatatccggctcgggcgggctcgctaaacctgaagacgtcggaaagcggctcgtgcaggacgcgctgaagggttcgttcttctccatcatggggctggagagctgggtgttgagcatcctttgcgtcggtatggcaccgtggcgcggtccgctgctgtgcttcgtacagttttacctgctcggaccgctgcggttgatcgggctggtgctgcagtggaactttcagcgcattataaagaactgtgctaagcagcggcaacgcacgtag

SEQ ID NO: 1055 - protein, 327 aa, Anopheles gambiae str. PEST
MEHSTEIILTIAGIVLVHGLIFYFLTRKSRLIKGKHVVVTGGSSGIGLWAAIECVRLGAHVTIIARNVSLLEKAIEELEKRRVRDTQMIQFRSLDLAQSYGAVTSTLEELERTVGAIYMLINCAGMAICGTVEDTSVEDARKLMDVNYFATYYPTRHVLPKMKEAGDGIIVITASQAALMGIYGYGAYAASKFALRGLAETIAMEARHRGVSVTLALPADTDTPGFENENRTKPEETKIISGSGGLAKPEDVGKRLVQDALKGSFFSIMGLESWVLSILCVGMAPWRGPLLCFVQFYLLGPLRLIGLVLQWNFQRIIKNCAKQRQRT

SEQ ID NO: 1056 - DNA, 825 bp, Magnaporthe grisea 70-15
  CDS (1)..(825)
atgaacaccacgggttccgcgtttgtgattggagcgagcggtatcggaagggcgtgcgcgttggcatttgcacgccgtggcgtcagcggcctggtggtggctgacgtggatctgcaggccgccgagtccctagctgccgaatgcagggctgaggcggggtctgccggtactgcggacgccctagggtgtgcagaagccacgagggtcgacgttgcagacgagcgttccgtcgagttggccgtatctttcgcacggcgtgtgctgggtcgggttgactattgcgtcaacagcgcggggctggccaacgagatcgccgatgccagccccgtggagttcgaggccatgttccaagtcaacgtcaaaggcacctttctcgtcacacgggccgtgtcggcgctcatgaagacgcaggatcctgtgccagtgttgcgcgactcgcccggtaggggaaccacccgaggttgcatcgtcatcttgggatctgcagcggcatttgctgcgacgcccaagatggtccagtacacgacggccaagcatgcggtgctaggcctgaccaagagcgccgctcttgataacgccgctcacggcatccgtgtcaacagcgtctgcccgtcttgggtcgacacccccatggtgcgcagggcgctgcaggacgtgcccgagctggagcagacgattcgtacctcggtgccgatgggcaggattgcactggccgaggaggtggccgacgccgtcatgttcctctgcagccccggcgcgagctatgccactggctgcaacatgattctggatggcggcaccactctcaccacgcatctgggatga

SEQ ID NO: 1057 - protein, 274 aa, Magnaporthe grisea 70-15
MNTTGSAFVIGASGIGRACALAFARRGVSGLVVADVDLQAAESLAAECRAEAGSAGTADALGCAEATRVDVADERSVELAVSFARRVLGRVDYCVNSAGLANEIADASPVEFEAMFQVNVKGTFLVTRAVSALMKTQDPVPVLRDSPGRGTTRGCIVILGSAAAFAATPKMVQYTTAKHAVLGLTKSAALDNAAHGIRVNSVCPSWVDTPMVRRALQDVPELEQTIRTSVPMGRIALAEEVADAVMFLCSPGASYATGCNMILDGGTTLTTHLG

SEQ ID NO: 1058 - DNA, 804 bp, Magnaporthe grisea 70-15
  CDS (1)..(804)
atgaccgggagggtatttagcatcacaggcggggcatcgggcattggactggccacggcccagctcttggctcgcaacggcgccgccgccatttggatcgccgacgtccagtcggaacttttcgacaaagtgcggaaaaagctgaatgacattaaccaaaacaccaaaatctatctcgataaagtcgacgtcggcaacagcgcagaggtggaccaatgggtgcagcgcattgtcgcagaatccggaggtctccatggcgcagcaaacgtggcgggtgttgcggcgacttacaggcacacggacggggagcagcctagcaccttggagatggacgacgatgagtggcgccgcgttttccgcgtcaacgcggacggcgttatgtattgcaccagggcccaggtcagggccatggtgaaaatggacgagggcagcaacccggccatcgtcaacgtttccagcctcgccgcgacaaaggcaagcgccacctttttggcctacgcggcgagcaaggccgcatgcgctcatttcacccagtgcgtcgccaaggatcttgccggtcgcggtctgagaatcaactctgttctgccaggcggggtgtggacccctatggtgatgaaggcgatcggtatatcgcccgatagtgcggacgacgcagacccagtggaagtggcggctcaagctcaaaatgccggatgcatcctgccagaagaagcggccgaggcgattgtatggctgttgagtgagaattgtctgcagctcaacggtatcgctgtgccgatcggtgagatggacgtgagccgatag

SEQ ID NO: 1059 - protein, 267 aa, Magnaporthe grisea 70-15
MTGRVFSITGGASGIGLATAQLLARNGAAAIWIADVQSELFDKVRKKLNDINQNTKIYLDKVDVGNSAEVDQWVQRIVAESGGLHGAANVAGVAATYRHTDGEQPSTLEMDDDEWRRVFRVNADGVMYCTRAQVRAMVKMDEGSNPAIVNVSSLAATKASATFLAYAASKAACAHFTQCVAKDLAGRGLRINSVLPGGVWTPMVMKAIGISPDSADDADPVEVAAQAQNAGCILPEEAAEAIVWLLSENCLQLNGIAVPIGEMDVSR

SEQ ID NO: 1060 - DNA, 807 bp, Magnaporthe grisea 70-15
  CDS (1)..(807)
atgtcagccaccgcaatggggaagcgcctcgagggcaagacaatcgtcatcaccggagcttcatccgggatcgggcgcagctgtgcctttgagtttgctcgcaccagccccaagagcttgaagctggtcctgactgctcgccgcatcgacacgctcaaggagattgccaaggagataaatgctgaggtcggcgagggcgtcaaggtgttgccattccagctcgacgtcagcaaaccggatgaggtccgtgggtttgtccaggcgctgcccgaggagttccgggatattaatgttctcgtcaacaatgcgggtctggtgaaaggagttgcacaggctcctgcgatcgccgaggaggatataaacatcatgatggcgaccaatgtaacgggtctcatcaacatgacgcaggccgtgcttgccgtctacaaaaagcgacctgaaggaggtgctggcgatattatcaacatcggtagcattgctggtcgtgagccatacgccggcggtagcatatactgcgcaaccaaggctgcggttcggagctttagtgattcgttgcgaaaggagttggtagccactcggatccgggttatggagatcgatccgggtcaagttgaaaccgagttttctgttattcggttttatggtgacaaggcaaaggcggatgcagtctatgctggttgtgaccctctcacgccagatgacatcgccgaggtggttgtgttcgtcgcaggacggagagataacgtcgttgtagccgatactctcatctttcctcagcaccaggcaagttgtaaccttattatctga

SEQ ID NO: 1061 - protein, 268 aa, Magnaporthe grisea 70-15
MSATAMGKRLEGKTIVITGASSGIGRSCAFEFARTSPKSLKLVLTARRIDTLKEIAKEINAEVGEGVKVLPFQLDVSKPDEVRGFVQALPEEFRDINVLVNNAGLVKGVAQAPAIAEEDINIMMATNVTGLINMTQAVLAVYKKRPEGGAGDIINIGSIAGREPYAGGSIYCATKAAVRSFSDSLRKELVATRIRVMEIDPGQVETEFSVIRFYGDKAKADAVYAGCDPLTPDDIAEVVVFVAGRRDNVVVADTLIFPQHQASCNLII

SEQ ID NO: 1062 - DNA, 816 bp, Gibberella zeae PH-1
  CDS (1)..(816)
atgtcatccgcagtttctaaacgcctcgaaggcaagactgttctcatcaccggagcatcttccggcattggaaagtccacagcgtttgaatttgcccgcacaagccccaagaacttgaagctggttcttacagctcgtcgaatcgacagcctcaaacaaattgctgaagaaattgtcaaagaagtcggcgatggcgttaaggtgcacccagttcaacttgatgtcagcaagcctgatgaagtgcgctcttttgtgagcaagcttcctgctgagttcagcgagattgatgtgttggtaaacaacgccggtcttgtcaagggtgtcgacaaggcacctgagatcaaggaagaggatatcaacgtcatgttcgctactaatgttacgggcttgatcaacatgacacaagctatcttgcccggtatgctcaagcgcaacaacggcgaaggggctggcgacatcatcaacattggttccattgctggccgcgagccttatcccggcggcagcatttactgcgctaccaaggccgctatccattccttcacagagagtctgcgcaaggagcttatttcaaagcgtgtccgtgtgatcaggattgatcctggtcaggtagagactgagttctccgttgtgagattctacggcgacaagtcaaaggccgatgccgtatatgccggctgtgagcccttgacaccggatgatattgctgaggccattgtctttgctgctggcagaagggaaaatgttgtcattgcggatacgttgatattccccaaccatcaggctgcggcaaccgtcatgcacaggaagtcatag

SEQ ID NO: 1063 - protein, 271 aa, Gibberella zeae PH-1
MSSAVSKRLEGKTVLITGASSGIGKSTAFEFARTSPKNLKLVLTARRIDSLKQIAEEIVKEVGDGVKVHPVQLDVSKPDEVRSFVSKLPAEFSEIDVLVNNAGLVKGVDKAPEIKEEDINVMFATNVTGLINMTQAILPGMLKRNNGEGAGDIINIGSIAGREPYPGGSIYCATKAAIHSFTESLRKELISKRVRVIRIDPGQVETEFSVVRFYGDKSKADAVYAGCEPLTPDDIAEAIVFAAGRRENVVIADTLIFPNHQAAATVMHRKS

SEQ ID NO: 1064 - DNA, 924 bp, Strongylocentrotus purpuratus
  CDS (1)..(924)
atgaagctgaccaaggcacacgtcgtgatcacgggaggttccagtggtattggtaaagctgttgctatggaggtcctcaggcaaggagctagtgtaacactcttggcaagaaatcaggaaaggttgaagcatgccaagcttgagcttgagaagtacattattgacaaaggatatcagaaaattctctgcatatcagttgatctagcgaaggattatggatctgtggaacaggccattcaaaagtcagtggaagtgatcgggccatgtgatatgctgattaacagtgcaggaaagtctagtgcactagcctttgaagagctggagatatctgaattcaagaaagacatggaggtgaattaccttggctcagtgtatgctacacgagctgtgttaccttacatgaagaagagatcacagggccgcatcatcttcatctcatctcaggctgggcagcttggtctctatggttactcctcttacagcggatcaaagtttgctctcagaggatttgcagaagctcttcaaatggaggtaaagccatataacatctatgtgaccctcaactttcctcctgatacggacacccctatgcttcaagctgagttagagacacagccagaagaaacaagattgatatctgaaacatcaggactgtatgctgctcaggatgtagcaagaattattgtgcaagattctcttaatgcagtatttcttagctatgtaggcatggatggttacatgttatctatcttgacatgtggtatgtcaccagtcacatctatgatggttggagtacaacaggttgcatttatgggtttgttcaggttcatttctcatctgtatcttggaagctttgatagaatcataaggaggtgcaaagaagaacgagacacaatggaagatgagcaatccaaagacaaatga

SEQ ID NO: 1065 - protein, 307 aa, Strongylocentrotus purpuratus
MKLTKAHVVITGGSSGIGKAVAMEVLRQGASVTLLARNQERLKHAKLELEKYIIDKGYQKILCISVDLAKDYGSVEQAIQKSVEVIGPCDMLINSAGKSSALAFEELEISEFKKDMEVNYLGSVYATRAVLPYMKKRSQGRIIFISSQAGQLGLYGYSSYSGSKFALRGFAEALQMEVKPYNIYVTLNFPPDTDTPMLQAELETQPEETRLISETSGLYAAQDVARIIVQDSLNAVFLSYVGMDGYMLSILTCGMSPVTSMMVGVQQVAFMGLFRFISHLYLGSFDRIIRRCKEERDTMEDEQSKDK

SEQ ID NO: 1066 - DNA, 876 bp, Mycobacterium sp. JLS
  CDS (1)..(876): transl_table=11
atgacttccgtacacggcaaggtcgtgttgatcaccggtggggcccgaggggtcggcgaagaactggcccgccggttacatgccaagggcgccaagctggtgctcaccgacctggatgacggtccgctctcggcgctggccgcagacctcggcgccgagcgggtgttgacggtggtcgccgacgtgtgcgacctcgagaccatgcagtccgctgccgaacaggccgtgagccggttcggcgggatcgacatcgtcatcgcgaacgcggggatcgccagctacggatcggtgctggtggtcgatcccgacgccttccggcgggtgctcgacgtcaacgtggtcggcgtgttcaacaccgtgcgcgccgcgctcccgtcggtcatcgagcgcaagggctacatcctggtggtgtcgtcgctggcggcgttcgccgccgcgccggggatggcgccctacgacgcgtcgaaggccggtgtggagcacttcgccaacgccctgcgcctcgaggtcgcccaccacggcgtgacggtcgggtgcgcgcacatgtcgtggatcgacaccccgctcgtgcaggacaccaaggccgatctgccgagtttccgcaccatgctcgactcactgcccggcccgctcagcaagaccacctcggtgcagaagtgtggcgaggtgttcgtcaagggcatcgaacgccgtagggaacgcatctactgcccgggttgggtcggcctgatccgctgggccaaaccgatactcaccacgcggatcggtcaggcctcggtgctcaagacggcgccgaaggtgttgccccagatggacgccgaggtgaccgcactgaagcgctcgctgggcgcccgcacccacgggctgaagaaatga

SEQ ID NO: 1067 - protein, 291 aa, Mycobacterium sp. JLS
MTSVHGKVVLITGGARGVGEELARRLHAKGAKLVLTDLDDGPLSALAADLGAERVLTVVADVCDLETMQSAAEQAVSRFGGIDIVIANAGIASYGSVLVVDPDAFRRVLDVNVVGVFNTVRAALPSVIERKGYILVVSSLAAFAAAPGMAPYDASKAGVEHFANALRLEVAHHGVTVGCAHMSWIDTPLVQDTKADLPSFRTMLDSLPGPLSKTTSVQKCGEVFVKGIERRRERIYCPGWVGLIRWAKPILTTRIGQASVLKTAPKVLPQMDAEVTALKRSLGARTHGLKK

SEQ ID NO: 1068 - DNA, 825 bp, Mycobacterium sp. JLS
  CDS (1)..(825): transl_table=11
atggacttcgcgggcaggcaggcgatcgtcaccggcgccggttcgggcatcggcgccgcactgtgccgggcactggtggcggccggggccgaggtgctgtgcaccgacatcgacgccgacgccgccgaggcgaccgcgcgtgggctcggcgcccgctggtcacccctggacgtcaccgacgccgccgcggtgcagcggaccgtcgacgaggtggtggcgcgcgccggtcgactggacctgatgttcaacaacgcgggtatctcctggggcggtgacaccgaactgctgaccctcgaccagtggaacgcgatcatcgacatcaacatccgcggcgtggtgcacggagtcgccgcggcgtacccccagatgatccgccaggggcacggccacatcgtcaacaccgcctcgatggcgggcctcaccgccgcgggcctgatcaccagctatgtgatgaccaaacacgcggtcgtcggcctgtcactggcgctgcgctcggaggccgtcgcacacggtgtgggggtgctcgccgtctgcccggccgcggtcgagacgccgatcctcgacaagggcgccgtcggcgggttcgtcggtcgcgactattacctgcagggccagcgggtcaaggccccctacgacgccgaccggctggcgcgtgacaccctgcgcgccgtgcagcgcaacaaggccgtgctggtcaaaccccggcaggcccacgccgcatgggttttcgcgaggctcgcgcccgggctgatgcagcggatggccgcgcggttcgtcgccgaacagcgggccgggcagcgggcacagaccgtcggcaccgggtag

SEQ ID NO: 1069 - protein, 274 aa, Mycobacterium sp. JLS
MDFAGRQAIVTGAGSGIGAALCRALVAAGAEVLCTDIDADAAEATARGLGARWSPLDVTDAAAVQRTVDEVVARAGRLDLMFNNAGISWGGDTELLTLDQWNAIIDINIRGVVHGVAAAYPQMIRQGHGHIVNTASMAGLTAAGLITSYVMTKHAVVGLSLALRSEAVAHGVGVLAVCPAAVETPILDKGAVGGFVGRDYYLQGQRVKAPYDADRLARDTLRAVQRNKAVLVKPRQAHAAWVFARLAPGLMQRMAARFVAEQRAGQRAQTVGTG

SEQ ID NO: 1070 - DNA, 759 bp, Kineococcus radiotolerans SRS30216
  CDS (1)..(759): transl_table=11
atggccggcctgcgggtcctcgtgaccggcggcgcctccgggatcggcgccgcgaccgtgcggcgcttcctcgccgagggggcgcgggtggcggtcctggaccgggtcttcgaggactcccccgccgtgccgggcgacgcgctcgccgtcgtggccgacctcaccgacgacggcgccgtgcgggccgcggtggcggcggcggtggagggcctcggcgggctcgacgtcctcgtcaacaacgccggcaccggggcgcggggcacggtcgccgacaacgacgacgccgagtggcaccgggtgttcgacgtcaacgtcgtcggcgccgtccgcgccacccgcgccgcgctgccggccctgcgggcgtccccgcacgccgcgatcgtcaacacctgctccatcgcggcgtgggcgggcctgccgcagcgggcgctgtactccgcgacgaagggcgcggtgcaggccctcaccctggccatggccgccgaccacctcgccgaggggatccgggtgaactgcgtgaaccccgggaccgcgcgcaccccgtgggtccagcgcctcctcgacgccgccgacgaccccgcggcggagctcgccgcgctggccgcgcgccagcccggcgggcggctcgtggaggccgacgaggtcgcccacgagatcgtccacctcgccgaccgccgttccggcgcggtgaccggggcggtggtcgcggtcgacggcgggatgcacggcctgcgcgttccccctacggtgcgggcgtga

SEQ ID NO: 1071 - protein, 252 aa, Kineococcus radiotolerans SRS30216
MAGLRVLVTGGASGIGAATVRRFLAEGARVAVLDRVFEDSPAVPGDALAVVADLTDDGAVRAAVAAAVEGLGGLDVLVNNAGTGARGTVADNDDAEWHRVFDVNVVGAVRATRAALPALRASPHAAIVNTCSIAAWAGLPQRALYSATKGAVQALTLAMAADHLAEGIRVNCVNPGTARTPWVQRLLDAADDPAAELAALAARQPGGRLVEADEVAHEIVHLADRRSGAVTGAVVAVDGGMHGLRVPPTVRA

SEQ ID NO: 1072 - DNA, 888 bp, Xanthobacter autotrophicus Py2
  CDS (1)..(888): transl_table=11
atgcaggcagcgcgcggggggccgacagccgatgatccgtccctcgccggcggaccggttgcccgcgagtcgctcgcccgtgaaccgcttgcccgtgaaccgcttgccatcgtcacgggaggttcgagcgggatcggtctggcggtcgcccgcgagctcgggcgcaggggctgccgggtcgcattgctcgcgcgcgatcccgcccgcctcgccgccgccgggtcgctgctggcgggggaggggctcgccatcctcacccggccgctggacgtgcgcgaccgggcggcctgcgaagccgtggtggcggagctcatcgccggcgcgggtcccccgctgtgggtggtgacggcggcggggctcgtcgagcctgggttcttcctggaccaggacccggcgcggatggaggagcaggtcgccaccaacctcctcggcacctttcacgtggtgcgcgcgacggcaccggccatggcagcggcggggcgggggcatgtggttctcgtctcctccggagccgggctgttcggtgtcgccggctattccggctattgcgccagcaagttcgcggtgcgcgggctgggcgaggtgctgcgcatggagctggcgcaggcgggggtgcaggtcaccgtcgccgtgcctccggacacggacacgccccagctcgcctacgaggcccggcaccgccccgccgccatcgccgccttcgccggggccgggcgccccctgtcggcggaagcggtggcccggcacatgatccgtagcgccgagcgcggccgcttcctgtcggcgccggggtggcggcttggcgccgtcgcccggcttcagggcttcgtctccgagtgcttcgcccgggtgcagatgcgcctgctgcgccgcgcatccagggactga

SEQ ID NO: 1073 - protein, 295 aa, Xanthobacter autotrophicus Py2
MQAARGGPTADDPSLAGGPVARESLAREPLAREPLAIVTGGSSGIGLAVARELGRRGCRVALLARDPARLAAAGSLLAGEGLAILTRPLDVRDRAACEAVVAELIAGAGPPLWVVTAAGLVEPGFFLDQDPARMEEQVATNLLGTFHVVRATAPAMAAAGRGHVVLVSSGAGLFGVAGYSGYCASKFAVRGLGEVLRMELAQAGVQVTVAVPPDTDTPQLAYEARHRPAAIAAFAGAGRPLSAEAVARHMIRSAERGRFLSAPGWRLGAVARLQGFVSECFARVQMRLLRRASRD

SEQ ID NO: 1074 - DNA, 840 bp, Desulfococcus oleovorans Hxd3
  CDS (1)..(840)
atgggaattaaaaccttttccggaaaacgggcttatgtttttggtgggtcgtccggcatcggcctggctgctgcccggcagctggccggcatgggggctgaccttgcgctttttgccagggacggcaacagactggaaacggccggacaggaggtgcggcatgccgcaaccggcccgtcactgcaggtccatgtttttcccgtggatgtgtcggaccgggaccgggtttttgaagccgtggcaaatgcggtggatgtcctggggccgccggatatgctgatcaactgcgccggccgggccattccccgctgctttgccgacatcggcgaggaccagctttcccagaccctggccatcaacctgtgcggcacctggcacaccatagccgcggcccttccttatatgagggggcggggcggccatatcgtcaatgtctcttccatcgccggttttctgggcgtgtacggatatgcggattatgcggcatccaagtttgccgtcatggggctctccgaggtgctgcgcagcgagtttaagcctctgggcatcggcgtgtccgtgctctgccccccggataccgacaccccggccctggccgctgaagccgccacaaagccggaagagacaaaggccatttccgcgggtgccagagtgctttccgccgatgccgtggcaaaggccatgattcggggaatgaaaaaaaaccgggccatgattgtgccgggttttgacggccggctgatctggctggccaaacggctgtttccgggcctggtctcttttttcatggaccggaccattcgccggacccggtgcgggaagatatctaccgcctcttaa

SEQ ID NO: 1075 - protein, 279 aa, Desulfococcus oleovorans Hxd3
MGIKTFSGKRAYVFGGSSGIGLAAARQLAGMGADLALFARDGNRLETAGQEVRHAATGPSLQVHVFPVDVSDRDRVFEAVANAVDVLGPPDMLINCAGRAIPRCFADIGEDQLSQTLAINLCGTWHTIAAALPYMRGRGGHIVNVSSIAGFLGVYGYADYAASKFAVMGLSEVLRSEFKPLGIGVSVLCPPDTDTPALAAEAATKPEETKAISAGARVLSADAVAKAMIRGMKKNRAMIVPGFDGRLIWLAKRLFPGLVSFFMDRTIRRTRCGKISTAS

SEQ ID NO: 1076 - DNA, 828 bp, Desulfococcus oleovorans Hxd3
  CDS (1)..(828)
atgcccggtattcgtgaactgaaagacaaggtcgtggtgattaccggcgcggggtccggcatcggccgggctgcagcccatgcctttgcaaaagagggggcctgcgtggtgatcaccgatattcacgctgaaaggctggcagcggttgaagacgaacttgtgcgaatgggggcacgggcctcttccagagtggtggacgtggccgacaaggctcaactggaagatctgtgccggtttgtcatcgatacccatggccgggtggatgtgctgcacgccaacgcgggcatcggctacggcggtcccctggaagttttccccatggcggactttgaaaaggtgatggccgtcaacttctggcacgtggtttacagtgtcggctttttcctgccccacatgatcaaacagcatttcggccatatcgtggtcacggccagcgcggccagctatttcggcctgcccggcctgggggcctacaccgcctccaagttcgccgtggccggctacctggaactgctgcgggctgagctgcgccgccacaacatcggcgtcaccaccatctgccccggttttatcaacaccaacatcgtgaaagacggcaaatccaccctgctgcccggcgccaaggccgaccaggaaaagatggccgctttttacaaacggttcggctggcccccggaacgggtggcaaaggcggtgcttaaaggtgttcgaaagaacaaggccctggtgccggtggggccggaagcatgggcccagtggtatttaaagcgcctctccccgggcctctacaacctgatcctgcgcattggggcaaagctgtcactgtag

SEQ ID NO: 1077 - protein, 275 aa, Desulfococcus oleovorans Hxd3
MPGIRELKDKVVVITGAGSGIGRAAAHAFAKEGACVVITDIHAERLAAVEDELVRMGARASSRVVDVADKAQLEDLCRFVIDTHGRVDVLHANAGIGYGGPLEVFPMADFEKVMAVNFWHVVYSVGFFLPHMIKQHFGHIVVTASAASYFGLPGLGAYTASKFAVAGYLELLRAELRRHNIGVTTICPGFINTNIVKDGKSTLLPGAKADQEKMAAFYKRFGWPPERVAKAVLKGVRKNKALVPVGPEAWAQWYLKRLSPGLYNLILRIGAKLSL

SEQ ID NO: 1078 - DNA, 774 bp, Thermus thermophilus HB27
  CDS (1)..(774): transl_table=11
atggtggtcaccggcgcggggagcggcctgggccaggccctggccttggagcttttaaggcggggggcgagggtggcggcggtggacctaaggtcggagggcctccaagaaaccatggccaaggcgggaagcctaggggagggcttaagcctccaccccctggacatcaccgacaaggagaaggtggccgccctgcccgaggaggtggaacgggtccacggccaggtggacggcctcatcaacaacgccgggatcatccagccctttaagcgcctcttggacctggacgaggcggccatggagcgggtgatgcgggtgaacttctggggtaccctccacatgacccgggcttttctgcccaggctcctcaagcgccccgaggcccacctggtgaacgtctccagcatgggggcctttgtgcccgtgccggggcaggccctttacggggcctctaaggcggcggtgatgctcctcaccgaggccctctgggccgaactccaggggaccccggtacgcgtcaccctggtcctgcccggggccatgcgcacggggatcgccgagcactcgggggtggaagccccgagggcggaaggggcgaaggtgcccgtcctcgagcccgaggtggcggccaagcgcctcctggacgccgtggaacgggacgccttccgagtgctcctgggccgggacgcccagaccatggacctcctctatcgcttaagccccgccctcgccgcccggatcgtccagcggcgcatggcccacctcctcacctga

SEQ ID NO: 1079 - protein, 257 aa, Thermus thermophilus HB27
MVVTGAGSGLGQALALELLRRGARVAAVDLRSEGLQETMAKAGSLGEGLSLHPLDITDKEKVAALPEEVERVHGQVDGLINNAGIIQPFKRLLDLDEAAMERVMRVNFWGTLHMTRAFLPRLLKRPEAHLVNVSSMGAFVPVPGQALYGASKAAVMLLTEALWAELQGTPVRVTLVLPGAMRTGIAEHSGVEAPRAEGAKVPVLEPEVAAKRLLDAVERDAFRVLLGRDAQTMDLLYRLSPALAARIVQRRMAHLLT

SEQ ID NO: 1080 - DNA, 750 bp, Ralstonia eutropha JMP134
  CDS (1)..(750): transl_table=11
atgctggtcgaaaacaaagtcatcatcgtcactggggccgcttccccgcgcggcatcggcaaagccactgcgcgcgcgctgtccgcgcagggcgcccatgtcgtgatcctcgacctcaagctcgaagaggcccagtctgccgccgccgaactcggcccgcgccatctcgggctggcctgcgacgtcacggacaaggccgcttgcgagcgcgccgcgctggcggtggtcgaacgctttggccgcatcgacggcctcgtgaataacgccggcatcacgcagccgctacgcacgctcgacatccaggcggccaacttcgacgccgtggtcgacgtcaacctgcgcggcacgctgtacatgtcgcaggcggtgctgccgcagatgaaggagcagaagcgcggaagcatcgtctgcatgtcctcggtgtcggcccagcgcggaggcgggatcttcggtggcccgcactacagcgcggccaaggcgggagtgctgggcctggcgcgggccatggcgcgcgagttcggcggcgacggcatccgcgtgaactcgatcacgccggggctgatccagaccgacatcaccggcgacaagctgacggcggacatgcgcgccgacatcatcaagggcattccgctgggccgccttggcgatgccggcgatgtcgccaacgcttgcctgttcctcgcgagcgacttgtcgagctacctgactggcatcacgctcgatgtcaacggcggcatgctgatccactaa

SEQ ID NO: 1081 - protein, 249 aa, Ralstonia eutropha JMP134
MLVENKVIIVTGAASPRGIGKATARALSAQGAHVVILDLKLEEAQSAAAELGPRHLGLACDVTDKAACERAALAVVERFGRIDGLVNNAGITQPLRTLDIQAANFDAVVDVNLRGTLYMSQAVLPQMKEQKRGSIVCMSSVSAQRGGGIFGGPHYSAAKAGVLGLARAMAREFGGDGIRVNSITPGLIQTDITGDKLTADMRADIIKGIPLGRLGDAGDVANACLFLASDLSSYLTGITLDVNGGMLIH

SEQ ID NO: 1082 - DNA, 810 bp, Anabaena variabilis ATCC 29413
  CDS (1)..(810): transl_table=11
atgagctttagaaataaaaccattgttctcactggtgcatcggctggaattggccgaacgctggcaatttcgttgtcccaacaggatgcaaatttagtcttggctgctcgcaattcggaagcattagaacagacaatgactgcttgcacaaactatccggggaaagtgattgcagtacctacagatgtaactcaagcagaagcttgccaacagttgatagaaatagcgatcgccacgtttgggcaaattgatatcttaatcaataatgccggaattggaatgctaacccgctttgatgaagtgacagacatttctatttttgagcaggtaatgcaagttaactatctgggtgcggtttattgtactcattatgccctaccttacctgaaagcaagccaaggacaattagtggctatttcttcaatttgtggcaaaacaggtgtacccactcgtacaggttacgttgccagtaaacacgctatgcaaggcttttttgatacattgcgaattgaattgcactcaacaggagtagatgtattggttgtctcaccagggtttgtggcaactgatatccgacaacgagcgttgggagcggatggaaaaccactaggcaaaagtccccgtgatgaaactcaaggcaatatgtcagtagacgagtgtgtgcgtcaaattatctgggcaatggagcgacgtaaacgagaacacattatgacattgaagggaaaggcaatcccttgggcaaagctgattgcaccaggatttgttgatcgtattgttgctgccaccattcgcaagacaacttccacctga

SEQ ID NO: 1083 - protein, 269 aa, Anabaena variabilis ATCC 29413
MSFRNKTIVLTGASAGIGRTLAISLSQQDANLVLAARNSEALEQTMTACTNYPGKVIAVPTDVTQAEACQQLIEIAIATFGQIDILINNAGIGMLTRFDEVTDISIFEQVMQVNYLGAVYCTHYALPYLKASQGQLVAISSICGKTGVPTRTGYVASKHAMQGFFDTLRIELHSTGVDVLVVSPGFVATDIRQRALGADGKPLGKSPRDETQGNMSVDECVRQIIWAMERRKREHIMTLKGKAIPWAKLIAPGFVDRIVAATIRKTTST

SEQ ID NO: 1084 - DNA, 744 bp, Rhodobacter sphaeroides 2.4.1
  CDS (1)..(744): transl_table=11
atgaccggacgtctggcaggccgcaagatcgtcatcaccggagcaggctcgggcatcggccgcgagtccgcgcgccagttcgcgcgcgagggggcgacgctggcgctgatcgaccgcgacgaggcggcggcgcaggtgacggcggacgagacggggggccatgtcttcgcgctcgacgtgaccgacgaggcggcggtcgaaaccgtcgtgggccgcgcggcggaggcgctcggcggcatcgacgggctgctcaattcggcgggcatcctgaccatgaagaccgtggacgatatcggcgtcgaggagttccgccgggtggtggatgtgaacctgacggggaccttcctcgtctgtcaggcggcgctgccgtggctgcgcaaggagccgaaggccgccatcgtcaacatcgcctcggcgcaggcgctgctgccctcgctgaccggctcggcctatgccgcctcgaaggccgcggtgatgatgttctcgaagagcatcgccaaggaacttgccccggcggtgcgggtgaacatcatctgcccgggggccaccgagacgccgatgaccgatcagggcgtggcgcccgacgatgtggcgggccgcaaggcgctggccgcggtctatgcgatgaaccgtctggcccagcccgaggagatcgcggcgggcatcctgttcctgatgtcggacgaggccgcggccatcacgggcgtcgcgctggcgatcgacaacggccgcaccttccattga

SEQ ID NO: 1085 - protein, 247 aa, Rhodobacter sphaeroides 2.4.1
MTGRLAGRKIVITGAGSGIGRESARQFAREGATLALIDRDEAAAQVTADETGGHVFALDVTDEAAVETVVGRAAEALGGIDGLLNSAGILTMKTVDDIGVEEFRRVVDVNLTGTFLVCQAALPWLRKEPKAAIVNIASAQALLPSLTGSAYAASKAAVMMFSKSIAKELAPAVRVNIICPGATETPMTDQGVAPDDVAGRKALAAVYAMNRLAQPEEIAAGILFLMSDEAAAITGVALAIDNGRTFH

SEQ ID NO: 1086 - DNA, 750 bp, Pseudomonas fluorescens PfO-1
  CDS (1)..(750): transl_table=11
atgcttcttcaaggcaaagtcgcgatcatcacaggtgctgcctccgcacgtggtatcggccgcgcgacagctacgaccttcgctcaacatggcgcctgggtggtgattctggatctggacgcatccgctgcccgcgatgcagctgcctctttgggcgaggggcatctcggcctggctgccaacgtcgccgacgagtcccaggtgcagcaggctgtcgccaccgtcatcgaacactttggccggatcgacatactggtcaacaatgccggcatcacccaacccctcaagaccctcgatatccgccccggtgattacgataaggtgctggacgtcagcctgcgcggtacgttgcagatgtcccaggcggtaattccgctcatgcgccagcaagccagcggcagcattgtgtgcatgtcttcggtttccgcgcagcgcggcggcggcatttttggcgggcctcattacagcgccgccaaggccggtgtgctgggcctggccaaggccatggcgcgtgagctggggccggacaacgtgcgcgtcaactccatcgcccccggcctgattcacaccgacattactggcggcctgatgcaggacgagcgccgccacgcgatcatcgacggcattccgttgggtcgcctgggcgaggcgcaggatgtggccaatgcggcgctgttcctggccagcgacttgtcctcctatctgactggcatcaccctggatgtgaacggcggcatgctgattcactga

SEQ ID NO: 1087 - protein, 249 aa, Pseudomonas fluorescens PfO-1
MLLQGKVAIITGAASARGIGRATATTFAQHGAWVVILDLDASAARDAAASLGEGHLGLAANVADESQVQQAVATVIEHFGRIDILVNNAGITQPLKTLDIRPGDYDKVLDVSLRGTLQMSQAVIPLMRQQASGSIVCMSSVSAQRGGGIFGGPHYSAAKAGVLGLAKAMARELGPDNVRVNSIAPGLIHTDITGGLMQDERRHAIIDGIPLGRLGEAQDVANAALFLASDLSSYLTGITLDVNGGMLIH

SEQ ID NO: 1088 - DNA, 855 bp, Burkholderia xenovorans LB400
  CDS (1)..(855): transl_table=11
atgtccgagtccgtcgagaccccacccgtctggttgatcaccggatgttccaccggcttcggccgtgaactggctgccgccgtgctcgcgcgcggctggcgcacggttgtcacggcgcgcgatccggcatcgatcgcggatctggtcgagggccgtgaaacgcacgcgcttgccgcgcggctcgacgtcaccagcgcaagcgatatcgaaacggtcgtggcccggacgctggacgcctacggccagatcgatttcctcgtgaacaatgcgggctacggctatctcgccgcagtcgaagaaggtgaagacgccgagatgcgcgccatgttcgaggtcaatttcttcggggcggtcaatatggtcaaggcggtcttgccgtccatgcgcgcgcgccgctcgggccatatcgtcaacgtcacgtcggtcggcgggttcgtcggcaatccgagtagcgggtactatgctgctaccaaattcgcgctcgaaggattgagcgagtcgctcgcgcgcgaaacggcggagctcggcatccgggtgacggccgtcgaacccggtccattcagaaccgactgggcgggacgatcgctgaagcagacgggaacgccgatcgacgactacgcgtcgattgccggcaagcgacgcacgcaggtggtcgagcgcagcggccggcaaccgggcagccccgagcgcgccgccgaagcgatcatcgccgcagtcaccgaccgcgaaccgcccgagcacctcgtgctcggcagcgccggtctcgcgatggtgcgaagcaaactggcgcgcgtggcagcggacctcgatgcgtgggagagcacgaccgtatggactgacgacccgcttacataa

SEQ ID NO: 1089 - protein, 284 aa, Burkholderia xenovorans LB400
MSESVETPPVWLITGCSTGFGRELAAAVLARGWRTVVTARDPASIADLVEGRETHALAARLDVTSASDIETVVARTLDAYGQIDFLVNNAGYGYLAAVEEGEDAEMRAMFEVNFFGAVNMVKAVLPSMRARRSGHIVNVTSVGGFVGNPSSGYYAATKFALEGLSESLARETAELGIRVTAVEPGPFRTDWAGRSLKQTGTPIDDYASIAGKRRTQVVERSGRQPGSPERAAEAIIAAVTDREPPEHLVLGSAGLAMVRSKLARVAADLDAWESTTVWTDDPLT

SEQ ID NO: 1090 - DNA, 861 bp, Burkholderia xenovorans LB400
  CDS (1)..(861): transl_table=11
atgacgaatgaagaaaaaccagtttggttcatcacgggttgctcaactggcttcggccgcgagctggccgtactgttgctggaacaggggttccgtgtcgtcgccaccgcacgcgatgcgagcaagctggctgacctggtggcgagccataaggatcgcgccctggctttgccgctcgatgtgacggatgcggatgccatcgtgcatgcggtgaaacaggccgaggcacgatttgggcagatcgatgtgctggtgaacaacgccggctatggctatctcgccgccatcgaggaaggtgaagaggcgcctgtacgcgagatgttcgataccaacgtctttggtctcgttaatgtgacaaagtccgtgctgccgggaatgcgtgcccgtaagcgcgggcacatcataaatctatcgtcgatcggtgggttagtcagctttgcggctacgggttattacaatgcaacgaagttcgcagtagagggactgtctggagcgctggcgatcgagctggctccgcttggcatcaaggttacggtggttgaacctggcccgttccgcacggatttctccgggcgctcgatcggtaaatccaagatagagatcgacgactacgctgagacggctggtgcgcgtcgcaagatgtcgcttgcactttcgggcaagcagccaggtgacccagtacgcgctgcccaggcgataattgacgttgttgcttcgtcgaatccaccgctgcacctattgcttggcgcaatcgcccttgacctcgcgcgcaaggatctggaaaacaagaagcatgagttcgacgcctgggaaaaaacaacgctcagcgctgattatcccgacgctgtcgttaattcctga

SEQ ID NO: 1091 - protein, 286 aa, Burkholderia xenovorans LB400
MTNEEKPVWFITGCSTGFGRELAVLLLEQGFRVVATARDASKLADLVASHKDRALALPLDVTDADAIVHAVKQAEARFGQIDVLVNNAGYGYLAAIEEGEEAPVREMFDTNVFGLVNVTKSVLPGMRARKRGHIINLSSIGGLVSFAATGYYNATKFAVEGLSGALAIELAPLGIKVTVVEPGPFRTDFSGRSIGKSKIEIDDYAETAGARRKMSLALSGKQPGDPVRAAQAIIDVVASSNPPLHLLLGAIALDLARKDLENKKHEFDAWEKTTLSADYPDAVVNS

SEQ ID NO: 1092 - DNA, 810 bp, Myxococcus xanthus DK 1622
  CDS (1)..(810): transl_table=11
atgcgcgccatgcgaggaaaaacggtggtcgtcacgggcgcctcggcgggcattggcgaggcgctggcggtggtgctggccggacgcggcgccaacctggtgctggcggcgcgaaatgaggaagcgctccagcgggtgaaggcccggtgcgagtcggccggcgggcgcgcggtggtagtgcccaccgatgtaggtgacgcggaggcctgccgccacctggtggagcgggcggtggaggcctttggcggcgtcgacgtgctggtcaacaacgcgggcgtgacgatggacgcgcgcgtggacgaggtgaaggacctgtccctcttcgaccggctgatgcgcatcaactacctgggcgcggtgtactgcacccaccacgccctgccccacctcaaggcgcggcgcggactggtggtggccgtgtcgtccctcacgggcaagacgggcgtgcccaaccgcagcggctacgcggccagcaagcacgccatgcacggcttcttcgactcgctgcgcatcgagctgcgcggcaccggtgtggacgtgacggtggtgtgccccggcttcgtcgccaccaacatccgcgacagcgcgctgggcgcggacggccagcccgtgcggcagagcaagcacgacgagagcgcgggcaacatggacgtggacacctgcgtggccatcatcctgcgcgccatggagcgccgcgagcgcgaggtggtgatgaccaccaaggcccgcgtcgcccagttcctcaagctggtggccccgggcgtggtggaccgcatcaccgcgaagaccatccaggaccggcggcgctga

SEQ ID NO: 1093 - protein, 269 aa, Myxococcus xanthus DK 1622
MRAMRGKTVVVTGASAGIGEALAVVLAGRGANLVLAARNEEALQRVKARCESAGGRAVVVPTDVGDAEACRHLVERAVEAFGGVDVLVNNAGVTMDARVDEVKDLSLFDRLMRINYLGAVYCTHHALPHLKARRGLVVAVSSLTGKTGVPNRSGYAASKHAMHGFFDSLRIELRGTGVDVTVVCPGFVATNIRDSALGADGQPVRQSKHDESAGNMDVDTCVAIILRAMERREREVVMTTKARVAQFLKLVAPGVVDRITAKTIQDRRR

SEQ ID NO: 1094 - DNA, 768 bp, Myxococcus xanthus DK 1622
  CDS (1)..(768): transl_table=11
atgaaccctacatacgacttcaaaggacaggtagcgctcgtcaccggcgctagctctggcatgggcctcgccaccgcgaaggccttcgccgcagccggcgcctccgtggtacttgcagatgtcaatacggcagcgctcacgtcggctgtcgacgccctgacatcggccggacattccgcgctcggtgtcacctgcgacgtgtccgacgaagcccaggtcgccgcgctggtccggcgagcagttgaggcctatggccggttggacatggccttcaacaacgccggcattcaggcaccgcccaccgatgcggcggatgagccttctgacctgttcgacagggtcaacggaatcaaccttcggggggtctgggcttgcatgaagcatgaactcaagcagatgcgtcagcaaggcagcggcgccatcgtgaactgctcgtcgctcggtggtctcgtcggcctgcctggtcgagcggcctatcacgcgtcgaagcacggagtcatcggcctgacgagaagcgctgcgttggagtacgcacctcgtggcatccgcatcaatgccatctgtccaggaaccatttctacgcccatggtcacggacatgctcgccaagggggaacttgatctcgccggggcgattgcgaatcagcccatcgggcgcctgggagaggctgaggagattgctgcctcggtgctctggctttgcagcccaggcgcaagtttcgttactggcgtggcacttccggtcgacggtggatacacggcgcgctga

SEQ ID NO: 1095 - protein, 255 aa, Myxococcus xanthus DK 1622
MNPTYDFKGQVALVTGASSGMGLATAKAFAAAGASVVLADVNTAALTSAVDALTSAGHSALGVTCDVSDEAQVAALVRRAVEAYGRLDMAFNNAGIQAPPTDAADEPSDLFDRVNGINLRGVWACMKHELKQMRQQGSGAIVNCSSLGGLVGLPGRAAYHASKHGVIGLTRSAALEYAPRGIRINAICPGTISTPMVTDMLAKGELDLAGAIANQPIGRLGEAEEIAASVLWLCSPGASFVTGVALPVDGGYTAR

SEQ ID NO: 1096 - DNA, 828 bp, Myxococcus xanthus DK 1622
  CDS (1)..(828): transl_table=11
atggtgcgcgctggcatgaagacccaacccttcaagggccgggtggtcctcatcacgggggcttccggaggcattggcaggacggcggcgagggcctacgcggccgcgggcgcggatgtcgtcctggccgcgcgccggctccccgagctcgaggacgcggcccgtgaagtggcgtcactgggcgtgagggcactgccggtgcggtgcgacgtcacggtgggcgacgacgtgacgcggctggtgcgcgagacggacgccgccttcggtgggctggatgtgctcgtcaacaacgcgggccaaggtctctacggaccgctggagggcgttggggaggagcaactccggcaggtcttcgagctgaacgtcttcagcctgtggcggatgacgcgcgaggcactgccgctgctgcgcaagcggcgtggcgctcaggtggtcaacgtcagctccgtgctgggccaccggggactgccgctgctgggcggctactgcgcgtccaaggccgcggtgaatgcgatgacggagtcgctgcgcgcggagctggccgccgagggcatccgggtactgctcgtgtcgcctggcttcaccgaaagcgacttccgggagaaccgccttcatgcggagggctggcgacaggacgccattccgctgaaggccatgtccgcggaagaagtcgccgacgcaatggttcgtgcgagccggagtggacggcgcgacaccgtgctcacgctgcccggccgggtgatggtggtggccaaccggtgggtgccttccctgttcgaccgtgtcgcccgccgcatggcgcttgcttcgaagaagaaggacgcatga

SEQ ID NO: 1097 - protein, 275 aa, Myxococcus xanthus DK 1622
MVRAGMKTQPFKGRVVLITGASGGIGRTAARAYAAAGADVVLAARRLPELEDAAREVASLGVRALPVRCDVTVGDDVTRLVRETDAAFGGLDVLVNNAGQGLYGPLEGVGEEQLRQVFELNVFSLWRMTREALPLLRKRRGAQVVNVSSVLGHRGLPLLGGYCASKAAVNAMTESLRAELAAEGIRVLLVSPGFTESDFRENRLHAEGWRQDAIPLKAMSAEEVADAMVRASRSGRRDTVLTLPGRVMVVANRWVPSLFDRVARRMALASKKKDA

SEQ ID NO: 1098 - DNA, 861 bp, Mycobacterium sp. MCS
  CDS (1)..(861): transl_table=11
atgaacgccgggcagaccttcggcggcggtgtcgcggtcatcacgggggcgggcgccggcatcggcgccgggctggcgcgccacgccgcccgcctgggcatgacggtggtgctcgccgacgtcgacggcgacgcgatcgccgcgctgcgcgacgaactgtcggaccagggcgccaccgctttcgacatggtctgcgacgtcagggatttcgcggccgtcgaggagctggcgcaacgcacctaccgcgacatcggcccggtgcgcctgctcgtcaacaacgccggcgtcgaacagttcggctacctgtgggacaccccggtcgagaactggcagcgtgtcgtcgacatcaacgtcagcggcgtcttccacggtgtccgggcattcctgccgatgatgatcgaggcgcgcaccccggcgtgggtgtggaatctcagctcgatcggcggcgtcgccgtcgtccccctgcaggcgccctacatcatgagcaaacacgccgtgctcgccctgacggagtgcctggcgctcgaagtccaactggccgaacacgaccacatccacgtgcaggcggtgctgcccggcgcggtcacgtccaacatcttcgagtcggcgggcggcgtcacggacggggacgtcggcgcggcagagtcccagcggctggcgatgctcgacatcaaggcggccgcgatggaccccctggccgcggcagaggtggtgttcgaccaggccgccgacggccggttctacctgctcacgcagcccgagtacgtcggcaacgcgatggccgaacgcgccgatgtgctgaccacgcagcgggcaccgctgctgcgcaccaaaccgcgtttcgaccccgcacagcactga

SEQ ID NO: 1099 - protein, 286 aa, Mycobacterium sp. MCS
MNAGQTFGGGVAVITGAGAGIGAGLARHAARLGMTVVLADVDGDAIAALRDELSDQGATAFDMVCDVRDFAAVEELAQRTYRDIGPVRLLVNNAGVEQFGYLWDTPVENWQRVVDINVSGVFHGVRAFLPMMIEARTPAWVWNLSSIGGVAVVPLQAPYIMSKHAVLALTECLALEVQLAEHDHIHVQAVLPGAVTSNIFESAGGVTDGDVGAAESQRLAMLDIKAAAMDPLAAAEVVFDQAADGRFYLLTQPEYVGNAMAERADVLTTQRAPLLRTKPRFDPAQH

SEQ ID NO: 1100 - DNA, 885 bp, Mycobacterium sp. MCS
  CDS (1)..(885): transl_table=11
ttgcgacgcatgacttccgtacacggcaaggtcgtgttgatcaccggtggggcccgaggggtcggcgaagaactggcccgccggttacatgccaagggcgccaagctggtgctcaccgacctggatgacggtccgctctcggcgctggccgcagacctcggcgccgagcgggtgttgacggtggtcgccgacgtgtgcgacctcgagaccatgcagtccgctgccgaacaggccgtgagccggttcggcgggatcgacatcgtcatcgcgaacgcggggatcgccagctacggatcggtgctggtggtcgatcccgacgccttccggcgggtgctcgacgtcaacgtggtcggcgtgttcaacaccgtgcgcgccgcgctcccgtcggtcatcgagcgcaagggctacatcctggtggtgtcgtcgctggcggcgttcgccgccgcgccggggatggcgccctacgacgcgtcgaaggccggtgtggagcacttcgccaacgccctgcgcctcgaggtcgcccaccacggcgtgacggtcgggtgcgcgcacatgtcgtggatcgacaccccgctcgtgcaggacaccaaggccgatctgccgagtttccgcaccatgctcgactcactgcccggcccgctcagcaagaccacctcggtgcagaagtgtggcgaggtgttcgtcaagggcatcgaacgccgtagggaacgcatctactgcccgggttgggtcggcctgatccgctgggccaaaccgatactcaccacgcggatcggtcaggcctcggtgctcaagacggcgccgaaggtgttgccccagatggacgccgaggtgaccgcactgaagcgctcgctgggcgcccgcacccacgggctgaagaaatga

SEQ ID NO: 1101 - protein, 294 aa, Mycobacterium sp. MCS
MRRMTSVHGKVVLITGGARGVGEELARRLHAKGAKLVLTDLDDGPLSALAADLGAERVLTVVADVCDLETMQSAAEQAVSRFGGIDIVIANAGIASYGSVLVVDPDAFRRVLDVNVVGVFNTVRAALPSVIERKGYILVVSSLAAFAAAPGMAPYDASKAGVEHFANALRLEVAHHGVTVGCAHMSWIDTPLVQDTKADLPSFRTMLDSLPGPLSKTTSVQKCGEVFVKGIERRRERIYCPGWVGLIRWAKPILTTRIGQASVLKTAPKVLPQMDAEVTALKRSLGARTHGLKK

SEQ ID NO: 1102 - DNA, 825 bp, Mycobacterium sp. MCS
  CDS (1)..(825): transl_table=11
atggacttcgcgggcagacaggcgatcgtcaccggcgccggttcgggcatcggcgccgctctgtgccgggcactggtggcggccggggccgaggtgttgtgcaccgacatcgacgccgacgccgccgaggcgaccgcgcgtgggctcggcgcccgctggtcacccctggacgtcaccgacgccgccgcggtgcagcgggccgtcgacgaggtggtggcgcgcgccggtcgactggacctgatgttcaacaacgcgggcatctcctggggcggtgacaccgaactgctgaccctcgaccagtggaacgcgatcatcgacatcaacatccgcggtgtggtgcacggagtcgccgcggcgtacccccagatgatccgccaggggcacggccacatcgtcaacaccgcctcgatggcgggcctcaccgcggcgggcctgatcaccagctatgtgatgaccaaacacgcggtcgtcggcctgtcgctggcgctgcgctcggaggccgtcgcacacggtgtgggggtgctcgccgtctgcccggccgcggtcgagacgccgatcctcgacaagggcgccgtcggcgggttcgtcggtcgcgattattacctgcagggccagcgggtcaaggccccttacgacgccgaccggctggcgcgcgacaccctgcgcgccgtgcagcgcaacaaggccgtgctggtcaaaccccggcaggcccacgccgcatgggttttcgcgcggctcgcgcccgggctgatgcagcggatggccgcgcggttcgtcgccgaacagcgggccgggcagcgggcgcagaccgtcggcaccgggtag

SEQ ID NO: 1103 - protein, 274 aa, Mycobacterium sp. MCS
MDFAGRQAIVTGAGSGIGAALCRALVAAGAEVLCTDIDADAAEATARGLGARWSPLDVTDAAAVQRAVDEVVARAGRLDLMFNNAGISWGGDTELLTLDQWNAIIDINIRGVVHGVAAAYPQMIRQGHGHIVNTASMAGLTAAGLITSYVMTKHAVVGLSLALRSEAVAHGVGVLAVCPAAVETPILDKGAVGGFVGRDYYLQGQRVKAPYDADRLARDTLRAVQRNKAVLVKPRQAHAAWVFARLAPGLMQRMAARFVAEQRAGQRAQTVGTG

SEQ ID NO: 1104 - DNA, 798 bp, Rubrobacter xylanophilus DSM 9941
  CDS (1)..(798): transl_table=11
ttgccggaaccgaaggagagggtggccgtcgtcaccggggcggcgcgcggcatcggccggcgggtggccctggagctcgccgcgagggggtacgccgtagcggccaacgacctccgggctccgggggcgacgctggaggagctggagggcgtgggcgcgagggcgctcgccctccccggcgacgtcgccgacgagagggcggtgcgcggcatggtccgggcggtggaggaggccttcgggcgggtggacgtgctcgtgaacaacgcggggatcagcctcatcaaacccgccgaggagaccacccccgccgagtggcggcgcgtcgtggaggtgaacctcaccggccccttcctgacgtgccgctacttcggcttcctgatgctccggcagggctccgggagcatcgtgaacgtgagctcggtcgccgggctgctcgggatctccgaccgggccgcctacaacgccagcaagcacggcctcgtcgggctcacccggaccctggccgccgagtggggcggccgcggcgtgagggtcaacgccgtctgccccgggtgggtgaagaccgagatggacgccgaggaccaggccgggggcggctacaccgacgaggacatcgccggccgcacccccatggggcgcttcgccacccccgaggacgtggccgccgccgtggcctttctcgccgattccgggcagagcggctacgtaaacggacatgcgctctcggtggacggcggctggtacgccgacgggagctgggagagcctcaggcgccgaaagcaggccccctccccttga

SEQ ID NO: 1105 - protein, 265 aa, Rubrobacter xylanophilus DSM 9941
MPEPKERVAVVTGAARGIGRRVALELAARGYAVAANDLRAPGATLEELEGVGARALALPGDVADERAVRGMVRAVEEAFGRVDVLVNNAGISLIKPAEETTPAEWRRVVEVNLTGPFLTCRYFGFLMLRQGSGSIVNVSSVAGLLGISDRAAYNASKHGLVGLTRTLAAEWGGRGVRVNAVCPGWVKTEMDAEDQAGGGYTDEDIAGRTPMGRFATPEDVAAAVAFLADSGQSGYVNGHALSVDGGWYADGSWESLRRRKQAPSP

SEQ ID NO: 1106 - DNA, 969 bp, Rhodococcus sp. RHA1
  CDS (1)..(969): transl_table=11
atgaacctctgcagttcagccatgcgaccagcatcacaccggccccagaaaaaagcaagcacgattgattgttatttggctgcggatcgcccggcgaggtgccacgctggtcacgtgatacgacagttgctcacccatgccgcgctcaacccactcccctccccgcgcgcactggccgcccgagtcgtaccgggaaccggccaccgcatcaccgggaaacggatcctcgtcaccggtggttcctcgggagtcggggaagcggccgcacgccggctcgccgcgctcggcgcggaggtcgtcctcgtggcccgcggctccgacgccctcgagtcggtgcgcgacgacatcctgcggtccggttgcgacgcgcacgccgttccctgcgacctcacggacccggagtccgtcgacgccctcgtcgctcaggtgctcggggagatcggccccgtcgacgtactcgtcaacaacgccgggcggtcgatccggcggacggtcgaggactcactggaccgattccacgatttcgaacgcaccatggccgtcaactacttcggctcgacgcggctgaccctcgcgttgctcccgtcgatgatcgagcgccgcaagggccacatcatcaatgtcgcgacgtggggcgtgcctgccggtgtcatgcccaagttctccgcctaccacgcgtccaaggctgccgtcggcgcgttcggccggagcctcggcgccgaagtgcgcgaccgcggaatctccgtgaccaccctggactttcccttggtccggacgccgatgatcgcgcccaccacggactacgacgcgatggccgccctgactccagggcaggcggcggaatggttcgtcaccgccgtgcgcacccggccgatcgaactgctccccagttacgccgaactgttccggctgctcggcacgttcgcgccgtccgccaccgacgcactggtacggcgcaccggcatctga

SEQ ID NO: 1107 - protein, 322 aa, Rhodococcus sp. RHA1
MNLCSSAMRPASHRPQKKASTIDCYLAADRPARCHAGHVIRQLLTHAALNPLPSPRALAARVVPGTGHRITGKRILVTGGSSGVGEAAARRLAALGAEVVLVARGSDALESVRDDILRSGCDAHAVPCDLTDPESVDALVAQVLGEIGPVDVLVNNAGRSIRRTVEDSLDRFHDFERTMAVNYFGSTRLTLALLPSMIERRKGHIINVATWGVPAGVMPKFSAYHASKAAVGAFGRSLGAEVRDRGISVTTLDFPLVRTPMIAPTTDYDAMAALTPGQAAEWFVTAVRTRPIELLPSYAELFRLLGTFAPSATDALVRRTGI

SEQ ID NO: 1108 - DNA, 861 bp, Rhodococcus sp. RHA1
  CDS (1)..(861): transl_table=11
atgaacatcttcggcggtcggaactatccccggatcgacctggacggcgctgccgtcgtcgtgaccgggggagggcggggcatcggtcgcgccaccgccgaactgttcgcggccaggggcgcaaccgtgtgcatcggtgacctcgatcgcgcggtcgccgacgagaccgcggcggagatcggtgcccgcgcgtacacagtcgatgtcacgtccgcggagtcgtggcggcggttcgtcgatgcggtgctggcggactgcgaccgcatcgacgtgctggtcaacaacgccggcgtcatgccgctcggtggcttcctcgaggaatccgacgcaaccagccggatgaccatgaacgtcaacgtgtggggtccgctgcacgggatgcgaatggtgttgcccggcatggtcgagcgcgggcgtggtcacatcgtcaacgtcgcatccatggccggcaagctgcccgtgcccgggatggccgtctacaacgccagcaagttcggggcggtgggactctccgccgccgtccgggccgagttcgctcccgccggagtcagtgtgagcaccatccttcccagcgcggtgcgcaccggactgtcttccggtgtgccgctgggcggcgggatgccgaccgtcgacccggaggatgtggcggaggccatcgtccgaacgctcgaccatcgtcgcgccgaaaccgctgtgccccgttacctcgccgggtgggatctgatcgacgccgtggtcccggagcgtctcctcgatctcggccgccgtctgatcgacgaccggcgggcgctcactgccgtcgaccccgtcgggcgggccgactacgaccgccggctcgcccgccagtcgcagacgccgtag

SEQ ID NO: 1109 - protein, 286 aa, Rhodococcus sp. RHA1
MNIFGGRNYPRIDLDGAAVVVTGGGRGIGRATAELFAARGATVCIGDLDRAVADETAAEIGARAYTVDVTSAESWRRFVDAVLADCDRIDVLVNNAGVMPLGGFLEESDATSRMTMNVNVWGPLHGMRMVLPGMVERGRGHIVNVASMAGKLPVPGMAVYNASKFGAVGLSAAVRAEFAPAGVSVSTILPSAVRTGLSSGVPLGGGMPTVDPEDVAEAIVRTLDHRRAETAVPRYLAGWDLIDAVVPERLLDLGRRLIDDRRALTAVDPVGRADYDRRLARQSQTP

SEQ ID NO: 1110 - DNA, 771 bp, Rhodococcus sp. RHA1
  CDS (1)..(771): transl_table=11
atgagcggcaccacactggtcgtcggggcggcccagggcatcgggcgggcaacggccgtcaccctgtcgcgatccggtcaccgcctggtactgctcgatcgtgacgccgacggcctcgccgccaccgcggcactgctcgacaccccgccgctcggtaccgccgtcaccgacatccgcgacaccgacgccgtcaccgacaccgtccgccggatcgaggacgagcacggtcccatcaccgcactcgcacacgtggcgggtgtgctcgagaccggctcggtgctcgacgccgaccccgagagctggcagcgcgtgttcgacgtcaacgtcaccggcctcgtcaacgtgctgcgggcggtcggcaccggaatgcgcgagcgtgcagccggttccatcgtcgtggtcggctccaacgccgcgggcgtcccccgcaccggcatgggcgcgtacggcgcgtccaaggccgccgtgtcgatgatcgtccgggtactcggcctcgagctggccgaatacgggatccgcgccaacatcgtcgcccccggctcgacggacaccgcgatgcagcggtcgctgtgggcggaccccgccgacgacaccggcgcgcgcggggcgatcgacggcgacctgggcacgttcaaggtcggaatcccgctgggccgcatcgccgacgccgccgacatcgcggactccgtcgagttcctcttgtcggagcgggcgcgtcacatcaccatgcaggcgctctacgtcgacggcggcgctaccctccgagcctga

SEQ ID NO: 1111 - protein, 256 aa, Rhodococcus sp. RHA1
MSGTTLVVGAAQGIGRATAVTLSRSGHRLVLLDRDADGLAATAALLDTPPLGTAVTDIRDTDAVTDTVRRIEDEHGPITALAHVAGVLETGSVLDADPESWQRVFDVNVTGLVNVLRAVGTGMRERAAGSIVVVGSNAAGVPRTGMGAYGASKAAVSMIVRVLGLELAEYGIRANIVAPGSTDTAMQRSLWADPADDTGARGAIDGDLGTFKVGIPLGRIADAADIADSVEFLLSERARHITMQALYVDGGATLRA

SEQ ID NO: 1112 - DNA, 972 bp, Rhodococcus sp. RHA1
  CDS (1)..(972): transl_table=11
atgatggccacgttcagaacccggtcgaccattgcgcgcaccctgagagacctgggcctcccactgcccggtcgaggcgccgagtacaacgttgccggcaaggtggtcctgattaccggcggaggtgacggtatcggactggcatcggcgcgtgccctgcacgcccgcggcgcaacggtcgcactgctcgatgtcaatcaatcgtccctgacggcagctgaattcgcgctcggccgacggcgggtcctcaccctggtcgccgatgtccgcgaccgtcccggcatggattcagccgtgcacgcggtgatcgagcggtacgggcggatcgatgtggtgatcgcgaacgccggagtgaccccgcccccgtccaccctccgccagatcgatccggcgggcttcgaccgcgtgatcgacatcaacctcacgggtgtcttcaacaccgtccatcctgcgatcgacgaagtgattgcgcgacgcggccacatcgtggtggtgtcgtctgcggcggccttcgcgcccggtctcggtggcgcgtcctacatgatcagcaaggccgccgtcgaacaactcggccgggcactccgtctcgaactcgccggctacggcgcctccgcgggtgtggcgtacttcgggatggtcgacacccaactggctcgggcaaccctcgacgacgacgagatcggcagaaggctcgatgcgcgtcttcctcgtccgctgcgccgccgcatcagcccagaggatgccgcgacggtgatcgcagatgctatcgcccgccgcgccggacgcaccctcgctccggcggcatggcacccgtgggccctgggacgaggactggtgaacgtgctcgccgacggctacctcgccgccgacgccgaatgtcaccaactgatccgcgagctcgaagaacgtcccgtcaccacacacccgagtggctccacaacagccggtcccgaaccgaggagaacgccatga

SEQ ID NO: 1113 - protein, 323 aa, Rhodococcus sp. RHA1
MMATFRTRSTIARTLRDLGLPLPGRGAEYNVAGKVVLITGGGDGIGLASARALHARGATVALLDVNQSSLTAAEFALGRRRVLTLVADVRDRPGMDSAVHAVIERYGRIDVVIANAGVTPPPSTLRQIDPAGFDRVIDINLTGVFNTVHPAIDEVIARRGHIVVVSSAAAFAPGLGGASYMISKAAVEQLGRALRLELAGYGASAGVAYFGMVDTQLARATLDDDEIGRRLDARLPRPLRRRISPEDAATVIADAIARRAGRTLAPAAWHPWALGRGLVNVLADGYLAADAECHQLIRELEERPVTTHPSGSTTAGPEPRRTP

SEQ ID NO: 1114 - DNA, 837 bp, Pseudomonas aeruginosa UCBPP-PA14
  CDS (1)..(837): transl_table=11
atgccgcgcaaggtattcagcagccaggcctaccgccacaaggtggtgctggtcagtggtggttgttctggcatcggtcgcgcgctggcgctgcgtttcgcccgggccggtgcgcgactggcgatcctcgacctcgaccaggcggcgctggacagcctggtgcagcacctgcgcgaccatctcggcggcgaggcgctcggcctgcgctgcgacgtcgccgacgccgatgcggtggagcgtgccgtggcgctggcggtggagcgcttcggcggcatcgacgtgctggtcaacaacgccggcatcacccaccgcggtaccttcgccgaaaccggcctgggggttttccgcaaggtcatggcggtgaacttcttcggcgccgtgcattgcacccgcgcggcgctgccgagcctgctcgaacggcgcgggcagatcgtcgtgctcagttcgctgaccggtttcgccccgttgctctaccgcagcgcctacaacgccagcaagcatgccttgcacggtctgttcgacaccctgcggatggagctggaaggcaccggcgtcagcgtgaccctggcctgcccgggattcaccgccaccgacctgcgcaagaatgcgctggtcggcgatggctcggtgactcgccagccggtgcaagtgctgggcagccaggtggcatcgccggtggaggtcgccgaggcgatcttccagggcgccgcgcggcgccggcgcctgctggtgctgtccaacgtcaactggcgggcgcggctgctggcgcgcttctttccgcgtctcttcgaaaagctgctggtgccgcgcctgtcgggactcaagccgcaaccctga

SEQ ID NO: 1115 - protein, 278 aa, Pseudomonas aeruginosa UCBPP-PA14
MPRKVFSSQAYRHKVVLVSGGCSGIGRALALRFARAGARLAILDLDQAALDSLVQHLRDHLGGEALGLRCDVADADAVERAVALAVERFGGIDVLVNNAGITHRGTFAETGLGVFRKVMAVNFFGAVHCTRAALPSLLERRGQIVVLSSLTGFAPLLYRSAYNASKHALHGLFDTLRMELEGTGVSVTLACPGFTATDLRKNALVGDGSVTRQPVQVLGSQVASPVEVAEAIFQGAARRRRLLVLSNVNWRARLLARFFPRLFEKLLVPRLSGLKPQP

SEQ ID NO: 1116 - DNA, 1041 bp, Solibacter usitatus Ellin6076
  CDS (1)..(1041): transl_table=11
atgagtcgtaagacgtggctggccacctcggccgctctggccaccgccggcatcgcagcgacggtcctgcgtcgccgcgcctgcatggatatgcgtggcaaggtggtactgattaccggcggctcacatggtctgggtctcgctctggcgcgaaggttcgcccaggagggtgcgaagattgcactctgcgcgcgcagcgaggaagaactccgtcgtgcgcgagaagatgttgccagccgcggagcggaagtcttcaccgccacgtgcgacgtcagcgaccgcctgcaagtggaagcggtggtgacggcaactttggatcgcttccggcgcatcgatgttctggtgaataatgccggcatcatccatgtgggtccggtcgatgcaatgactatcgaagattttgaacaggcgatgggcgttatgttttgggggacggtctacgccacgatggccgtgctcccgcacatgcggggccgccgcgaccaacgtatcgtgaacatcacctcgatcggcgcaaaggtaagcgttccccacctgctgccctacagttgtgcgaaatttgccgcggcggcattttccgaaggcatgcgcgctgaactgagcggcactggtgtgaaagtagtaacgattgcacccggactcatgcgtaccgggtcgtatctcaacgcgctgttcaagggcgctgaagcaggagaggcgggatggttcagtgtaagttccagcctgcccggaatctcgatgagtgccgaaaaggcagcggaacaaattgtctccgccgcgcgaagtggcaggccggagcgtgttctaggcgtaccggcgaagcttctcgcgcagtttcacgagctgttcccgagcgctacagccggtattcttggtctcgtcagccgggctttgccccatggcggaaggcggtcggaactcggatcggaaagtccgctgctccaaaaagagtggctgcgattcctgaccacgctcggaaggtacgtagcggaagaccttctgcaacccggaactccgaatgggagtgcgggtcgcgcctga

SEQ ID NO: 1117 - protein, 346 aa, Solibacter usitatus Ellin6076
MSRKTWLATSAALATAGIAATVLRRRACMDMRGKVVLITGGSHGLGLALARRFAQEGAKIALCARSEEELRRAREDVASRGAEVFTATCDVSDRLQVEAVVTATLDRFRRIDVLVNNAGIIHVGPVDAMTIEDFEQAMGVMFWGTVYATMAVLPHMRGRRDQRIVNITSIGAKVSVPHLLPYSCAKFAAAAFSEGMRAELSGTGVKVVTIAPGLMRTGSYLNALFKGAEAGEAGWFSVSSSLPGISMSAEKAAEQIVSAARSGRPERVLGVPAKLLAQFHELFPSATAGILGLVSRALPHGGRRSELGSESPLLQKEWLRFLTTLGRYVAEDLLQPGTPNGSAGRA

SEQ ID NO: 1118 - DNA, 789 bp, Mycobacterium smegmatis str. MC2 155
  CDS (1)..(789): transl_table=11
atggacctgggtttgaagggcaagcgggcgttgatctcgggtgccagcgatggcatcggcctcgctgcggccgaactactcgcagaagagggcgtcgatgtggccttggtggcccgccgcgcgaatgtgctcaaagagggttgcgactctatcgcgtccaagacaggcgtcaaggccgtaccgcttgccgccgacctcagcgacaaatcggtgttcgatgcggtggtgaacgacgccgtcgatgaactcggcggcctggacatcctgatcaacaatgccggcgcatcatccttcggcggctttggtgacatcaccgatgagcagtgggtggcagacatcaatctcaagctgttcgggttcattcggatgactcgcgcggctctgccacatctgttgaagacaggtagtggacgaatcgtcaacgttgcgggcaactccggtaagcaggcgctggaataccacatgccgggagccgccgcgaacgcggcgatcctgaatttcagcaagtccctgtcactgcaggtcggggcccaaggagtcatcatcaacacggtgtgcccgggaccggtccggacagctcgcctggtcaaacagttcgccgcaaacgcccgggactggaactgcactccggaggaggccgaggaacggttcctggccggcctccctttgccgtacatccccagcgcccgcgacatcgcctactcgatcgcgtttctggcatcgccgcgggcggcatacctcaacggcaccacgatcaccaatgacggcggcatcacccgtgcggtctga

SEQ ID NO: 1119 - protein, 262 aa, Mycobacterium smegmatis str. MC2 155
MDLGLKGKRALISGASDGIGLAAAELLAEEGVDVALVARRANVLKEGCDSIASKTGVKAVPLAADLSDKSVFDAVVNDAVDELGGLDILINNAGASSFGGFGDITDEQWVADINLKLFGFIRMTRAALPHLLKTGSGRIVNVAGNSGKQALEYHMPGAAANAAILNFSKSLSLQVGAQGVIINTVCPGPVRTARLVKQFAANARDWNCTPEEAEERFLAGLPLPYIPSARDIAYSIAFLASPRAAYLNGTTITNDGGITRAV

SEQ ID NO: 1120 - DNA, 888 bp, Mycobacterium smegmatis str. MC2 155
  CDS (1)..(888): transl_table=11
atgggatcacgcacagcctcactcggcgggaaagtcgttttcatcacgggcggcggagccggtgtcggagccgaggtttcgcgccgcctgtaccgcaagggcgccaagctgatgctcgtcgacgtcgatgccgacgccctgaaggcgcacgccgacaccctcggtgaggacgtcgcgaccgccgtcgccgatgtgcgtgacctcgctgcgatgaaggccgcggccgacgcggcggtcgaacggttcggcggtatcgacgtcgtggtggccaacgccggtgtcgccagctacggatcggtgcagcaggtcgatcccgaggcgttcaagcgtctgctcgacatcaacgtgctcggcgtgttccacacggtgcgcgcgacgctgccgtcggtgatcgagcggcgcggttacgtgctgatcgtgtcgtcgctcgcggcgtatgccgcgtcgccgggcctggcgccgtacaacgcgtcaaaggccgccgtcgaacagttcgccaacgcgctgcggctcgaggtcgcccaccgcggcgtcgacgtcggatcggcgcacatgagttggatcgacaccgcgatggtcaacgacagcaaggccgatctgtcgacgttcggcgagatgctgtccaagctgccgcctccgctgtcgtccaccacgtctgtttcggcctgcggcgaggcgttcgtcaagggcatcgagcggcgcgcgcgccgtatcaactgcccgggttgggtcgaggcgttccgctggctcaagccgatcctgtcgacgcgcctgggggagttgccggtgctgcggttcgtacccgacctgctgccgcggatggacgccgaggtcgccgcgctgggcagatcgagcagcgcgcacaccgagtcgatcgagaagcggtga

SEQ ID NO: 1121 - protein, 295 aa, Mycobacterium smegmatis str. MC2 155
MGSRTASLGGKVVFITGGGAGVGAEVSRRLYRKGAKLMLVDVDADALKAHADTLGEDVATAVADVRDLAAMKAAADAAVERFGGIDVVVANAGVASYGSVQQVDPEAFKRLLDINVLGVFHTVRATLPSVIERRGYVLIVSSLAAYAASPGLAPYNASKAAVEQFANALRLEVAHRGVDVGSAHMSWIDTAMVNDSKADLSTFGEMLSKLPPPLSSTTSVSACGEAFVKGIERRARRINCPGWVEAFRWLKPILSTRLGELPVLRFVPDLLPRMDAEVAALGRSSSAHTESIEKR

SEQ ID NO: 1122 - DNA, 834 bp, Mycobacterium smegmatis str. MC2 155
  CDS (1)..(834): transl_table=11
atgagtttcacgggcaagaccgcgatcgtcaccggcgcgggatccgggatcggcgcgacgctgtgccgcgcgctggtggatgccggtgccgacgtgctgtgcaccgacgtcgacgccgacgccgccgcacgcacggccgccgcacgcacggccgccgcactcggcgcccgatcggcgcgcctcgacgtcaccgacgccgcggccgtgcagaccaccgtcgacgatgtggtcgcccgcgccggccggttggacctgatgttcaacaacgcaggcatcgtgtggggcggcgacaccgaactgctcacgctcgaccagtggaacgcgatcatcgacgtcaacatccgcggcgtcgtgcacggtgtcgccgcggcgtacccgcagatgatccgccagggccacggccacatcgtcaacaccgcgtcgatggccggactggccgcggccggtcagctcaccagctacgtgatgagcaagcacgccgtcgtcgggctgtcgctggcgctgcgctcggaggccgccgcacacggcgtcggtgtgctcgcggtgtgccccgcggccgtggagacgccgatcctcgacaagggcgcggtcggcgggttcgtgggacgggattacttcctgcgcggtcagggcatgaagacggcgtacgacccggaccggttggccgccgacaccctgcgcgcgatcgagcgcaacaaggccctgctggtcaaaccgcgtcgagcccacgcgtcgtggctgttggcgcgtctcgcgcccggtctgatgcagcggctgtcggttcggttcgtcgccgcccagcgcgcatcgcaggcccgcacggcaaaccactag

SEQ ID NO: 1123 - protein, 277 aa, Mycobacterium smegmatis str. MC2 155
MSFTGKTAIVTGAGSGIGATLCRALVDAGADVLCTDVDADAAARTAAARTAAALGARSARLDVTDAAAVQTTVDDVVARAGRLDLMFNNAGIVWGGDTELLTLDQWNAIIDVNIRGVVHGVAAAYPQMIRQGHGHIVNTASMAGLAAAGQLTSYVMSKHAVVGLSLALRSEAAAHGVGVLAVCPAAVETPILDKGAVGGFVGRDYFLRGQGMKTAYDPDRLAADTLRAIERNKALLVKPRRAHASWLLARLAPGLMQRLSVRFVAAQRASQARTANH

SEQ ID NO: 1124 - DNA, 762 bp, Mycobacterium smegmatis str. MC2 155
  CDS (1)..(762): transl_table=11
atgccagacagggtgctggatggaaacgtcgttctgataagcggagcatcaagcggaattggcaacgccgccgcacgaaagctggccggcgcgggagccaaggtcgctctcgccgcgcggcgggccgacaagctcgagggactggcggaacggctacggtctcaaggccatgaagccttggtgatcgctgctgacctcactgatgcgggcaacgcgcaatcgactgttgaccgaaccgtcgacgagttcggccgcctcgacaccctggtgaacgcggcgggtgtgatgctgaacggcgcatccgaagaatcgccgctcgaagagtgggaccgaatggtcgacatcaacctgcgcggcctcatgtatgtgacgaaggcggcgttgccgcatcttctcgtcgctgcacggaacagtccacgctcggtggccgacgtggtgaacatttcgtccgtcgccggacgggtcgcggcaccgacggtcgcgatctacaacgccacgaagttcgccgtgacgggcgcaaccgaagcgtggcggcaggagttcaccaagcgcaacgtccgcttctcggtcatcgagcccggtcgcaccaaaaccgaattattcgaccagaagggtaattcagacgcagatttcaaagcggcgttcggagcagtggagcaattgcacgcggaggacatcgccgaagcgatcgcctacatcgtcgcgcaaccgcgccgcgtcgccgtgaacgagatcgtcatccggcccaccgatcagccgtag

SEQ ID NO: 1125 - protein, 253 aa, Mycobacterium smegmatis str. MC2 155
MPDRVLDGNVVLISGASSGIGNAAARKLAGAGAKVALAARRADKLEGLAERLRSQGHEALVIAADLTDAGNAQSTVDRTVDEFGRLDTLVNAAGVMLNGASEESPLEEWDRMVDINLRGLMYVTKAALPHLLVAARNSPRSVADVVNISSVAGRVAAPTVAIYNATKFAVTGATEAWRQEFTKRNVRFSVIEPGRTKTELFDQKGNSDADFKAAFGAVEQLHAEDIAEAIAYIVAQPRRVAVNEIVIRPTDQP

SEQ ID NO: 1126 - DNA, 735 bp, Nocardioides sp. JS614
  CDS (1)..(735): transl_table=11
atgagtgtcaaggaaggtgaagcagttcccgtcgcggtcgtcacgggtggttgctcggggatcggccagatgacggcggagcgcctggcgagcgacggctaccgtgtcgccgtcatcgacctgggcttcgcaccggatgccgatctctcgctcgaagccgacgtgaccgatcccgccggagtggaatccgcggtcgaggcgatcctcgatgcctttggccgggtcgacctgttggtcaacaacgccggcatcaccgggtccgcagaggcgactgtctgtcatgacacgccggttgagcaatgggacctggtccatgcggtcaatgtcaggggcccgttcctgtgtacccgcgccgtactgccaacgatgctgatccagaagtcgggccacgtgatcaccgtggcttcggttgccggcctagtcgcatttccagggcgatgtgcctacaccgcgtcgaagggggcggcgatcgcgttcaccaggtcgctcgccgtcgactacgcagcagcgggcgtccgcgccaacgccatctgccccggcatggtcgagaccccgatgacccaatggcgacttgatgttccagaacttcgcgcacaagttgagtcgaagatcccacttgggcgtgtggcgaaacctgaggatatcgccgatgcggtggtagcgcttgcctccgacaagctggcctacatgacaggtcacgcactcgtcgtcgacggtgggtggatcgctctgtag

SEQ ID NO: 1127 - protein, 244 aa, Nocardioides sp. JS614
MSVKEGEAVPVAVVTGGCSGIGQMTAERLASDGYRVAVIDLGFAPDADLSLEADVTDPAGVESAVEAILDAFGRVDLLVNNAGITGSAEATVCHDTPVEQWDLVHAVNVRGPFLCTRAVLPTMLIQKSGHVITVASVAGLVAFPGRCAYTASKGAAIAFTRSLAVDYAAAGVRANAICPGMVETPMTQWRLDVPELRAQVESKIPLGRVAKPEDIADAVVALASDKLAYMTGHALVVDGGWIAL

SEQ ID NO: 1128 - DNA, 741 bp, Nocardioides sp. JS614
  CDS (1)..(741): transl_table=11
atggcgaccggatcggcgggggtggcgatggtgaccggcgcgagcggccggatcggccggcacgtcgtcgaccggctgatcgagcgcgggtacgccgtgcaggggctcgacctggcacccggtccgcacacccgggtctgcgacctcgccgacgaggacgcggtccgcgcggcgctgggcgacctgccgcggctggacctgctcgtgctctgcgccggcctgtccgcgatcgggaccgtcgacgaccacgatctcgccacccaccggcgggtcatggacggcacccacttctcggccgtggggccgctgctggccgcgttgccggcgttgcggcgggcccggggcaccgtggtgctggtggggtcggtggcgggcttcgcgcccgtgctcggccgcccggcgtacgtcgccgccaagaacgcggtcaccggcctgttcaccgcgctgcgtcccgagctggctgcccaaggggtgcgcgtcgtggtcgtgcacccgacgttcgtcaccggcggcatgggggtggccgaccaggccgggtacgaccgtcgcacgaccgccggcgccgagctcacgccggagcaggtggccgacgccatcgtcgatgcggccgagggacggcgcgacgtcgtcctcgtgggtcgcacggcccgcctggcctgggcggtgagcaggcacgcccctcggacctacacccgcctgatgacccgtcggctgcgcgccgggacaggagagaacccgtga

SEQ ID NO: 1129 - protein, 246 aa, Nocardioides sp. JS614
MATGSAGVAMVTGASGRIGRHVVDRLIERGYAVQGLDLAPGPHTRVCDLADEDAVRAALGDLPRLDLLVLCAGLSAIGTVDDHDLATHRRVMDGTHFSAVGPLLAALPALRRARGTVVLVGSVAGFAPVLGRPAYVAAKNAVTGLFTALRPELAAQGVRVVVVHPTFVTGGMGVADQAGYDRRTTAGAELTPEQVADAIVDAAEGRRDVVLVGRTARLAWAVSRHAPRTYTRLMTRRLRAGTGENP

SEQ ID NO: 1130 - DNA, 837 bp, marine gamma proteobacterium HTCC2080
  CDS (1)..(837): transl_table=11
atggaaagacgactggaagggcaggtggctgtcatcactggtggtgcgagtggtattggcgcagcgacggccgaaaagttagtggcacatggcgctaaggtcgtgctgggggatattcaagaggatcgcttggcgagtttcgttgagtcgctcaatggtcaagcgatgggtttgcgctgtgatgtcacccgagaggaggatgttaaaggtttggttgatgcggccattgcgaaccatgggcgcattgatgtgatgtttaacaatgcgggcatcgtgggtgctattggtcctatggatacgacccctactgatgagtggaagttcactttagatattcttttaaacggcgtgttctatggcatgaaacacgcctcgggtcacatgaagcgtgcaggacgtggctctattatcagtatgagtagcacggcgggcgtgatgggggggctaggccctcatgcttatgcagcggctaaacatgccgtagtaggccttactaagaacctggctgctgaagcttgtgcctttggtgtgcgggttaattgtttggcacctgggcttatagccacacccttggcggcagcggctaccgtgggtgatcctgatgggattgagcaggcgctcccagcatttgctgaattatcgcctttgccagggcgtgcaggtatgcccgaagatgtcgctaatgcagtactgtggttggcatcagacgagtcgggctatgtgaatggtcaaacgatcgcgattgacgcaggtcttacgacggggtcaaagcctggagatcctaactttgctgaatatcagcccatactccgagaggcaggtaagagtgggttgtag

SEQ ID NO: 1131 - protein, 278 aa, marine gamma proteobacterium HTCC2080
MERRLEGQVAVITGGASGIGAATAEKLVAHGAKVVLGDIQEDRLASFVESLNGQAMGLRCDVTREEDVKGLVDAAIANHGRIDVMFNNAGIVGAIGPMDTTPTDEWKFTLDILLNGVFYGMKHASGHMKRAGRGSIISMSSTAGVMGGLGPHAYAAAKHAVVGLTKNLAAEACAFGVRVNCLAPGLIATPLAAAATVGDPDGIEQALPAFAELSPLPGRAGMPEDVANAVLWLASDESGYVNGQTIAIDAGLTTGSKPGDPNFAEYQPILREAGKSGL

SEQ ID NO: 1132 - DNA, 828 bp, Pseudomonas putida GB-1
  CDS (1)..(828): transl_table=11
atgaacaacaataagattgcctctcagtggctgggcctggactcggccgtatgcgtggtaaccggcgccgccggcggcattggtgccgcgctggccgcagccttggtggagcagcaggcccacgtggtgctgctggaccgcgacctggacaaatgccgcgaactggcggccaccttgggtgagcacagcacgggcgaagtcagcgccctggcctgtgacattgccgacccggccagcgtggggcaagcggctgcccaggtgcaggcactgcatgggcgctgcgatgtgctggtcaacaatgccagcgtgctgcgccccggcgcgctggacacgctgagcctggagcaatggaaccaggtgctggcggtcaacctcagcggctacctgttgtgtgcccaggccttcggccgctcgatgctggctcgcggccagggccgcatcgtgcatgtagcctcgattgccgcccattacccgcaacccaacagcggtgcctacagcgcggccaaggctggcgtgagcatgctgtcgcggcagcttgccgtggagtgggggccgcggggtgtgcgcagcaacgccgtgtgcccgggcttgatccgcacgcccttgtcggcggcgttctatgccgacccgcaggtggaacgccagcgtagcgccatgaccgccaaccgtcgcattggtgagccgctggatatcgccgaggccgtgctgtttctggccagccgccgcgccgactatatcaacggcgccgagctgaccgtggatggcgggctggagtgcatgcccatggcattgatcccgcgcccgggcttcgagggggctggccaatga

SEQ ID NO: 1133 - protein, 275 aa, Pseudomonas putida GB-1
MNNNKIASQWLGLDSAVCVVTGAAGGIGAALAAALVEQQAHVVLLDRDLDKCRELAATLGEHSTGEVSALACDIADPASVGQAAAQVQALHGRCDVLVNNASVLRPGALDTLSLEQWNQVLAVNLSGYLLCAQAFGRSMLARGQGRIVHVASIAAHYPQPNSGAYSAAKAGVSMLSRQLAVEWGPRGVRSNAVCPGLIRTPLSAAFYADPQVERQRSAMTANRRIGEPLDIAEAVLFLASRRADYINGAELTVDGGLECMPMALIPRPGFEGAGQ

SEQ ID NO: 1134 - DNA, 762 bp, Pseudomonas putida GB-1
  CDS (1)..(762): transl_table=11
atgagcatgaccttttctggccaggtagccctggtgactggcgctgccgccggtattggccgggcaaccgccctggctttcgcccgcgagggcctgaaggtggtggtggccgaccttgacccggtcggcggcgaagccaccgtggcgctgatccacgcggtgggcggcgaggcgcttttcattgcctgcgacgttacccgcgacagcgaggtgcgccagttgcacgagcgcctgatagccgcctatggtcggctggactatgcctacaacaatgccgggatcgaaatcgagcaacaccggctggccgaaggcagcgaggcggagttcgatgccatcatgggcgtgaacgtgaagggtgtgtggttgtgcatgaagtaccaactgcccttgctgttggcccagggcggtggggtgatcgtcaacaccgcttcggtggcggggctgggggcggcgccgaagatgagcatctacagcgccagcaagcatgcggtgatcggtttgaccaagtcggcggccatcgagtacgccaagaagggcgtccgcgtgaacgctgtgtgcccggcggtgatcgacaccgacatgttccgccgtgcctacgaggccgacccgcgcaaggccgagttcgccgccgccatgcacccggtggggcgcattggcaaggttgaggaaatcgccagcgcggtgctgtacctgtgtagcgacggtgcggcgtttaccaccgggcattgcctgacggtcgatggtggggctacggcgatctga

SEQ ID NO: 1135 - protein, 253 aa, Pseudomonas putida GB-1
MSMTFSGQVALVTGAAAGIGRATALAFAREGLKVVVADLDPVGGEATVALIHAVGGEALFIACDVTRDSEVRQLHERLIAAYGRLDYAYNNAGIEIEQHRLAEGSEAEFDAIMGVNVKGVWLCMKYQLPLLLAQGGGVIVNTASVAGLGAAPKMSIYSASKHAVIGLTKSAAIEYAKKGVRVNAVCPAVIDTDMFRRAYEADPRKAEFAAAMHPVGRIGKVEEIASAVLYLCSDGAAFTTGHCLTVDGGATAI

SEQ ID NO: 1136 - DNA, 768 bp, Cenarchaeum symbiosum
  CDS (1)..(768): transl_table=11
atgataatcaccggcgcatccagcggaataggcgaggctgccgcaggcgagtttgccggcaagggggcctctgtagtgctggtggctagaaacaaggataagctgtacagggccgaacagtccatgcaggtaagcggagacaggacgcttgcagtacaatgcgacgtctcgaagaagaaagaggttgcagagatggcccgcctggtagaggagaaattcggcacgccggatatactggtgaataacgcgggctttgccgtctacgggcgggtccgggatctttccatcgaggatatcgaggcccagatggctacaaactatacgggcatggtatactgtacaaaggcctttctctccggcatgctggaccgcggctcgggccatatcgtcaacgtggcatctgctgctgcaagctttggtctgccggggatagccgcgtacagcgcgtcaaagtttgcaatgctaggcttctccgagggtcttgggcacgagcttgtgggaacaggcgtgggcataacggtagtcagcccgataggtgtcaagacatcgttctttgacggcccgtcgttctctaaaatgcgcggccggccgccactctcactgagccctaaaacagtcgctcgggcgatagtcggggcggcatcgtcgcgcaggcgcgagatcatggtgccgtttgcaacaaggggcgcggtgtgggcaaagcatacaatcccgtatgtggtaaacccggcagtcggctctatcttccgcagggcgctgcgggactag

SEQ ID NO: 1137 - protein, 255 aa, Cenarchaeum symbiosum
MIITGASSGIGEAAAGEFAGKGASVVLVARNKDKLYRAEQSMQVSGDRTLAVQCDVSKKKEVAEMARLVEEKFGTPDILVNNAGFAVYGRVRDLSIEDIEAQMATNYTGMVYCTKAFLSGMLDRGSGHIVNVASAAASFGLPGIAAYSASKFAMLGFSEGLGHELVGTGVGITVVSPIGVKTSFFDGPSFSKMRGRPPLSLSPKTVARAIVGAASSRRREIMVPFATRGAVWAKHTIPYVVNPAVGSIFRRALRD

SEQ ID NO: 1138 - DNA, 783 bp, Oryza sativa subsp
  CDS (1)..(783)
atggacggcaaggtggccatcgtgaccggcggcgcgagcggcatcggcgaggcggcggcgcggctgttcgcgtcgtgcggcgcgacggtggtcatcgccgacgtccaggacgagctgggcgaggcggtggcggcgtcggtggcggggggcgggtgccggtacgtgcggtgcgacgtgacggacgaggcgcaggtggaggcggcggtggccgccgcggtggcggagcacgggcggctcgacgtgatggtgagcaacgccggcgtgctgctcccgacggggcccgtcgtggacatggacctcgcggctctggaccgggtgatgtcggtgaacttccgcggcgcggcggcgtgcgtgaagcacgcggcgcgcgccatggtgtcgcgcggcacccgcggcgccatcgtgtgcacggcgagcgtggcgtcgtgccagggcgggttcgggccggcggcgtacacggcgtcgaagcacgcggtgctggggctggtgcgcgcggcggccggcgagctcgggcggcacggcgtgcgcgtgaactgcgtgtcccccggcggcgtggcgacgccgctgagctgcgggctgacggggatgagccccgaggagatggaggcggcggcggagccccacaacgtgctccgcgggaaggtgctcaaggcggcggacgtcgcggaggccatgctcttcctcgcctccgaccaggccgccttcgtcagcggccacaacctcgtcgtcgacggcgccaccaccgccgtcaactacgccgtgctccagtccgtcggcctgtga

SEQ ID NO: 1139 - protein, 260 aa, Oryza sativa subsp
MDGKVAIVTGGASGIGEAAARLFASCGATVVIADVQDELGEAVAASVAGGGCRYVRCDVTDEAQVEAAVAAAVAEHGRLDVMVSNAGVLLPTGPVVDMDLAALDRVMSVNFRGAAACVKHAARAMVSRGTRGAIVCTASVASCQGGFGPAAYTASKHAVLGLVRAAAGELGRHGVRVNCVSPGGVATPLSCGLTGMSPEEMEAAAEPHNVLRGKVLKAADVAEAMLFLASDQAAFVSGHNLVVDGATTAVNYAVLQSVGL

SEQ ID NO: 1140 - DNA, 771 bp, Streptomyces capreolus
  CDS (1)..(771): transl_table=11
gtgaccgcgccgacggagccggcggggcgggccgaccggccggtggcgctggtcaccggcgcctccggcgcgatcggcacggcgatagccaccgcgctggcggccgccggtttcgatctgggggtccaccaccacaccgacgccgccggcgggcgccgcaccgccgcggccgccgcggcactcggcgcgcgcgccgtgcccgtccagggcgacctggcccgggagaaggcgtgcgtcgcggcggtggagcgcgtggtggagtcgttcgggcggctggacgtcctggtcgccaacgccggccggcaccgcgacgcgctgctgctgcgcctgtcggaggacgactgggaccggcaccaggaggcgaacctcaagagcgcctacctgtgcgtgcgcgccgcgcttccgtcgatgctgcggcagcgtcacggccgcatcgtgctggtctcctccgtggcgggcctggtcggctcgcccggccaggccgcctactccgccgccaaggcggggctggcgggcctggcccgcacggtcgcccacgagcacggccgctacggcgtcacctgcaactgcgtcgcgcccggcctgatcgcggacacgccctcccacgacgggctgtccgaggcgcgacggcggcagatcctcgaccggactgcggcacagcgggcgggccgccccgaggaggtagccgccgcggtcgccttcctcagctccccggccgcggcctacgtcaccgggcaggtgctcgcggtcgacggcggcatgaccgcctga

SEQ ID NO: 1141 - protein, 256 aa, Streptomyces capreolus
MTAPTEPAGRADRPVALVTGASGAIGTAIATALAAAGFDLGVHHHTDAAGGRRTAAAAAALGARAVPVQGDLAREKACVAAVERVVESFGRLDVLVANAGRHRDALLLRLSEDDWDRHQEANLKSAYLCVRAALPSMLRQRHGRIVLVSSVAGLVGSPGQAAYSAAKAGLAGLARTVAHEHGRYGVTCNCVAPGLIADTPSHDGLSEARRRQILDRTAAQRAGRPEEVAAAVAFLSSPAAAYVTGQVLAVDGGMTA

SEQ ID NO: 1142 - DNA, 1002 bp, Pinus taeda
  CDS (1)..(1002)
atgggtatgtgctcccttgtgaaaacatggtggaggtggggttgggatgtggcgttatcggtccccctgttgctcatgcttccttcagcaatttctttctgtaaactctttcgaatgtttatcatcacccgcccagagcgcgtacggggaaaggtagttctcatcacaggagcgtcttcgggtataggccagcacatggcgtgggagtacgcgaagagaggtgcaaatctggtggtggtggcaaggcggcggaatcgactggaggaagtagccaaggaatgcaaggcttacggtgcacagtatgctgttgtttgtccggctgatttaaccaaaccccaagattgcaagaggattgtggaattcacagtttccacctttggacggttggacgtgctagtcaacaatgctggtactgctggagggtcgttatttgaagaatatgagaatgccgccgaatataagagaattgtggatattgatttctggggacatgtcaacacaacccattttgctcttgaacaccttcagcgcagaaggggccagatagtggtcattagttccatgattgcatttcttcccttcccatttacaacagtttacagtgcagccaaaggagcactgttgaacttcttcgagacacttaggattgagcttatcagcaaatctgtaacagttactattgcgtctcctggttttatacagtctgaattaacatccagagaaggaccgggaaagctgccatggtggttccccatggcgagaacagaggatgctgcacgagaaattgttgaagctgcattgaggaaagagcgagacgtgataactcctaggtggtattcatccttgctgtggttcagaatactatgccctgaaattttggaatgggtgcccagagtattcatcttgggacaagcccctacaagaggagtagagattgtctgcaattctgtttttgggaaatttaacacacacacactctttagaacattgaaacttgcctag

SEQ ID NO: 1143 - protein, 333 aa, Pinus taeda
MGMCSLVKTWWRWGWDVALSVPLLLMLPSAISFCKLFRMFIITRPERVRGKVVLITGASSGIGQHMAWEYAKRGANLVVVARRRNRLEEVAKECKAYGAQYAVVCPADLTKPQDCKRIVEFTVSTFGRLDVLVNNAGTAGGSLFEEYENAAEYKRIVDIDFWGHVNTTHFALEHLQRRRGQIVVISSMIAFLPFPFTTVYSAAKGALLNFFETLRIELISKSVTVTIASPGFIQSELTSREGPGKLPWWFPMARTEDAAREIVEAALRKERDVITPRWYSSLLWFRILCPEILEWVPRVFILGQAPTRGVEIVCNSVFGKFNTHTLFRTLKLA

SEQ ID NO: 1144 - DNA, 792 bp, Phaeosphaeria nodorum
  CDS (1)..(792)
atggcccaacgcctcaagggcaagacgattgtaatcacgggcgcttcgagtggaattggacgatctacagccgtcgaattcgcaaagacgcagccagacgatctcaagctcatcctcactgcacgtcgggaagacacgctcaaggaagtcgccaaagaaattgaaagttttgccaagggcgtcaaggtcctgcctgtgaagctggatgtcagcaatatatccgaagttgaggcttttgttgggaagttaccagcggagttcaaggatgtggatgttctggtaaataatgctggcctagtcaaaggcgtcgcccaagccccctccatctcccccgccgacatcaacacaatgttctccacaaacgtcaccggcctaatcgccatgacccaagccatcctgcccatcctcaaagccaaagacgccggcgacatcatcaatatcggtagcatcgccggccgcgagccctaccaaggcggctccatctactgcgcaacaaaagccgctgtccggtccttcacggacgccatgcgccgcgaactcatcgccacgcgcgtccgcgtcatcgagatcgatccggggcaggtggagacggagtttagcgtcgtgcggtttggcggggataaggacaaggcgaagaaggtgtatgagggcgtggagccgctgacgcccgaggatattgccgaaatagtggtttttgcggcgggcagaagggacaatgtcgtgctcgcggatacgctggtgtttccgaatcatcaggcggcggcgacagttatgcacaggaagacgcagtga

SEQ ID NO: 1145 - protein, 263 aa, Phaeosphaeria nodorum
MAQRLKGKTIVITGASSGIGRSTAVEFAKTQPDDLKLILTARREDTLKEVAKEIESFAKGVKVLPVKLDVSNISEVEAFVGKLPAEFKDVDVLVNNAGLVKGVAQAPSISPADINTMFSTNVTGLIAMTQAILPILKAKDAGDIINIGSIAGREPYQGGSIYCATKAAVRSFTDAMRRELIATRVRVIEIDPGQVETEFSVVRFGGDKDKAKKVYEGVEPLTPEDIAEIVVFAAGRRDNVVLADTLVFPNHQAAATVMHRKTQ

SEQ ID NO: 1146 - DNA, 855 bp, Phaeosphaeria nodorum
  CDS (1)..(855)
atgagttccgcagaatcagacgtccagctgcaagacttcggcaatatcttcagcttgaagggcaaagtcgcagttgtaagcggtggatcgcgaggcttaggactgcacgcagcctctggactcctccaagcaggctgctccaaggtcttcatcacatcccgtaaagccagtgcatgcgacgaggctgtcgcagccctcaacgctctaccgtgcgaaggcaaagccatctcgataccagccgatagctccaaagtctctgagattgagcgattggtgaaggaagtcgagaagcacaccgaccacgttgatatcctcttcgcaaacgcaggcgcaacatggggcagcgaattcgagaaggtagacgagaagaatggctgggataaggtcatggatttgaacgtcaagggcgttttctttacgattcagaaattcacacctcttttgtcgaagaacgcctctgtcgcagagacctcgcgcgtcataattacgggttcagtcgccggcatagcaacagggtcgctaggcgaatcgggcgcatactcgtacgcggcttccaaagccgctgtgctgcatctcgcccgcaatctcgccatcgaacttggcccaaagcacattctagtgaacagcatagcgccgggattcttcatgagcaagatggcggcgattttgatggagcggagcggcgggcaggacgcgttggataaggcgaacccgaatggccgggttggaagaccggaggacgtagcggctgccgttgtgtttttaagttcgagagcgggtgggcatgttaatggagatacgcttgtgctggatgggggcaagatttggggaagcaataggctggagagactctag

SEQ ID NO: 1147 - protein, 284 aa, Phaeosphaeria nodorum
MSSAESDVQLQDFGNIFSLKGKVAVVSGGSRGLGLHAASGLLQAGCSKVFITSRKASACDEAVAALNALPCEGKAISIPADSSKVSEIERLVKEVEKHTDHVDILFANAGATWGSEFEKVDEKNGWDKVMDLNVKGVFFTIQKFTPLLSKNASVAETSRVIITGSVAGIATGSLGESGAYSYAASKAAVLHLARNLAIELGPKHILVNSIAPGFFMSKMAAILMERSGGQDALDKANPNGRVGRPEDVAAAVVFLSSRAGGHVNGDTLVLDGGKIWGSNRLERL

SEQ ID NO: 1148 - DNA, 762 bp, Streptomyces argillaceus
  CDS (1)..(762): transl_table=11
atggacatgggactgacaggccgcagggtgctcgtcacgggcgggtcctccggaatcggtgcggccgtcgcgcgcgcctacgcggacgagggggcgcgggtcgccctcacctaccgcggcggcgacgaggcggccgaacggctcgcccgtgaactcggcgcgggccggcacgcggcaatggcggtgcggtactccctcggggagccggacaccgtggagtcggccgtcgccacggtgaccgaacgctggggcggggtggacgtgctcgtcgcgaacgcggtgcgctgggctccccgccgggcgcccggcacccggttcgaggaggtcgcgtccggggactggcggggtttcctcgacgacaacctggcgccgaccctgcgtaccgtgcagctggtggtggccgggatgcgggcgcggtcctggggcaggatcgtgctcatctcctcgcatgtggccctcgacggccaccgcgggcaggagttctacggcgccgccaagtcggcgctgcacggcttcgcccgcagtctggcctgggacgtgggccgtgacggtgtcctggtgaacgtcgtgtgcccggggctgaccaccaccgagcgcgtgctcaccgggctgcccgacgagatccgcgagcgtgagctcggctcgacccccaccggtcggctcagcagccccgaggacatcgccggcgcggtgctcttcctgggctcggcggccaacgccaacacgacgggccagaccctcacggtctccggcggccgctga

SEQ ID NO: 1149 - protein, 253 aa, Streptomyces argillaceus
MDMGLTGRRVLVTGGSSGIGAAVARAYADEGARVALTYRGGDEAAERLARELGAGRHAAMAVRYSLGEPDTVESAVATVTERWGGVDVLVANAVRWAPRRAPGTRFEEVASGDWRGFLDDNLAPTLRTVQLVVAGMRARSWGRIVLISSHVALDGHRGQEFYGAAKSALHGFARSLAWDVGRDGVLVNVVCPGLTTTERVLTGLPDEIRERELGSTPTGRLSSPEDIAGAVLFLGSAANANTTGQTLTVSGGR

SEQ ID NO: 1150 - DNA, 801 bp, Streptomyces griseus
  CDS (1)..(801): transl_table=11
atgctcacgcccggccggagcggctcgcccggccgagtcgggcacgggagggagcacgcgatggagctgaggcgcagtgcgctggtgacgggtggttcgcgcggcatcggccgcgcggtcgcggtacggctggcacaggacgggtacgacatcggcttctgctcgcgttccgccgacgaggcggcgctggagacggcccggctggtcacctcggccggtgctcgggcgcaccacgtggtgtgcgacgtcaccgacgccgacgccgttcggaccttcgtcgcggaggcggaggagaagctcggcccggcgtacgcggtggtcaactccgcgggggtgctgcgggaccggccgatggccctgatggcggccagggactggcaggacgtggtcggtacgagtctggacggggccttccacgtctgccgggcggtcgtgcgcgggctgctcacccgcagggcgggggcgctggtgaacgtctcctcggtcatcggggtgtacggcaacgcgggacagaccaactacgccgccgccaagggcggactgaacggcctgacccgtgccctggccaaggaggtcgccccgtacggcgtccgggtcaacgcggtggcgcccgggttcatcgagacggagatgctcgacggcatgacggccaaggcgcgcgaggcggccctcgggaagatcgccatggcgcggttcggcagcgccgagtccgtcgccgcgctcgtcgcgttcctcgtctccgacgccgccgactacatcaccggccaggtggtgcagatcgacggcgggatcgccctgtga

SEQ ID NO: 1151 - protein, 266 aa, Streptomyces griseus
MLTPGRSGSPGRVGHGREHAMELRRSALVTGGSRGIGRAVAVRLAQDGYDIGFCSRSADEAALETARLVTSAGARAHHVVCDVTDADAVRTFVAEAEEKLGPAYAVVNSAGVLRDRPMALMAARDWQDVVGTSLDGAFHVCRAVVRGLLTRRAGALVNVSSVIGVYGNAGQTNYAAAKGGLNGLTRALAKEVAPYGVRVNAVAPGFIETEMLDGMTAKAREAALGKIAMARFGSAESVAALVAFLVSDAADYITGQVVQIDGGIAL

SEQ ID NO: 1152 - DNA, 1023 bp, Oryza sativa subsp
  CDS (1)..(1023)
atgcacgtggggctaacgctggtgctgctcgtctacctccccatcgccttcgcctgccgcgccctgggcaggctgctcgtcaggcccttcgtctccggcgaggacctccgcggcaaggtcgtgctcgtcaccggcgcctcctccggcatcggcgagcatctagtgtacgagtacgcgaagaagggggcgtgcgtggcgctgacggcgaggacggagatcgccctgcgcgcagtggcgaagacggcgcgcgacctcggcgcgccggacgtgctcgtcgtgccggcggacatcaccaaggtcgacgacgccaagcgcgccgtcgaggagaccgtcgcccacttcggcaaattgaatcacctggtggccaacgcagggatctggtccagttgcttcttcgaagaaattaccaacataaccgccttccacaacgtgattgatctcaacttctggggcgccgtgtacccgacctacttcgcgttgccgtacctgaaagccagccgtggcaacatcgtcgtcacctcctctgtcgccggcagggtcccgacggccaggatgagcttctacaacgcgagtaagggcgcggtgatcaggttctacgaaaccctaagggctgagctgggctcacatgtccgtgtcaccattctcaccccgggctatgtcgtctccaacctcaccatgggcaaaggcatccagaaggacggccatgtcggcattgacgaggaggctcgcgacatcaatgtggggccgctgccggtggggaagacggagacgctggcgaaggtggtggtggcggcggtgcggcggggcgactactacgtgacatggcccgggtggtactggccgttccacatggtgatgtgcacggcgccggagctcgtcgactggttctcccggaccttctacgtctccaagtccagcgaccacgatggcgacgccctcagcaagaagatcctcgaggccgtcggcggcaagaagttcctctaccccaagaccatccgcagccatgccatcgccgctagctaa

SEQ ID NO: 1153 - protein, 340 aa, Oryza sativa subsp
MHVGLTLVLLVYLPIAFACRALGRLLVRPFVSGEDLRGKVVLVTGASSGIGEHLVYEYAKKGACVALTARTEIALRAVAKTARDLGAPDVLVVPADITKVDDAKRAVEETVAHFGKLNHLVANAGIWSSCFFEEITNITAFHNVIDLNFWGAVYPTYFALPYLKASRGNIVVTSSVAGRVPTARMSFYNASKGAVIRFYETLRAELGSHVRVTILTPGYVVSNLTMGKGIQKDGHVGIDEEARDINVGPLPVGKTETLAKVVVAAVRRGDYYVTWPGWYWPFHMVMCTAPELVDWFSRTFYVSKSSDHDGDALSKKILEAVGGKKFLYPKTIRSHAIAAS

SEQ ID NO: 1154 - DNA, 939 bp, Streptomyces griseus
  CDS (1)..(939): transl_table=11
atgcaccacagccccgacgggtcccacggccgccgtgttcccggcggccccctgcacgggcgggtcgcggtcgtcaccggtgccgctcgcggcgtcggcgaaggcctcgcccgcagcctctccgacgccggaatgcacgtggccctgctcggccgggaaagggcgaccctgcgggagaccgccgcgtccctctccggccccagcatctgcgtcgagtgcgacatcaccgaccgcacggcgctcgcggacgcggcccgccgcgtggaaacggggctcgggccggcgagcgtggtcgtggccaacgccgggatcgcggtgagcggcccgttcgaccgcaccgacggcgagctctggcagcgcgtcatcgacgtcaatctcaccggctccgcgaacaccgcccgcgccttcctcccccagctcaccgccacccgcgggtacttcctccagatcgcctccaccgcggcgttcggagccgctcccatgatgagcgcctactgcgcctccaaggcgggggccgagtcgttcgccctggcgctgcgcggtgaggtggagccggacggcgtccgggtcggcatcgcctatctgcactggaccggcaccgacatgctcaccggcatcgacgacgatcccgtcctcgaagcgctgcgccgcaatcagccccgccccgcccgccgcgtccacagctccgcccaggtcgcccagtggctgacccggggcatcgcccgccgcagccgcaacatctacgccccgccctgcgtccgctggtgccagccccttcggccgttgttcccggtcctcgtcgcccgggcggcccgccgcgaactgcgcgcccgccccagccgggaactgtccgcgcccgtcgaggtcctgggggccggagggcgagccgactggagctcctaccgggcctcccgctccggccctccggcagacgggtag

SEQ ID NO: 1155 - protein, 312 aa, Streptomyces griseus
MHHSPDGSHGRRVPGGPLHGRVAVVTGAARGVGEGLARSLSDAGMHVALLGRERATLRETAASLSGPSICVECDITDRTALADAARRVETGLGPASVVVANAGIAVSGPFDRTDGELWQRVIDVNLTGSANTARAFLPQLTATRGYFLQIASTAAFGAAPMMSAYCASKAGAESFALALRGEVEPDGVRVGIAYLHWTGTDMLTGIDDDPVLEALRRNQPRPARRVHSSAQVAQWLTRGIARRSRNIYAPPCVRWCQPLRPLFPVLVARAARRELRARPSRELSAPVEVLGAGGRADWSSYRASRSGPPADG

SEQ ID NO: 1156 - DNA, 804 bp, Streptomyces antibioticus
  CDS (1)..(804): transl_table=11
atgactcgtagcgtctccgcatccggcccgcttcagggcaggatcgcgctggtgacaggcggtagccgggggatcggggccgcgacggccaccaccctcgccgggctcggggccgacgtcgtgctcacataccgaagctcgctggacgaggccaaggccgtggcggccgcgtgcgaggaaaaaggtgtaaaggccacggtgctcagggccgacctggacgcggccgacggcgccgaggaactggtcaccgccgtgcgggaacgggtggaccacctcgacgtcgtcgtcagcaacgcctgcgcctcgtacccgcgcgtgccgctggccggcatggacccgaccgcgctcggcgacaaggtccgcaacgacgtcgtcctgctgcaccggctcaccaccgccttcgtgcccgcgatgcgggagcgggggtacggccggctcgtcgtcatctccagcggctcgtcctggggcccgaccgcgcccggcctcgccgcgcacggagtgacgaaggccgcgctggagggctacgtccggtacgcggccgacgagttcggcgccggtggcgtgaccgtcaacggcctcgccctgggcttcgtcctcaccgacgcctcctcggtggtcccgcagccggcgcgcgacgcgctggccaacgccacgccggccgggcggctcggcaccccgcaggacatcgccgacgccgtgtccctgctggcgcgccccgagtcggagtggatcaacggggcgaccctccccgtgaccggcggcctcaactacccgctgaacctgtcccgcgtccgcggccactga

SEQ ID NO: 1157 - protein, 267 aa, Streptomyces antibioticus
MTRSVSASGPLQGRIALVTGGSRGIGAATATTLAGLGADVVLTYRSSLDEAKAVAAACEEKGVKATVLRADLDAADGAEELVTAVRERVDHLDVVVSNACASYPRVPLAGMDPTALGDKVRNDVVLLHRLTTAFVPAMRERGYGRLVVISSGSSWGPTAPGLAAHGVTKAALEGYVRYAADEFGAGGVTVNGLALGFVLTDASSVVPQPARDALANATPAGRLGTPQDIADAVSLLARPESEWINGATLPVTGGLNYPLNLSRVRGH

SEQ ID NO: 1158 - DNA, 762 bp, Streptomyces griseus subsp
  CDS (1)..(762): transl_table=11
atggacttgggaatcgccggaaagaccgcgctgatcaccggcgcctcatcgggcatcggtacggccaccgcccgcgcgctggccgccgagggcgcccgggtggtcctcacctaccgcacaggggagaggcgggcccgcgaactcgcggacgagctgggcgcggaccgcgatctggcctgtgccgtcccgtacgacctgggcgacccctcgtccgtcgacgccgccgtccgggccgccgagaaccgttggggaggtgtggacatcctcgtcgccaacgcggtgcggcgcggcccccggcaaccgcccggcacccacatcgaggacgtccccgcacagcagtggcggcaacttctccgggacaacctggaacagaccctgcgcacggtccagctggtcctgcccggcatgcgcgcccgtacctggggccgggtggcgctgctgtcctcgcaccgcacccgcgacggggcaccggggcaggagttctacgccgccggcaaggccgccctgcacggcttcgcgcgcagcctggcctgggacgcggggcccgacggtgtcttcgtcaacctcgtcagcccgggcctgacccgcaccgtgggagtgctgtccgacctgccggcggaggtacgcgagcgggagctgcagcgcaccccgagcgggcggctgagcacacccgaggacgtggcggcggcgatcgcgttcctctgcgccgaggcgaacggcaacatcaacggcgccgtgatcgacgtctcgggcggccgctga

SEQ ID NO: 1159 - protein, 253 aa, Streptomyces griseus subsp
MDLGIAGKTALITGASSGIGTATARALAAEGARVVLTYRTGERRARELADELGADRDLACAVPYDLGDPSSVDAAVRAAENRWGGVDILVANAVRRGPRQPPGTHIEDVPAQQWRQLLRDNLEQTLRTVQLVLPGMRARTWGRVALLSSHRTRDGAPGQEFYAAGKAALHGFARSLAWDAGPDGVFVNLVSPGLTRTVGVLSDLPAEVRERELQRTPSGRLSTPEDVAAAIAFLCAEANGNINGAVIDVSGGR

SEQ ID NO: 1160 - DNA, 774 bp, Streptomyces sp
  CDS (1)..(774): transl_table=11
atgaagacaggactgacggacaaggcggtgctcgtcaccggcgcctcgcgcggcatcgggcgggccacggccctcgcctacgcggcggagggcgcccgggtcgcgatcacctaccactccgacgaggccggggcgaaggagacggccgagcgggtcgccgccgccgggggcaccccccacgtcgtccgctacgacctcggggacgaggactccgtgcgctccgccgtcgcctcggtcggcgcggagtggggcggggtcgacgtcctcgtggccggcgcggtcgagtggggggaggcgattccgcgccccggacggaagatgcccgccttcgaggaggtgccgcccgcgcagtggcaacgggtcctgcgcacctcggtggacggcgtcttccacaccgtgcaggcggtgctgcccctcatgcgcgaccgggagtggggccgcatcgtggtgctcggcgccgggctcgcggagaccggtctgccgggggcgtccgcgtacggggccgcgaaggccgccctgcacgggctggtgcgcagcctggcctgggaggtcggccccgccgggatcctggtcaacgaggtcgtgcccggccagacgctcaccgagaacgtcctcgcacacgcctcgcccgccttcctggagaacaaggccgcctccctgccctcgggccgcatgaacacgcccgaggacgtcgcgcgggcgatcgtcttcctcggctccgccgccaacgggaacatccacggcgaggccctgcgcgtcaccggcggcctgtga

SEQ ID NO: 1161 - protein, 257 aa, Streptomyces sp
MKTGLTDKAVLVTGASRGIGRATALAYAAEGARVAITYHSDEAGAKETAERVAAAGGTPHVVRYDLGDEDSVRSAVASVGAEWGGVDVLVAGAVEWGEAIPRPGRKMPAFEEVPPAQWQRVLRTSVDGVFHTVQAVLPLMRDREWGRIVVLGAGLAETGLPGASAYGAAKAALHGLVRSLAWEVGPAGILVNEVVPGQTLTENVLAHASPAFLENKAASLPSGRMNTPEDVARAIVFLGSAANGNIHGEALRVTGGL

SEQ ID NO: 1162 - DNA, 1026 bp, Actinosynnema pretiosum subsp
  CDS (1)..(1026): transl_table=11
atgcccaggaggttggcggagcaggtcgtcgtcgtggtgggcgcgtcgtcggggatcgggcgggtcaccgcgctgcggttcgcggcggcgggggcgcgcgtggtgtgcgcggcgcgcaacacccgcgccctggacgggctggtcgaggaggtccggggcgcgggtgggcgggcggtcgcggtgacggcggacatcgccgacgaggcggccgtgcgcgcggtcgccgacgtggcggtggagcggttcgggcgggtggacacctgggtcaacgcggccgggatcggggtgtacgggcgggtggaggacacgcccgccggggagttcgaccgggtgatgcgggtcaactacctcgggcacgtgcacggggccaaggccgcgctgcccgcgctgcgccgggcgggcgggggagtgctgatcggggtcgcgtccgtgctcggcctgcgctcggctccgctccaggccccgtacgcggccagcaaggcggcggtgcgggcgttctacgacgcgctgcgggtggagctggcccacgacggcgagtcgatcgcggtcaccgccgtgcttcccgccgcgatcaacagcccgttcttcgagcactgccgcagccgcgtcggctcgctgcccaagccgccgcccccggtgtacgcgccggagctggtcgccgaggccgtgctgcgcgccgccgagcgcccccgccgcgaggtgccggtgggcgacgctgcgctcgcgttctacctggggcagcggctgttcccggcgctcaccgacgcgctgatgtcggtgcgcgcggtcggccggtcggggatgcggtccgagctgccggacaacggggtggacaacgtggactcgccggtggacgaggacgggcgggtgcacgggtcctaccccggccgggtgctggactccagcccggtgacggcgctgctggcccgcgtgcccaggccgggggagctggcgacctcgctggtgagcggggcgcaccgggtgggcggggcggtgcggggcgggctgcgcgcggcccggtcctga

SEQ ID NO: 1163 - protein, 341 aa, Actinosynnema pretiosum subsp
MPRRLAEQVVVVVGASSGIGRVTALRFAAAGARVVCAARNTRALDGLVEEVRGAGGRAVAVTADIADEAAVRAVADVAVERFGRVDTWVNAAGIGVYGRVEDTPAGEFDRVMRVNYLGHVHGAKAALPALRRAGGGVLIGVASVLGLRSAPLQAPYAASKAAVRAFYDALRVELAHDGESIAVTAVLPAAINSPFFEHCRSRVGSLPKPPPPVYAPELVAEAVLRAAERPRREVPVGDAALAFYLGQRLFPALTDALMSVRAVGRSGMRSELPDNGVDNVDSPVDEDGRVHGSYPGRVLDSSPVTALLARVPRPGELATSLVSGAHRVGGAVRGGLRAARS

SEQ ID NO: 1164 - DNA, 858 bp, Streptomyces aureofaciens
  CDS (1)..(858): transl_table=11
atgagcgacaggaccgaacgcgtctggctgatcaccggggcttcccggggtctgggccgggccatagccgaggtggtcctggaggccggcgacaccgtggtggccacggcccgcagcatcccggccctggacgggctcgtggagcgcttcggcgagcgggtcgtccccgtggcgctcgacgtcaccgaccgcgcggcggtgctggccgcggtcgccgaggcggccgagcggaccgggcggatcgacgtgctcctcaacaacgccggctacggtctggccggcgccgtggaggaggtgaacgagacccaggtccgtgaccagttcgacgtgaacttcttcggcgcgctctgggtgacccaggccgtcctgccggtgatgcgccgccagggcagcggccacctgctgcagatgtcgagcatcgcgggcgtcaccacgtaccccaacctcggcctgtactgcgcgagcaagtgggccctggaagcggtcagcgagaccctggcccaggaggtcgcgggcttcggcgtgaaggtcaccctggtcgaggcgggggagttccgcaccgactggagtgcgggcagcatggtccgcgccacgcccaagttcgcatacgacgaggtcctcgccaagcgccggcacggtctgtcgggggcctacgcacacctccagccgggggatccgcggaaggcgggcgaggccctgctgaagctgaccgacgaggcggagccgccactgcgcgtcctgctcggcgagggggccgcggacctggcgccgaacgtgctgcgggcgcggctggccggctgggaggaatgggacgccctggcccgcaccaccgacttccccgcggagagcgggccgtga

SEQ ID NO: 1165 - protein, 285 aa, Streptomyces aureofaciens
MSDRTERVWLITGASRGLGRAIAEVVLEAGDTVVATARSIPALDGLVERFGERVVPVALDVTDRAAVLAAVAEAAERTGRIDVLLNNAGYGLAGAVEEVNETQVRDQFDVNFFGALWVTQAVLPVMRRQGSGHLLQMSSIAGVTTYPNLGLYCASKWALEAVSETLAQEVAGFGVKVTLVEAGEFRTDWSAGSMVRATPKFAYDEVLAKRRHGLSGAYAHLQPGDPRKAGEALLKLTDEAEPPLRVLLGEGAADLAPNVLRARLAGWEEWDALARTTDFPAESGP

SEQ ID NO: 1166 - DNA, 753 bp, Escherichia coli
  CDS (1)..(753): transl_table=11
atgatgaatcactctgtgccctctatgaatactccccttaatggcaaagttgcagctatcactggcgctgcgtcaggtattggcctgcaatgtgcaaaaacgctgctcgatgcaggagcaaaggtagtattgattgaccgggaaggcgacaaactgcacaagattgtcgctgagttaggcgaaaacgcgtacgcgctgcaactcgatctcttcaataatcagcaagtcgataacatgctggcggacattatcgaactggcgggtgggctggatatttttcatgccaatgcaggcgcttatattggcggcccagtggctgaaggtgatccagatgtctgggatcgtgtgttaaatctgaatataaatgcggcgtttcgctgtgtccgtgcagtcctgccgcatatgattgcgcagaggtcgggcgatataatttttaccagttccatcgcgggcgtcgttccggttatctgggaaccgatctacaccgcgtccaaatttgccgttcaggcattcgtacacactacccgccgccaggtttctcaatatggcgtgcgtgtgggtgcggtgctgccaggaccagtagtcactgccctgcttgatgactggccaaaagccaaaatggaagaagccctggcaaatggtagcctgatgcaaccgattgaagtggcggaatcagtattgtttatggtgacccgctcgaaaaatgtcaccgtgcgagatttagtgatcctgcctggcagtgtcgatctgtaa

SEQ ID NO: 1167 - protein, 250 aa, Escherichia coli
MMNHSVPSMNTPLNGKVAAITGAASGIGLQCAKTLLDAGAKVVLIDREGDKLHKIVAELGENAYALQLDLFNNQQVDNMLADIIELAGGLDIFHANAGAYIGGPVAEGDPDVWDRVLNLNINAAFRCVRAVLPHMIAQRSGDIIFTSSIAGVVPVIWEPIYTASKFAVQAFVHTTRRQVSQYGVRVGAVLPGPVVTALLDDWPKAKMEEALANGSLMQPIEVAESVLFMVTRSKNVTVRDLVILPGSVDL

SEQ ID NO: 1168 - DNA, 777 bp, Streptomyces rishiriensis
  CDS (1)..(777): transl_table=11
atgactgggcccgccgcatcagcggtggcttgcgagccggtcgcgatggtcaccggagccggccggggcatcggcgctgccacggccgagcgccttgccgcggagggcatggcggtgatcgtcgtggaccgcgtggaacaggacaccacagccaccgtctcggccatccgtgcggccggcggacgggccagcgggctcggctgtgacgtctccgtagctcaggcggtgacggccaccgtcgcctcggccgtcgaggagttcggtcacctcgacgtgctggtgaactgcgccgggatcacccaggatcggctgctgctcaccatgagcgaccaggagtgggacagggtcctggacgtcaacctcggcggcagcatgcgatgttcgttcgcggtcgggaggcacatgcgccggcaggggcacggccggatcatcaacttcagttctgttgccgcgcgcggcaatgccggtcagaccaactatgcgaccgcgaagggcgcgattgccgggttcacccgcacgctcgcggccgaattcggtccgcacggcgtgacggtcaactcgatcgcaccgggcttcgtggccacgccgatggtggcagagctgaccgaacggctcggcgtggatcgggacaccgtcctgctggaggcggcgatgtcctcggccgtgggccggatcgggacgcccgaggaaatcgccgcggtggtggcattcgtcacccggccggaatcgggctacctcaccggggagaccatccacgtcgaaggtggtcggcgatga

SEQ ID NO: 1169 - protein, 258 aa, Streptomyces rishiriensis
MTGPAASAVACEPVAMVTGAGRGIGAATAERLAAEGMAVIVVDRVEQDTTATVSAIRAAGGRASGLGCDVSVAQAVTATVASAVEEFGHLDVLVNCAGITQDRLLLTMSDQEWDRVLDVNLGGSMRCSFAVGRHMRRQGHGRIINFSSVAARGNAGQTNYATAKGAIAGFTRTLAAEFGPHGVTVNSIAPGFVATPMVAELTERLGVDRDTVLLEAAMSSAVGRIGTPEEIAAVVAFVTRPESGYLTGETIHVEGGRR

SEQ ID NO: 1170 - DNA, 789 bp, Streptomyces sphaeroides
  CDS (1)..(789): transl_table=11
atgacgagcccggccgatgcgaccaccgaagtcgctgtgtctcaggagtcggtcgccatggtcaccggagccggccggggcatcggcgcggccacggccgagcgcctcgccgccgagggcatggcggtgatcgtcgtggaccgcaccgaacaggacacccgggccacggtcgcggccattcgcacggccggcggacgggcccgcgggatcggctgtgacgtcgccgtggcccaggccgtgacggccgcggtcgccacggccgtcgaggagttcggccgcatcgacgtactggtgaactgcgccgggatcaaccgggaccggctgctgctcaccatgggcgatcaggagtgggacacggtcctggacgtcaacctcggcggcaccatgcgatgttcgttcgccgtcggccggcacatgcgccggcaggggcacggccggatcatcaacttcagctccgtggccgcgcgcggcaatgccggccagaccaactacgcgaccgccaaaggcgcgatcgccgggttcacccgtacgctcgcggccgaactgggcccgcacggcgtgacggtcaacgccatcgcaccgggcttcgtggccacgccgatggtggacgagctggccgaacggctcggcggggaccgggactcggtcatgtcggaggcggcgaagtcctcggcagtgggccggatcgggacgcccgaggaaatcgccgcgaccgtggtcttcgtcgcccggccggaatcgggctacctcaccggcgagaccgttcacgtcgacggcggtcggccatga

SEQ ID NO: 1171 - protein, 262 aa, Streptomyces sphaeroides
MTSPADATTEVAVSQESVAMVTGAGRGIGAATAERLAAEGMAVIVVDRTEQDTRATVAAIRTAGGRARGIGCDVAVAQAVTAAVATAVEEFGRIDVLVNCAGINRDRLLLTMGDQEWDTVLDVNLGGTMRCSFAVGRHMRRQGHGRIINFSSVAARGNAGQTNYATAKGAIAGFTRTLAAELGPHGVTVNAIAPGFVATPMVDELAERLGGDRDSVMSEAAKSSAVGRIGTPEEIAATVVFVARPESGYLTGETVHVDGGRP

SEQ ID NO: 1172 - DNA, 792 bp, Streptomyces coelicolor
  CDS (1)..(792): transl_table=11
atgagcaccaccggaaccacccccgccaccaccgggtacgccgccgagttcgccggccgtaccgccctcgtcaccggtgccgcctccggtatcggcctggccaccgcccgccggctcggcgccggcggcgcccgggtcgtcgtcgccgacttcaacgccgagggcgccgagaaggccgccgccgagctgcgggccggtggcgtcgaggccgccgcggtcgagctggacgtcacccgtccggagtccgtcgaggcggccgtcgggttcgccgtcgacacgttcggctcgctggacctcgccgtcaacaacgccggcatcggcggccccagcgccccgaccggcgagtacgacgtggcggcctaccagcgcgtcgtgcgcaccaacctcgacggcgtcttctactcgatgcgctacgaactgcccgccatcgaggcggccggcaagggcggctcgatcgtgaacgtcgcctccatcctcggctcggtcggcttcgccggctcccccgcctacgtcgccgccaagcacggcgtggtcgggctgacgaaggcggccgccgccgagtacgccgcccgcggcatccggatcaacgcggtcggtccgggcttcatcgacacccccctgctcaagaccatggacgaggccgcctacaagggctggtcgccctgcacccggccggccgcctcgggcgctccgaggaggtcgcggacgctgatcgccttcctgctgtccgaccgcgcgtccttcgtcgcgggcagctatcacctggtcgacggcgcctacaccgccgtctga

SEQ ID NO: 1173 - protein, 263 aa, Streptomyces coelicolor
MSTTGTTPATTGYAAEFAGRTALVTGAASGIGLATARRLGAGGARVVVADFNAEGAEKAAAELRAGGVEAAAVELDVTRPESVEAAVGFAVDTFGSLDLAVNNAGIGGPSAPTGEYDVAAYQRVVRTNLDGVFYSMRYELPAIEAAGKGGSIVNVASILGSVGFAGSPAYVAAKHGVVGLTKAAAAEYAARGIRINAVGPGFIDTPLLKTMDEAAYKGWSPCTRPAASGAPRRSRTLIAFLLSDRASFVAGSYHLVDGAYTAV

SEQ ID NO: 1174 - DNA, 831 bp, Streptomyces lividans
  CDS (1)..(831): transl_table=11
atgaacaaggtgtggctgatcaccggggcgagcagcggcttcgggcgggcgatcgccgaggcggccctggccgacggcgacgtcgtggtcggcgcggctcggcgccccgaggcgctggacgacctcgtggccgcgcacccggaccagatggaggcgctgcgcctggacgtcgccgacacggccgccgccggggacgccgtacgggacgtggtggcgcggcacggcagggtggacgtactggtcaacaacgcgggccgcacacacgtcggtgccctcgaggagaccggcgaggacgaactgcgggcgctgttcgacgtgcacgtcttcggcccggccgcgctgacgcgcgcggtactgccgtccatgcgggagcggcgttcgggcgcgatcgtgcagatgagcagcatgggcgggcagatgtccttcgcgggcttctccgcgtacagcggcacgaagttcgccctggagggcatgtccgaggggctcgcggacgaggtccgggacttcggcatcaaggtcgtgatcgtcgagccgggctccttccgcaccggcctgttcgaggccgggaacgccgggatcagcgccgacagcggcgtgtacgccaaggtcggcgagacccgcgggatgatcgccgcgggcgacggcagccagcccggcgaccccgccagggcggccgcggtcatccgcgcggccctcgcggccgagcacactccgctgcgcctgccgctgggcgccgacggcgtcaccgcggtcctcggccacctcgaccgggtccgcgaggaggtcgagacctgggagaagcagacccgggccacggcgttcgacgactga

SEQ ID NO: 1175 - protein, 276 aa, Streptomyces lividans
MNKVWLITGASSGFGRAIAEAALADGDVVVGAARRPEALDDLVAAHPDQMEALRLDVADTAAAGDAVRDVVARHGRVDVLVNNAGRTHVGALEETGEDELRALFDVHVFGPAALTRAVLPSMRERRSGAIVQMSSMGGQMSFAGFSAYSGTKFALEGMSEGLADEVRDFGIKVVIVEPGSFRTGLFEAGNAGISADSGVYAKVGETRGMIAAGDGSQPGDPARAAAVIRAALAAEHTPLRLPLGADGVTAVLGHLDRVREEVETWEKQTRATAFDD

SEQ ID NO: 1176 - DNA, 831 bp, Streptomyces coelicolor A3
  CDS (1)..(831): transl_table=11
atgaacaaggtgtggctgatcaccggggcgagcagcggcttcgggcgggcgatcgccgaggcggccctggccgacggcgacgtcgtggtcggcgcggctcggcgccccgaggcgctggacgacctcgtggccgcgcacccggaccagatggaggcgctgcgcctggacgtcgccgacacggccgccgccggggacgccgtacgggacgtggtggcgcggcacggcagggtggacgtattggtcaacaacgcgggccgcacacacgtcggtgccctcgaggagaccggcgaggacgaactgcgggcgctgttcgacgtgcacgtcttcggcccggccgcgctgacgcgcgcggtactgccgtccatgcgggagcggcgttcgggcgcgatcgtgcagatgagcagcatgggcgggcagatgtccttcgcgggcttctccgcgtacagcggcacgaagttcgccctggagggcatgtccgaggggctcgcggacgaggtccgggacttcggcatcaaggtcgtgatcgtcgagccgggctccttccgcaccggcctgttcgaggccgggaacgccgggatcagcgccgacagcggcgtgtacgccaaggtcggcgagacccgcgggatgatcgccgcgggcgacggcagccagcccggcgaccccgccagggcggccgcggtcatccgcgcggccctcgcggccgagcacactccgctgcgcctgccgctgggcgacgacggcgtcaccgcggtcctcggccacctcgaccgggtccgcgaggaggtcgagacctgggagaagcagacccgggccacggcgttcgacgactga

SEQ ID NO: 1177 - protein, 276 aa, Streptomyces coelicolor A3
MNKVWLITGASSGFGRAIAEAALADGDVVVGAARRPEALDDLVAAHPDQMEALRLDVADTAAAGDAVRDVVARHGRVDVLVNNAGRTHVGALEETGEDELRALFDVHVFGPAALTRAVLPSMRERRSGAIVQMSSMGGQMSFAGFSAYSGTKFALEGMSEGLADEVRDFGIKVVIVEPGSFRTGLFEAGNAGISADSGVYAKVGETRGMIAAGDGSQPGDPARAAAVIRAALAAEHTPLRLPLGDDGVTAVLGHLDRVREEVETWEKQTRATAFDD

SEQ ID NO: 1178 - DNA, 837 bp, Oryza sativa
  CDS (1)..(837)
atgcagaaggcagacacgaaacagcttttgcattgcatcatgtcgaagacaaggatggacggcaaggtggccatcgtgaccggcggcgcgagcggcatcggcgaggcggcggcgcggctgttcgcgtcgtgcggcgcgacggtggtcatcgccgacgtccaggacgagctgggcgaggcggtggcggcgtcggtggcggggggcgggtgccggtacgtgcggtgcgacgtgacggacgaggcgcaggtggaggcggcggtggccgccgcggtggcggagcacgggcggctcgacgtgatggtgagcaacgccggcgtgctgctcccgacggggcccgtcgtggacatggacctcgcggctctggaccgggtgatgtcggtgaacttccgcggcgcggcggcgtgcgtgaagcacgcggcgcgcgccatggtgtcgcgcggcacccgcggcgccatcgtgtgcacggcgagcgtggcgtcgtgccagggcgggttcgggccggcggcgtacacggcgtcgaagcacgcggtgctggggctggtgcgcgcggcggccggcgagctcgggcggcacggcgtgcgcgtgaactgcgtgtcccccggcggcgtggcgacgccgctgagctgcgggctgacggggatgagccccgaggagatggaggcggcggcggagccccacaacgtgctccgcgggaaggtgctcaaggcggcggacgtcgcggaggccatgctcttcctcgcctccgaccaggccgccttcgtcagcggccacaacctcgtcgtcgacggcgccaccaccgccgtcaactacgccgtgctccagtccgtcggcctgtga

SEQ ID NO: 1179 - protein, 278 aa, Oryza sativa
MQKADTKQLLHCIMSKTRMDGKVAIVTGGASGIGEAAARLFASCGATVVIADVQDELGEAVAASVAGGGCRYVRCDVTDEAQVEAAVAAAVAEHGRLDVMVSNAGVLLPTGPVVDMDLAALDRVMSVNFRGAAACVKHAARAMVSRGTRGAIVCTASVASCQGGFGPAAYTASKHAVLGLVRAAAGELGRHGVRVNCVSPGGVATPLSCGLTGMSPEEMEAAAEPHNVLRGKVLKAADVAEAMLFLASDQAAFVSGHNLVVDGATTAVNYAVLQSVGL

SEQ ID NO: 1180 - DNA, 855 bp, Brassica napus
  CDS (1)..(855)
atgtcaactgaaaacattcaacattcttccctcccttctcaaaggcttttgggcaaagtggcattgataaccggaggagccacagggataggcgaaagcatcgctcgtctcttccacaagcacggtgccaaagtctgcatcttcgacgtccaagacgatctcggagacaaagtactcaaaactctgttagccaactcggaggatgatgagtcagcttgtttcatccacggtgacgtcacacaagaagacgacatcagcaacgctgttgacttcgccgtcaaacgtttcgggaccctcgacatactcatcaacaacgcaggagtaagcggagcaccctgccccgacatccgcaacaacagtttaaccgagttcgaaaccgtcttcaacgtcaacgtgaaaggagctttcctagggatgaaacacgcggcgcgtgtgatgatccccgccaagaaaggctccatagtctctttatgcagcgttggtggtgttgtcggaggcgtcggtccgcacgcttacgtcggttccaagcacgcggttctaggtttgactaggagcgttgcggcggagctgggacagcatgggatacgcgtgaactgcgtttctccttacgcggttgcgactaacctcgcgttggctcatttgcctgaggacgagaggaatgaaggcgtggtcgctggtttcaggagtttcgcggctgcgaacgcgaatctgaaaggtgttgagttgacggttgatgacgtggccaacgcggttttgtttcttgcgagtgatgagtcgcggtacgtgagtggtgataatctgatggttgatggtgggtttacttgcactaaccactcctttaaagtttttaggtga

SEQ ID NO: 1181 - protein, 284 aa, Brassica napus
MSTENIQHSSLPSQRLLGKVALITGGATGIGESIARLFHKHGAKVCIFDVQDDLGDKVLKTLLANSEDDESACFIHGDVTQEDDISNAVDFAVKRFGTLDILINNAGVSGAPCPDIRNNSLTEFETVFNVNVKGAFLGMKHAARVMIPAKKGSIVSLCSVGGVVGGVGPHAYVGSKHAVLGLTRSVAAELGQHGIRVNCVSPYAVATNLALAHLPEDERNEGVVAGFRSFAAANANLKGVELTVDDVANAVLFLASDESRYVSGDNLMVDGGFTCTNHSFKVFR

SEQ ID NO: 1182 - DNA, 903 bp, Brassica napus
  CDS (1)..(903)
atgccggctcaagtgatcactgagcagacctttcaatccctccacgacaccatcatggaggatacaaattcaactttatttcataagaggttggaaggaaaagtagccatcataaccggaggagcacatgggatcggcaaagctaccgtcaagatattcgcgagacacggtgccacggtggtgatcgctgacgtggacgccacagccggatcttccctggctaaatcgatctcatcatcccaagtcgccttcataagctgcgatgtctcggtcgaagctgacgtggaaaacctagtgaacgtgaccatcgcacgttacggtcggcttgacgtgctattcaacaacgcaggagttctcggagaccagaagaaacacaaaagcatattagacttcaacgctgaagagttcgaccaagtgatgcgtgtgaacgtgcgaggcgcagggctcggcatgaaacacgcggcacgtgccatgattaaaagaggctttaaaggttgcataatctcgacggcgagtgtggcgggcgttatgggtggtatgggcccacatgcttacacggcgtcgaagcatgcgatcgttggactgaccaagaacgcagcttgtgagctcgggaggtatgggattagggttaactgcatatcaccgtttggagttgctacgtcgatgctggtgaacgcgtggaggaagacgagtggatgtggtgacatggaagatggtgatgatgtagaggagatggaggagttcgtgaggagtttggctaatttgaaaggagagacattgagagcgacggatatagctgaagcggcgttgtatttggcgagtgatgagtcaaagtatgttaatggacataaccttgttgttgacgggggtgttacgactgcgaggaactgtgttggtttgtga

SEQ ID NO: 1183 - protein, 300 aa, Brassica napus
MPAQVITEQTFQSLHDTIMEDTNSTLFHKRLEGKVAIITGGAHGIGKATVKIFARHGATVVIADVDATAGSSLAKSISSSQVAFISCDVSVEADVENLVNVTIARYGRLDVLFNNAGVLGDQKKHKSILDFNAEEFDQVMRVNVRGAGLGMKHAARAMIKRGFKGCIISTASVAGVMGGMGPHAYTASKHAIVGLTKNAACELGRYGIRVNCISPFGVATSMLVNAWRKTSGCGDMEDGDDVEEMEEFVRSLANLKGETLRATDIAEAALYLASDESKYVNGHNLVVDGGVTTARNCVGL

SEQ ID NO: 1184 - DNA, 858 bp, Brassica napus
  CDS (1)..(858)
atgggaagcagcgaggagatgccagtggtgctcatcacaggatgctcacacggaggaatcggcaacgcgctggctcgtgagttctcgtcgaagggttgtcgtgttgtggcgacgagtcgatcgcagaacacgatggccgatttgacgaaagatcccaagtttttagtacaagagctcgatgttcagtcagaacataacgtgaataaagtcttttcggaagttatcgacaagttcggtcagattgatgttctggtcaataacgccggagttcaatgcgtcggtccactcgctgagattccaattcagaccatggagcacacctttaacaccaatgtgttcggttccatgaggatgactcaagctgttgtacctcacatggcgtcaaagaagaaaggaaagattgtgaacataggaagtatcagcacaatggcaccaggaccatgggcaggggtttacactgcatcaaaagctgctcttcatgctcttacagacacattaaggttggagcttaggccatttgggattgatgtgatcaacatcgtcccaggaggtattcaatcaaacatatccgactcagggatatcgagcttcgataagttacctgagctgaaactatataagcctttccaagaagctatccgtgaaagggcgtttttgtcgcaaaacgttaagccaatacctgcagagacgtttgcgaaggaggtggtatcagtggtcctgaaggaacacccaccggcttggtattctacagggaggttgtccaccgtcgcggcgatcatgcaccatttgcccatttccgtcaaagattttctcctgactaagagcttcatgaaaaaagggccaaaagaaactgtttga

SEQ ID NO: 1185 - protein, 285 aa, Brassica napus
MGSSEEMPVVLITGCSHGGIGNALAREFSSKGCRVVATSRSQNTMADLTKDPKFLVQELDVQSEHNVNKVFSEVIDKFGQIDVLVNNAGVQCVGPLAEIPIQTMEHTFNTNVFGSMRMTQAVVPHMASKKKGKIVNIGSISTMAPGPWAGVYTASKAALHALTDTLRLELRPFGIDVINIVPGGIQSNISDSGISSFDKLPELKLYKPFQEAIRERAFLSQNVKPIPAETFAKEVVSVVLKEHPPAWYSTGRLSTVAAIMHHLPISVKDFLLTKSFMKKGPKETV

SEQ ID NO: 1186 - DNA, 828 bp, Glycine max
  CDS (1)..(828)
atggcaacttcaacctctgcactcaataaaaggctggaaggaaaagttgcactgatcacaggaggagctagtggcatcggcaaacgcactgcagaagtgttcgctcagcaaggagccaaagtagtgatcgctgacatccaagacgaactgggacattccgttgctcagtccatagggccatcaacatgttgttatgtccattgcgatgtcaccgatgagaaccaaataaaaaatgccgtccaaaaagccgtagatgcttatgggaagctagacatcatgttcaacaacgccggcattgttgatcccaacaagaaccgaatcattgacaacgataaggcagatttcgaacgtgtcctaagcgtcaatgtcacgggtgttttccttgggatgaagcatgcggcgcaggcgatgatcccagcacgcagtggtagcatcatctctacggccagcataagctcctacgttggtggtgcagcctcgcatgcttactgttgtgctaagcatgctgtggttggtctaactaaaaatgcagcagttgagcttggacagttcggaataagggtgaattgtttgtcaccttacgctcttgctacacctttggccaccaagtttgttggagctaatgatgaggagcttgagactatcatgaactcactggctaatctcaagggtgtcactcttaaagctgaggatgtggctaatgccgcactttattttgctagtgatgattccaggtacgtcagtgggcaaaatttgctcatagatggaggcttcagcattgttaatccttcctttcacatgtttcagtacccggactcggagtcttga

SEQ ID NO: 1187 - protein, 275 aa, Glycine max
MATSTSALNKRLEGKVALITGGASGIGKRTAEVFAQQGAKVVIADIQDELGHSVAQSIGPSTCCYVHCDVTDENQIKNAVQKAVDAYGKLDIMFNNAGIVDPNKNRIIDNDKADFERVLSVNVTGVFLGMKHAAQAMIPARSGSIISTASISSYVGGAASHAYCCAKHAVVGLTKNAAVELGQFGIRVNCLSPYALATPLATKFVGANDEELETIMNSLANLKGVTLKAEDVANAALYFASDDSRYVSGQNLLIDGGFSIVNPSFHMFQYPDSES

SEQ ID NO: 1188 - DNA, 987 bp, Brassica napus
  CDS (1)..(987)
atgctgactctactcttctcctctctcggactcctcctgcttctcggtcttctcctcaaattcgcattcgccgatggggatttaacgctgatttcgaagaagcatgtgaaacgagaagccatagaaggaaaggtggtttggatcacaggggctagccgtggaattggagaagttcttgctaaacagtttgcgagtttaggtgccaagcttattctctctgctaggaacgaagctgagttggttcgtgttaagagtgagctcaaaggtaagtatgcaccagaagatgtcaaggttttgcctttagatctagctagcggcgaagagggtctcaaaggtgttgtagagagagcagtgtcgcttttccctggggctggggttgattatttggttcacaacgctgcctatgagcgtccgaaatcaaatgcagtggatgcgagtgaggaaaatcttaagactacattcgaggttaatgtatttgggaccatatctctcacaaagttggtaactcctcatatgctgaaacaaggaggcggtcattttgttgtgattagcagtgccgcagggaaggtaccatcacctggacaggctatatatgctgcttcaaagcatgctctgcagggctatttccacagcttacgttctgagttttttcagaagggaatcaaggttactgttgtttgcccgggtccaatagagacctcaaatggtacaggaacatcaacttcggaagacaagaagtctcctgagaagcgtgtgtcatctgaacgatgtgcagaactgaccataatcgctgcatctcataacttaaaagaagcttggatttcatatcagccagtactgctcgtgatgtatctagtgcagtacatgcctttccttggcttctggcttatggacaaggttggaggaaaacgtgtggaggttgctgagaagaaaggcaacacatactcatggaacttgctcttccagaagaagactaaaacaaactga

SEQ ID NO: 1189 - protein, 328 aa, Brassica napus
MLTLLFSSLGLLLLLGLLLKFAFADGDLTLISKKHVKREAIEGKVVWITGASRGIGEVLAKQFASLGAKLILSARNEAELVRVKSELKGKYAPEDVKVLPLDLASGEEGLKGVVERAVSLFPGAGVDYLVHNAAYERPKSNAVDASEENLKTTFEVNVFGTISLTKLVTPHMLKQGGGHFVVISSAAGKVPSPGQAIYAASKHALQGYFHSLRSEFFQKGIKVTVVCPGPIETSNGTGTSTSEDKKSPEKRVSSERCAELTIIAASHNLKEAWISYQPVLLVMYLVQYMPFLGFWLMDKVGGKRVEVAEKKGNTYSWNLLFQKKTKTN

SEQ ID NO: 1190 - DNA, 987 bp, Brassica napus
  CDS (1)..(987)
atgctgactctactcttctcctctctaggactcctccttctccttggccttctcctcaaattcgcattcgccgatggggatttaaccctgatttcgaagaagcatgcgaaacgtgaagccatagaaggcaaggtggtttggatcacaggggctagccgtggaattggggaagttcttgctaaacagtttgcaagtttaggtgccaagcttattctctctgctaggaacgaagctgaattggttcgtgttaagagtgagctcaaaggtaagtatgcaccagaagatgtcaaggttttgcctttagatctagctagcggcgtagaggggctcaaaggtgttgtagagcgggcagtgtcgcttttccctggggctggtgttgattatttggtccacaacgctgcctatgagcgtccgaaatcaaatgcagtggatgcgagtgaggagaatcttaagactacattcgaggttaatgtatttgggacaatatctctcacaaagttggtaactcctcatatgctgaaacaaggaggtggtcattttgttgtgattagcagtgccgcagggaaggtaccatcacctggacaggctatatatgctgcttcaaaacatgctctgcagggctacttccacaccttacgttctgagttctttcagaagggaatcaaggttactgttgtttgtcccggtccaatagagacctcaaatggtacaggaacatcaacttccgaagacaagaagtctcctgagaagcgcgtgtcatctgaacgatgtgcagaactgaccataatcgctgcatctcataacttaaaagaagcttggatttcatatcagccagtactgctcgtgatgtatctagtgcagtacatgcctttccttggcttctggctcatggacaaggttggaggaaaacgtgtggaggttgctgagaagaaaggcaacacatactcatggaacttgctcttccagaagaagactaaaacaaactga

SEQ ID NO: 1191 - protein, 328 aa, Brassica napus
MLTLLFSSLGLLLLLGLLLKFAFADGDLTLISKKHAKREAIEGKVVWITGASRGIGEVLAKQFASLGAKLILSARNEAELVRVKSELKGKYAPEDVKVLPLDLASGVEGLKGVVERAVSLFPGAGVDYLVHNAAYERPKSNAVDASEENLKTTFEVNVFGTISLTKLVTPHMLKQGGGHFVVISSAAGKVPSPGQAIYAASKHALQGYFHTLRSEFFQKGIKVTVVCPGPIETSNGTGTSTSEDKKSPEKRVSSERCAELTIIAASHNLKEAWISYQPVLLVMYLVQYMPFLGFWLMDKVGGKRVEVAEKKGNTYSWNLLFQKKTKTN

SEQ ID NO: 1192 - DNA, 816 bp, Glycine max
  CDS (1)..(816)
atggcaagtgcttctgcggtctcagctcatgttagaaggcttgaggggaaagtggcgattatcactggtggtgcaagcggcataggtgaggccactgcaagactcttctctaagcacggagcacaccttgtcatagctgacattcaagacgatttgggcctctctctttgcaaacacttggaatccgcttcctatgttcactgcgacgtgacaaaggaagaggacgttgaaaactgcgtgaacacagcggtttccaagtatggaaaactagacatcatgcttaataacgcaggtatatgtgatgagatcaaaacaagcatactagacaacaacaagtctgattttgagagtgtcataagcgtgaacttggttggtccttttctgggaacaaagcacgctgcaagagtcatgatccctgctaaaaggggaagcataattaacacagctagtgttgctggaaccttaggtggagtggctacacatgcctacacaagttcaaagcacgcgctaattggactgatgaaaaacactgcggtggagcttggacagtttggtattcgggtgaattgtgtgtccccttatgtggttcccacaccgttgaccaagaaacatgccaatattgacgaagaaggagttcgtgagatttattccaacctaaaaggtgttcatcttgtgccgaacgatgtggccgaagctgctctttacttggcaggtgatgagtctaagtatgttagtggtcacaatctcgtgttagatggtgggtacactgatgtaaatataggattttctgtgtttgatcaaaataaacttaactaa

SEQ ID NO: 1193 - protein, 271 aa, Glycine max
MASASAVSAHVRRLEGKVAIITGGASGIGEATARLFSKHGAHLVIADIQDDLGLSLCKHLESASYVHCDVTKEEDVENCVNTAVSKYGKLDIMLNNAGICDEIKTSILDNNKSDFESVISVNLVGPFLGTKHAARVMIPAKRGSIINTASVAGTLGGVATHAYTSSKHALIGLMKNTAVELGQFGIRVNCVSPYVVPTPLTKKHANIDEEGVREIYSNLKGVHLVPNDVAEAALYLAGDESKYVSGHNLVLDGGYTDVNIGFSVFDQNKLN

SEQ ID NO: 1194 - DNA, 852 bp, Glycine max
  CDS (1)..(852)
atgactatatttttggagcacttacctttccaagcatgcaggttagaaggcaaggtggcactaataaccggtggagccagtggcatcggcgaagccaccgcaaggcttttcctttgccacggtgccaaggtcatcatcgctgacatccaagacaacctcggacactccctctgccaaaacctcaactcctccgacaacaacatttcctacgttcactgcgacgtcaccaacgataacgacgtccaaaacgccgtcaacgccgccgtctcgcgtcacggcaagctcgacatcctgttcagtaacgccggcactgttggccgtgtgagcccttccatcacggcgtttgacaacgctgacttgaagagggttttcgaggtgaatgtcttcggtgctttctacgccgccaaacacgcggctaaggtaatgattcctgaaaagagagggagcattgtgctcacctcaagtgttgcttcggtgactcacgcggtttcgccgcatgcatacactgcgtcgaagcacgcggtggtgggtctgatgaagaacctgtgcgtggaactggggaatcatggaatcagagttaactgtgtttcaccgtacgcggtggccactcctctgatgacacgtggaaccaggatgaagaaggagatggtagagaaagtgtattctgaggcggggaacctgaagggagtggttttgaaggaagaggatttggcagaagcagctctgtttctggctagtgatgagtcaaagtacgtgagtggggttaacctagttgtggatggaggttacagtgtcaccaatgtttctgttaaagaagctgtgagaaagttttctggtaagcccaagttgtaa

SEQ ID NO: 1195 - protein, 283 aa, Glycine max
MTIFLEHLPFQACRLEGKVALITGGASGIGEATARLFLCHGAKVIIADIQDNLGHSLCQNLNSSDNNISYVHCDVTNDNDVQNAVNAAVSRHGKLDILFSNAGTVGRVSPSITAFDNADLKRVFEVNVFGAFYAAKHAAKVMIPEKRGSIVLTSSVASVTHAVSPHAYTASKHAVVGLMKNLCVELGNHGIRVNCVSPYAVATPLMTRGTRMKKEMVEKVYSEAGNLKGVVLKEEDLAEAALFLASDESKYVSGVNLVVDGGYSVTNVSVKEAVRKFSGKPKL

SEQ ID NO: 1196 - DNA, 810 bp, Glycine max
  CDS (1)..(810)
atggcaagtgtctcactggtctcagctactggaagaaggcttgaggggaaagtggctattatcactggtggtgcaagcggcataggtgaggccactgcaagactcttctctaagcacggagcacacgttgtcatagctgatattcaagacgatttgggtctctctatttgcaaacacttggaatccgcttcctatgttcactgcgacgtgacaaacgaaaccgacgttgaaaactgcgtgaacaccaccgtttccaaacacggcaaactagatatcatgttcaacaacgctggcataaccggtgtgaacaaaaccagcatcctcgacaacacaaagtcagagtttgaggaagtgatcaacgttaacctagttggtgtctttctgggaacaaagcacgccgcaagggtaatgatccctgctagaagaggaagcatagttaacactgcaagtgtttgtggaagcataggtggtgtagcatcacatgcatacacaagttccaaacacgccgtggtggggctcacaaagaacactgcggtggagcttggagcatttggtgttagggttaactgcgtgtcaccctacgtggttgccacgcccttggctaagaatttttttaagcttgatgatgacggagttcaggggatttattcaaaccttaagggtactgatcttgtgcctaatgatgtagccgaagctgctttgtacctggcaagtgatgagtccaagtatgttagtgggcacaatcttgtggttgatggaggcttcactgtggtcaatagtgggttttgtgtccttgggcaatcttcgtga

SEQ ID NO: 1197 - protein, 269 aa, Glycine max
MASVSLVSATGRRLEGKVAIITGGASGIGEATARLFSKHGAHVVIADIQDDLGLSICKHLESASYVHCDVTNETDVENCVNTTVSKHGKLDIMFNNAGITGVNKTSILDNTKSEFEEVINVNLVGVFLGTKHAARVMIPARRGSIVNTASVCGSIGGVASHAYTSSKHAVVGLTKNTAVELGAFGVRVNCVSPYVVATPLAKNFFKLDDDGVQGIYSNLKGTDLVPNDVAEAALYLASDESKYVSGHNLVVDGGFTVVNSGFCVLGQSS

SEQ ID NO: 1198 - DNA, 855 bp, Zea mays
  CDS (1)..(855)
atggcagcatcccgcagcgaggaacgtgatcagaatcagccagtggtgcttgtgacggggtgctcggagggcggcatcggccacgcgatggcgcgcgccttcgctgcggccgggtgcgccgtcgtggccacggcgcggtcacgcggttccatgcgcggtctcgacggcgacccgcggttcctgctgctggagctcgacgtgcgctccgacgagagcgcgcgcgccgccgtggcgggtgcgctgcgggagcacggccgcatcgacgtgctcgtcaacaacgctggggttcacctcgtcgcaccactcgccgaggtgcccatggagtccttccaccaggttttcgacaccaatgtctatggtgcaatgaggttgattcaagctgttattcctcacatgatggaaagaaggaaaggaacaattgtgaatgttggaagtattaccgctctggcacctggaccatgggctggtgtgtattcagcatccaaagctgctcttcatgcattgagtgactcgttaagggttgaactaagaagcttcggcataaacgtgatgactgtcgccccaggagggacgaggtcgaatcttgggaattcttctgcagccaagtatgatcagatgcacgagtggaagtactacaagaaatacgaggaagggctccgagccaggactggcatttcccagggccccaggtccactccagcagaagagcttgcaaaggcggtggttgcatcggttctaaggaagaaccctccagcttggttcgcttacggccagtactctgccattctgtcgattttgtattatgcaccgctatggtttagagattacctctataagtttgtcatgaaatgttag

SEQ ID NO: 1199 - protein, 284 aa, Zea mays
MAASRSEERDQNQPVVLVTGCSEGGIGHAMARAFAAAGCAVVATARSRGSMRGLDGDPRFLLLELDVRSDESARAAVAGALREHGRIDVLVNNAGVHLVAPLAEVPMESFHQVFDTNVYGAMRLIQAVIPHMMERRKGTIVNVGSITALAPGPWAGVYSASKAALHALSDSLRVELRSFGINVMTVAPGGTRSNLGNSSAAKYDQMHEWKYYKKYEEGLRARTGISQGPRSTPAEELAKAVVASVLRKNPPAWFAYGQYSAILSILYYAPLWFRDYLYKFVMKC

SEQ ID NO: 1200 - DNA, 834 bp, Linum usitatissimum
  CDS (1)..(834)
atgagtgccactaacgccgctagttccgtcattagaaggctggaaggcaaagtggcgctgatcaccggcggagctagcgggataggagaagccacggccaagctgttcgtccaacacggcgccaaggtcgtcatcgccgatgtcaaagaccaactcggcgggtcactcactgagaagctggggggcccacacgcggccacctacgtccactgcgacgtcacacatcctgcccacgtcagcgatgcggttgacgcggcagtgtccacgtatggccagctggacatcatgcacaacaatgccggcatcgccggcaactttgatcctcgcatcctcaactccgacgacgataattttaagcgagtcatcgacattaacctcttcggcgccttcctaggtgccaagcatgccgccagggtgatggtaccggcggggagaggcggctgcatcctgttcacagccagtgcagtctcggtgactagcggcaacatttcgtacgcatacaaggtgtcgaagaacggggtagtggggctggccaacaatctgtgcgcggagctgggacagcatgggattcgagtcaacgcgatatcgcctttcgcgctggcgacgccgttactgagggcggcgctgggcgggatgggaaaggaggagggtgacgcgttcgtcgagaagatagggaacttgaaagggactgttctgaaagagggggatattgcagcggcggcattgtacctggctagcgacgatgctaagtacgtgagcgggatgaatttggtcgtggatggaggtcacaggcagaacaaccccatatttcctgcttcgacgttcactaagtag

SEQ ID NO: 1201 - protein, 277 aa, Linum usitatissimum
MSATNAASSVIRRLEGKVALITGGASGIGEATAKLFVQHGAKVVIADVKDQLGGSLTEKLGGPHAATYVHCDVTHPAHVSDAVDAAVSTYGQLDIMHNNAGIAGNFDPRILNSDDDNFKRVIDINLFGAFLGAKHAARVMVPAGRGGCILFTASAVSVTSGNISYAYKVSKNGVVGLANNLCAELGQHGIRVNAISPFALATPLLRAALGGMGKEEGDAFVEKIGNLKGTVLKEGDIAAAALYLASDDAKYVSGMNLVVDGGHRQNNPIFPASTFTK

SEQ ID NO: 1202 - DNA, 840 bp, Helianthus annuus
  CDS (1)..(840)
atggaaacttttcacaaacaggtggtgctcgtcacagggtgctcttctggcggcatcggtaacgctctctcccgcgcttttgcggccaaaaactgtctcgtagtcgccacggctcgctcagtttcatctatggctgaattcagcgataatcctgatctctactttcttcaggagcttgatgtgttatcggatcagagcgttcgagaggttgtctcgaatgttatcgataagtttggacggattgatgttgttgttaataatgctggtgttcagtgtattggtcctcttgcagaagttccgttttcttcgattgagaatactttcaacacgaatgtttacggttccatgaggctgatccaagcagttgtccctcacatggtatcaagaaagaaaggaaagattgtgaacattggaagtgtgactgccctggcacctggaccatggtcaggtgtctacgctgcatctaaagctgctttacacgcgctaactgacacactaagggtggaactgaagccgtttggtatcgatgtaattaacattgtgcctggatccgtaaaaacgaacttaggaaatacagctgtagccagctacaacaagatgccagaatggaaaatgtacaagaaatacgaaggcgcaatcaaagagcgcgcgtatttttcacaaggttcaaaagcaatttcgccagacgagtttgcaaacaagacagtggctgcaatcctgaaagaagaccccccttcttggttctctttggggcagttttccactatagcggctattatgtaccatatgcctatatttgttaaggatttcctttacaaaatggccatgatgaaatgttag

SEQ ID NO: 1203 - protein, 279 aa, Helianthus annuus
METFHKQVVLVTGCSSGGIGNALSRAFAAKNCLVVATARSVSSMAEFSDNPDLYFLQELDVLSDQSVREVVSNVIDKFGRIDVVVNNAGVQCIGPLAEVPFSSIENTFNTNVYGSMRLIQAVVPHMVSRKKGKIVNIGSVTALAPGPWSGVYAASKAALHALTDTLRVELKPFGIDVINIVPGSVKTNLGNTAVASYNKMPEWKMYKKYEGAIKERAYFSQGSKAISPDEFANKTVAAILKEDPPSWFSLGQFSTIAAIMYHMPIFVKDFLYKMAMMKC

SEQ ID NO: 1204 - DNA, 858 bp, Brassica napus
  CDS (1)..(858)
atgggaagcagcgaggagatgccagtggtgctcatcacaggatgctcacacggaggaatcggcaacgcgctggctcgtgagttctcgtcgaagggttgtcgtgttgtggcgacgagtcgatcgcagaacacgatggccgatttgacgaaagatcccaagtttttagtacaagagctcgatgttcagtcagaacataacgtgaataaagtcttttcggaagttatcgacaagttcggtcagatcgatgttctggtcaataacgccggagttcaatgcatcggtccactcgctgagattccaattcagaccatggagcacacctttaacaccaatgtgttcggttccatgaggatgactcaagctgttgtacctcacatggcgtcaaagaagaaaggaaagattgtgaacataggaagtatcagcacaatggcaccaggaccatgggcaggggtttacactgcatcaaaagctgctcttcatgctcttacagacacattaaggttggagcttaggccatttgggattgatgtgatcaacattgtcccaggaggtattcaatcaaacatatccgactcagggatatcgagcttcaacaagttacctgagctgaaactatataagcctttccaagaagctatccgtgaaagggcgtttttgtcgcaaaacataaaaccaacacctgcagagacatttgcgaaagagacggtatcagtggtcctgaagaaaaacccaccggcttggtactctacaggaaggttgtccaccgtcacggcgatcatgcaccatatgcccattttcgtcaaagattttctcctgacgaagagcttcatgaaaaaagggccaaaagaaactgtttga

SEQ ID NO: 1205 - protein, 285 aa, Brassica napus
MGSSEEMPVVLITGCSHGGIGNALAREFSSKGCRVVATSRSQNTMADLTKDPKFLVQELDVQSEHNVNKVFSEVIDKFGQIDVLVNNAGVQCIGPLAEIPIQTMEHTFNTNVFGSMRMTQAVVPHMASKKKGKIVNIGSISTMAPGPWAGVYTASKAALHALTDTLRLELRPFGIDVINIVPGGIQSNISDSGISSFNKLPELKLYKPFQEAIRERAFLSQNIKPTPAETFAKETVSVVLKKNPPAWYSTGRLSTVTAIMHHMPIFVKDFLLTKSFMKKGPKETV

SEQ ID NO: 1206 - DNA, 987 bp, Brassica napus
  CDS (1)..(987)
atgctgactctactcttctcctctctcggactcctcctgcttctcggtcttctcctcaaattcgcattcgccgatggggatttaacgctgatttcgaagaagcatgtgaaacgagaagccatagaaggaaaggtggtttggatcacaggggctagccgtggaattggagaagttcttgctaaacagtttgcgagtttaggtgccaagcttattctctctgctaggaacgaagctgagttggttcgtgttaagagtgagctcaaaggtaagtatgcaccagaagatgtcaaggttttgcctttagatctagctagcggcgaagagggtctcaaaggtgttgtagagagagcagtgtcgcttttccctggggctggggttgattatttggttcacaacgctgcctatgagcgtccgaaatcaaatgcagtggatgcgagtgaggaaaatcttaagactacattcgaggttaatgtatttgggacaatatctctcacaaagttggtaactcctcatatgctgaaacaaggaggcggtcattttgttgtgattagcagtgccgcagggaaggtaccatcacctggacaggctatatatgctgcttcaaaacatgctctgcagggctacttccacaccttacgttctgagttctttcagaagggaatcaaggttactgtggtttgtccgggtccaatagagacctcaaatggtacaggaacatcaacttccgaagacaagaagtctcctgagaagcgtgtgtcatctgaacgatgtgcagaactgaccataatcgctgcatctcataacttaaaagaagcttggatttcatatcagccagtactgctcgtgatgtatctagtgcagtacatgcctttccttggcttctggctcatggacaaggttggagggaaacgtgtggaggttgctgagaagaaaggcaacacatactcatggaacctgctcttccagaagaagactaaaacaaactga

SEQ ID NO: 1207 - protein, 328 aa, Brassica napus
MLTLLFSSLGLLLLLGLLLKFAFADGDLTLISKKHVKREAIEGKVVWITGASRGIGEVLAKQFASLGAKLILSARNEAELVRVKSELKGKYAPEDVKVLPLDLASGEEGLKGVVERAVSLFPGAGVDYLVHNAAYERPKSNAVDASEENLKTTFEVNVFGTISLTKLVTPHMLKQGGGHFVVISSAAGKVPSPGQAIYAASKHALQGYFHTLRSEFFQKGIKVTVVCPGPIETSNGTGTSTSEDKKSPEKRVSSERCAELTIIAASHNLKEAWISYQPVLLVMYLVQYMPFLGFWLMDKVGGKRVEVAEKKGNTYSWNLLFQKKTKTN

SEQ ID NO: 1208 - DNA, 849 bp, Brassica napus
  CDS (1)..(849)
atgtcaactgaaaacattcaacattcttctctccctactcaaaggcttttgggtaaagtggcattgataaccggaggagccacagggataggcgaaagcatcgctcgtctgttccacaagcacggtgccaaagtctgcatcgtcgacgtccaagacgatctcggagacaaagttctcaaaactctgttagccaactcggaggagtcagcttgtttcatccacggtgacgtcacacaagaagacgacatcagtaacgctgttgacttcgccgtcaagcgtttcgggacacttgacatactcatcaacaacgcaggagtaagcgaagcaccgtgtccggacatccgcaacaacagtttaaccgagttcgagatggtcttcaacgtcaacgtgaaaggagctttcctagggatgaaacatgcggcgcgtgtgatgatccccgccaagaaaggctcgatagtctctttatgcagcgttggcggcgttgtcggaggcgttggtccgcacgcttacgtcggctccaagcacgcggttctaggtttgactaggagcgttgcggcggagctaggacagcatgggatacgcgtgaactgcgtttctccttacgcggttttgactaacctcgcgttggctcatttgcctgaggatgagaggaaggaaggcgtggtcgctggtttcaggagtttcgccgctgcgaacgcgaatctgaaaggtgttgagttgacggttgatgacgtggcgaacgcggttttgtttctggcgagtgatgagtcgcggtatgtgagtggagataatctgatggttgatggtgggttcacttgcactaaccactcctttaaagtttttagatga

SEQ ID NO: 1209 - protein, 282 aa, Brassica napus
MSTENIQHSSLPTQRLLGKVALITGGATGIGESIARLFHKHGAKVCIVDVQDDLGDKVLKTLLANSEESACFIHGDVTQEDDISNAVDFAVKRFGTLDILINNAGVSEAPCPDIRNNSLTEFEMVFNVNVKGAFLGMKHAARVMIPAKKGSIVSLCSVGGVVGGVGPHAYVGSKHAVLGLTRSVAAELGQHGIRVNCVSPYAVLTNLALAHLPEDERKEGVVAGFRSFAAANANLKGVELTVDDVANAVLFLASDESRYVSGDNLMVDGGFTCTNHSFKVFR

SEQ ID NO: 1210 - DNA, 855 bp, Brassica napus
  CDS (1)..(855)
atgggaagcagcgaggagatgccagtggtgctcatcacaggatgctcacacggaggaatcggcaacgcgctggctcgtgagttctcgtcgaagggttgtcgtgttgtggcgacgagtcgatcgcagaacacgatggccgatttgacgaaagatcccaagtttttagtacaagagctcgatgttcagtcagaacataacgtgaataaagtcttttcggaagttatcgacaagttcggtcagattgatgttctggtcaataacgccggagttcaatgcgtcggtccactcgctgagattccaattcagaccatggagcacacctttaacaccaatgtgttcggttccatgaggatgactcaagctgttgtacctcacatggcgtcaaagaagaaaggaaagattgtgaacataggaagtatcagcacaatggcacctggaccatgggcaggggtttacactgcatcaaaagctgctcttcatgctcttacagacacattaaggttggagcttaggccatttgggattgatatgatcaacattgtcccaggaggtattcaatctaacatatccgattcagggatatctagcttcaacaagttacctgagctgaaactatacaaaccctttcaagaagctatccgtcaaagggcgtttttgtcgcaaaacataaaaccaacacctgccgagacatttgctaaagagacggtatcggtggtgctgaagaaaaacccaccggcttggttctctacaggacggttgtccaccgtcatggcgatcatgcaccatatgcccattttcgtcaaagattttctcctgacgaggagctttatgaaaatgggagcaaagactgagtag

SEQ ID NO: 1211 - protein, 284 aa, Brassica napus
MGSSEEMPVVLITGCSHGGIGNALAREFSSKGCRVVATSRSQNTMADLTKDPKFLVQELDVQSEHNVNKVFSEVIDKFGQIDVLVNNAGVQCVGPLAEIPIQTMEHTFNTNVFGSMRMTQAVVPHMASKKKGKIVNIGSISTMAPGPWAGVYTASKAALHALTDTLRLELRPFGIDMINIVPGGIQSNISDSGISSFNKLPELKLYKPFQEAIRQRAFLSQNIKPTPAETFAKETVSVVLKKNPPAWFSTGRLSTVMAIMHHMPIFVKDFLLTRSFMKMGAKTE

SEQ ID NO: 1212 - DNA, 987 bp, Brassica napus
  CDS (1)..(987)
atgctgactctactcttctcctctctcggactcctccttctccttggccttctcctcaaattcgcattcgccgatggggatttaaccctgatttcgaagaagcatgcgaaacgtgaagccatagaaggcaaggtggtttggatcacagggtctagccgtggaattggagaagttcttgctaaacagtttgcaagtttaggtgccaagcttattctctctgctaggaacgaagctgagttggttcgtgttaagagtgagctcaaaggtaagtatgcaccagaagatgtcaaggttttgcctttagatctagctagcggcgaagaggggctcaaaggtgttgtagagcaagcattgtcgcttttccctggggctggtgttgattatttggttcacaacgctgcctatgagcgtccgaaatcaaatgcagtggatgcgagtgaggaaaatcttaagactacattcgaggttaatgtatttgggacaatatctctcacaaagttggtaactcctcatatgctgaaacaaggaggcggtcattttgttgtgattagcagtgccgcagggaaggtaccatcacctggacaggctatatatgctgcttcaaaacatgctctgcagggctacttccacaccttacgttctgagttctttcagaagggaatcaaggttactgtggtttgtccgggtccaatagagacctcaaatggtacaggaacatcaacttccgaagacaagaagtctcctgagaagcgtgtgtcatctgaacgatgtgcagaactgaccataatcgctgcatctcataacttaaaagaagcttggatttcatatcagccagtactgctggtgatgtatctagtgcagtacatgcctttccttggcttctggctcatggacaaggttggagggaaacgtgtggaggttgctgagaagaaaggcaacacatactcatggaacctgctcttccagaagaagactaaaacaaactga

SEQ ID NO: 1213 - protein, 328 aa, Brassica napus
MLTLLFSSLGLLLLLGLLLKFAFADGDLTLISKKHAKREAIEGKVVWITGSSRGIGEVLAKQFASLGAKLILSARNEAELVRVKSELKGKYAPEDVKVLPLDLASGEEGLKGVVEQALSLFPGAGVDYLVHNAAYERPKSNAVDASEENLKTTFEVNVFGTISLTKLVTPHMLKQGGGHFVVISSAAGKVPSPGQAIYAASKHALQGYFHTLRSEFFQKGIKVTVVCPGPIETSNGTGTSTSEDKKSPEKRVSSERCAELTIIAASHNLKEAWISYQPVLLVMYLVQYMPFLGFWLMDKVGGKRVEVAEKKGNTYSWNLLFQKKTKTN

SEQ ID NO: 1214 - DNA, 810 bp, Glycine max
  CDS (1)..(810)
atggcaagtatttctactgtctcggttcttgatagaaggcttgaagggaaagtggctcttatcagtggtggtgctagcggtataggtgaggccactgcaagactcttctctaagcatggagcacacgttgtgatagctgatattcaagacgatttgggtctctctctttgcaaacacttggaatccgcttcctatgtccattgcgatgtcacaaacgaaaacgacgttcaaaacgccgttaacacagcgatttccaagtatggcaatctagatatcatgtttaataatgctggcataattgatgagataaaaacaagcatacttgacaacagcaagtttgattttgagagagtgataagtgtgaacttggttggtccttttctgggaacaaagcacgctgctagggttatgattcctgctaaaaggggaagcataattaacactgctagtgttgctggaacctttagtggaggggcttcacatgcctacacaagttcaaagcacgcactaattggactgatgaaaaacactgcggtggagcttggacagtttggtattagggtaaattgcttgtccccttatgtggttgccacaccattgactaagaaatgtttcaatcttgatgaagaccgaaatggtgagatttattccaacctaaaaggtgttcatcttgtgccaaacgatgtggccgaagctgctctatatttggcaggtgatgagtcaaagtatgttagtggtcacaatcttgtgttagatggagggttcaccaatctaaatgtaggattttctgtgtttgggcagtctgagtaa

SEQ ID NO: 1215 - protein, 269 aa, Glycine max
MASISTVSVLDRRLEGKVALISGGASGIGEATARLFSKHGAHVVIADIQDDLGLSLCKHLESASYVHCDVTNENDVQNAVNTAISKYGNLDIMFNNAGIIDEIKTSILDNSKFDFERVISVNLVGPFLGTKHAARVMIPAKRGSIINTASVAGTFSGGASHAYTSSKHALIGLMKNTAVELGQFGIRVNCLSPYVVATPLTKKCFNLDEDRNGEIYSNLKGVHLVPNDVAEAALYLAGDESKYVSGHNLVLDGGFTNLNVGFSVFGQSE

SEQ ID NO: 1216 - DNA, 864 bp, Glycine max
  CDS (1)..(864)
atgcaagcatgttcctcctcagacgctccactctccaagaggttagatggcaaagtagcactcataatcggcggagccagtggcatcggtgaagccaccgccaagcttttccttcgctacggtgccaaggtcgtcatcgccgacatccaagacaacctcggacactccctatgccaaagtctcaattcctccgacaaaaacaacaacgacgacatttcctatgttcactgcgacgtcaccaacgacaaagacgtcgaaaccgccgtcaacgctgccgtctcgcgacacggcaagctcgacatcctcttcagcaacgccggcatcacgggccgttccgactgttctaactccatcacggccatcgacagcggtgacctgaagagggtcttcgaggtgaacgtcttcggtgccttctacgccgccaaacacgccgctaaggtcatgattcccagaaagaaagggagcattgttttcactgctagcatcgcttctgtgtcgaatgcgggttgggcgcacccgtacgcggcgtcgaagaacgcagtggtgggtttgatgaagaacctgtgcgtggaattggggaaacatggaatcagagttaactgtgtttcgccctatgcggtggggactccaatgctgacacgtgcgatgaggatggagaaggagaaagcagaggagatatatttggaggcggcgaacttgaagggagtggttttaaaggaaaaggatgtggcagaagcaactttgtttttggctagtgatgagtcaaaatacgtgagtggagtgaatctagttgtggacggaggttatactaccaccaattcttcttccaaacaagctttcacaaagttttcttttaatgtttaa

SEQ ID NO: 1217 - protein, 287 aa, Glycine max
MQACSSSDAPLSKRLDGKVALIIGGASGIGEATAKLFLRYGAKVVIADIQDNLGHSLCQSLNSSDKNNNDDISYVHCDVTNDKDVETAVNAAVSRHGKLDILFSNAGITGRSDCSNSITAIDSGDLKRVFEVNVFGAFYAAKHAAKVMIPRKKGSIVFTASIASVSNAGWAHPYAASKNAVVGLMKNLCVELGKHGIRVNCVSPYAVGTPMLTRAMRMEKEKAEEIYLEAANLKGVVLKEKDVAEATLFLASDESKYVSGVNLVVDGGYTTTNSSSKQAFTKFSFNV

SEQ ID NO: 1218 - DNA, 1050 bp, Zea mays
  CDS (1)..(1050)
atggcgccggatctggtgaacggcgtgctcaactgggtggggacgccggccatggtggccagcctgctgctcttctacccgccctactatctcttcaagacatgctactccttcctttcctggctcttccccgaggacctcgccggcaaggtcgtcctcatcactggcgcttcctccggcatcggcgagcaactggcctaccagtacgcgctgaatcgggcgtccctcgccctcgtcgcgagaagggagtcgagcctccggcacgtcgccgaccgagcactcgagctcggcgcgcgcgacgtcgtcgtcctcccaggcgacgtctccacccccgacgactgcgacaggttcgttcggaccgcgatcagtcactacgaccgattggaccatctcgtgtgcaatgctggcgtcgcgagcgtcggcgcgttcgaggagatcccggacgtcaccagctacagctcccagcttgacgtcaatttctggggttccgttcaaacaaccttcgctgccctgcctcacctgaagaggagccgaggaagaatcgtggtgacggcatctgcgaccggatggaacccagttcctagaatgagcatctacaacgctgccaacgctgcgctcatcaacttcttcgagacgctgcggaccgagctagggaaccaggtggggatcacggtggtgacgcccgggtgggtggagtccgagatgtccagagggaagttcctcaaggagcacggccaagtggaggtcgatcaaaagatgcgcgacgctcagatcggcctgttcccggtggagtacgccaagaactgcgccaaggccatggtgcaggcggcgcggcaaggcgagcggtacctcaccgtgccggcgtggttcggggcgatgtacctgtggcggctgttcgcgccggaggtggtggaggcctgctaccgcctcctgtacatgcacggccatggcgccaggcaggccgacgcgcccagcaggaccatggccgaggcgggtggcaagcagctgctgtacccgacctcgctgcgctctgacgagattaagaagtga

SEQ ID NO: 1219 - protein, 349 aa, Zea mays
MAPDLVNGVLNWVGTPAMVASLLLFYPPYYLFKTCYSFLSWLFPEDLAGKVVLITGASSGIGEQLAYQYALNRASLALVARRESSLRHVADRALELGARDVVVLPGDVSTPDDCDRFVRTAISHYDRLDHLVCNAGVASVGAFEEIPDVTSYSSQLDVNFWGSVQTTFAALPHLKRSRGRIVVTASATGWNPVPRMSIYNAANAALINFFETLRTELGNQVGITVVTPGWVESEMSRGKFLKEHGQVEVDQKMRDAQIGLFPVEYAKNCAKAMVQAARQGERYLTVPAWFGAMYLWRLFAPEVVEACYRLLYMHGHGARQADAPSRTMAEAGGKQLLYPTSLRSDEIKK

SEQ ID NO: 1220 - DNA, 1077 bp, Zea mays
  CDS (1)..(1077)
atgagcagcaaggacgctgtgttgaacgcgttcctgagctgcttcatgcacgtgggcctggcgctggtgctcctcgtctacctccccgccgcctccgtcctccgcctcctcgtccgccccttgttggccaacaagcaggccgaggacctccgcggcaaggtcgtcctcgtcaccggcgcgtcatccggcatcggcgagcacctggtgtacgagtacgcgaggaacggcgcgtgcgtggcgctggtggcgcggacggaggtggcgctgcgcgccgtggccaaggcggcgcgcgacctcggctcccccgacgtgctggtcgtgccggccgacgtcaccaaggtggacgacgccaagcgcgccgtcgacgagaccctcgcgcacttcggcaaactgaatcatctggtggccaacgcggggatctggtccagctgcttttttgaggagatcaccaacataaccgccttccataatgtgatggacctcaacttctggggtgccgtgtacccgacctacttcgcgctgccgtacctcaaggccagccggggcaacatcgtggtgaccgcctccgtcgccggcagggtgccgacagccaggatgagcttctacaacgcaagcaaaggcgccgtgatacgtttctacgagacgctgagggctgagctggggtcccacgtgcacgtcaccatcctcacgcccggctacgtcgtctccaacctcaccaagggcaagggcctccagaaggacggccatgtcggcatcgacgaggaggcccgcgacatcaacgtggggccgatgccggtgggcaagacggagtcgctggccgaggtggtggtggccagcgtgcgccgtcgggactactacgtcacgtggcccggctggtactggcccttccacatggtcatgtgcgccgcgccggagctggtggactggttctcccgcaccttctacgtctccaagtccggcgaccaggacggcggcggcggcgcgctcagcaagaagatcctggaggccgtcggcgggaagaagttcctctacccccagaccatacgctcacagaccgccatggcagccaataactga

SEQ ID NO: 1221 - protein, 358 aa, Zea mays
MSSKDAVLNAFLSCFMHVGLALVLLVYLPAASVLRLLVRPLLANKQAEDLRGKVVLVTGASSGIGEHLVYEYARNGACVALVARTEVALRAVAKAARDLGSPDVLVVPADVTKVDDAKRAVDETLAHFGKLNHLVANAGIWSSCFFEEITNITAFHNVMDLNFWGAVYPTYFALPYLKASRGNIVVTASVAGRVPTARMSFYNASKGAVIRFYETLRAELGSHVHVTILTPGYVVSNLTKGKGLQKDGHVGIDEEARDINVGPMPVGKTESLAEVVVASVRRRDYYVTWPGWYWPFHMVMCAAPELVDWFSRTFYVSKSGDQDGGGGALSKKILEAVGGKKFLYPQTIRSQTAMAANN

SEQ ID NO: 1222 - DNA, 20 bp, Artificial sequence
  primer
atgcatcgcaaggtcttcgc

SEQ ID NO: 1223 - DNA, 21 bp, Artificial sequence
  primer
ctattgcgcgagccgcgccag

SEQ ID NO: 1224 - protein, 277 aa, Artificial sequence
  consensus sequence
  Variant (3)..(4): Xaa in position 3 to 4 is any amino acid
  Variant (5)..(7): Xaa in position 5 to 7 is any or no amino acid
  Variant (11)..(13): Xaa in position 11 to 13 is any amino acid
  Variant (15)..(20): Xaa in position 15 to 20 is any amino acid
  Variant (21)..(23): Xaa in position 21 to 23 is any or no amino acid
  Variant (25)..(41): Xaa in position 25 to 41 is any amino acid
  Variant (42)..(64): Xaa in position 42 to 64 is any or no amino acid
  Variant (66)..(79): Xaa in position 66 to 79 is any amino acid
  Variant (80)..(84): Xaa in position 80 to 84 is any or no amino acid
  Variant (86)..(87): Xaa in position 86 to 87 is any amino acid
  Variant (88)..(89): Xaa in position 88 to 89 is any or no amino acid
  Variant (91)..(94): Xaa in position 91 to 94 is any amino acid
  Variant (98)..(116): Xaa in position 98 to 116 is any amino acid
  Variant (117)..(127): Xaa in position 117 to 127 is any or no amino acid
  Variant (129)..(130): Xaa in position 129 to 130 is any amino acid
  Variant (132)..(154): Xaa in position 132 to 154 is any amino acid
  Variant (155)..(169): Xaa in position 155 to 169 is any or no amino acid
  Variant (171)..(181): Xaa in position 171 to 181 is any amino acid
  Variant (182)..(186): Xaa in position 182 to 186 is any or no amino acid
  Variant (188)..(190): Xaa in position 188 to 190 is any amino acid
  Variant (192)..(192): Xaa in position 192 is any amino acid
  Variant (194)..(203): Xaa in position 194 to 203 is any amino acid
  Variant (205)..(210): Xaa in position 205 to 210 is any amino acid
  Variant (211)..(214): Xaa in position 211 to 214 is any or no amino acid
  Variant (216)..(219): Xaa in position 216 to 219 is any amino acid
  Variant (221)..(221): Xaa in position 221 is any amino acid
  Variant (222)..(224): Xaa in position 222 to 224 is any or no amino acid
  Variant (226)..(242): Xaa in position 226 to 242 is any amino acid
  Variant (243)..(276): Xaa in position 243 to 276 is any or no amino acid
TGXXXXXGIGXXXAXXXXXXXXXGXXXXXXXXXXXXXXXXXXXXXXXXXXXXXXXXXXXXXXXXDXXXXXXXXXXXXXXXXXXXGXXXXDXXXXNAGXXXXXXXXXXXXXXXXXXXXXXXXXXXXXXNXXGXXXXXXXXXXXXXXXXXXXXXXXXXXXXXXXXXXXXXXSXXXXXXXXXXXXXXXXYXXXKXAXXXXXXXXXXEXXXXXXXXXXVXXXXPXXXXTXXXXXXXXXXXXXXXXXXXXXXXXXXXXXXXXXXXXXXXXXXXXXXXXXXXA

SEQ ID NO: 1225 - DNA, 837 bp, ESCHERICHIA COLI
  CDS (1)..(837): transl_table=11
atgaggagtctgcttatgacccgtctggcttcgcgctttggcgcagcaaaccttatccgtcgcgaccgtccgttaacccgtgaagagctgtttcgcgtagtgcccagtgtattcagtgaggacaaacacgagtcccgtagtgagcgttatacctatatacccaccatctccctgctcgacagcctacagcgagaaggcttccagccattctttgcctgtcagacccgcgtgcgtgacccgggtcgtcgtgaacatacaaagcatatgctgcgtctgcggcgggaagggcagatcaccggtaaacaggtgccggaaattattctactcaactctcacgatggaaccagttcgtatcagatgttgccgggactatttcgtgcggtttgtcagaacgggctcgtctgcggtgagtcgtttggcgaggtgcgggtgccacacaagggggacgtggtgagtcaggtgattgaaggcgcgtatgaggtgctggggatttttgaccgggtggaggagaaacgggatgccatgcagtcgttgctgttgccacccccggcacagcaggcactggcaaaagccgccctcacataccgctttggtgaagaccaccagccggtgactgaatcgcagatcctctcccctcgccgctggcaggatgagagcaatgacctgtggaccacgtaccagcgtattcaggagaacctgattaagggcgggctcagtggccgtaatgccaaaggaggacggtcacatacccgtgccgttcgcggtatcgacggggacgtgaaacttaaccgggcactgtgggtgatggcggaagccctgctcacgcaactgcagtaa

SEQ ID NO: 1226 - protein, 278 aa, ESCHERICHIA COLI
MRSLLMTRLASRFGAANLIRRDRPLTREELFRVVPSVFSEDKHESRSERYTYIPTISLLDSLQREGFQPFFACQTRVRDPGRREHTKHMLRLRREGQITGKQVPEIILLNSHDGTSSYQMLPGLFRAVCQNGLVCGESFGEVRVPHKGDVVSQVIEGAYEVLGIFDRVEEKRDAMQSLLLPPPAQQALAKAALTYRFGEDHQPVTESQILSPRRWQDESNDLWTTYQRIQENLIKGGLSGRNAKGGRSHTRAVRGIDGDVKLNRALWVMAEALLTQLQ

SEQ ID NO: 1227 - DNA, 825 bp, Unknown
  Unidentified
  CDS (1)..(825)
atgcaactcgcatcccgtttcgcttcccgctccccggcactgcgcagcgattacccactgtccgatgaccaaatccgcagggtggccccgtccatcttcgccgacgccccgcacgaaagccgttccgagcgatacagctacatccccaccgcgaccgtcctgcaagaactgcgcggagaaggtttcgagcctttcatggtgacgcaaacccgcgtgcgccacgacgaccgccgcgactacaccaagcacatgatccggctgcgccacgccagccagatcaacggccgcgaggccaacgaaatcatcctgctgaactcccatgacggcaccagcagctatcagatgctggccgggatgttccgcttcgtttgcagcaatggccttgtctgcggcgacaccgtggccgacgtgcgcgtgccgcacaagggcgacgtagccgggcacgtcatcgaaggcgcttacgaagtcctgcacggcttcgaccgggtgcaggaatcgcgcgatgccatgcgcgccatcacgctcgacgccggggaatcggaagtgttcgcccgcgctgcgctggcgttgaagtacgacgaggacaagccagcgcccatcacggaatcgcaaatcctgatgccgcgccgccatgacgacgaccgccgcgacctgtggagcgtgttcaaccgcacgcaggagaacttgaccaaaggcggcctgtccgcccgcgccgcgaatggccgccgccagaccacccggcccgtgcagggcatcgaccaaagcgtgcgcctgaatcgcgccctgtggctgctggccgatggcctgcgccagttgaaagcctga

SEQ ID NO: 1228 - protein, 274 aa, Unknown
  Unidentified
MQLASRFASRSPALRSDYPLSDDQIRRVAPSIFADAPHESRSERYSYIPTATVLQELRGEGFEPFMVTQTRVRHDDRRDYTKHMIRLRHASQINGREANEIILLNSHDGTSSYQMLAGMFRFVCSNGLVCGDTVADVRVPHKGDVAGHVIEGAYEVLHGFDRVQESRDAMRAITLDAGESEVFARAALALKYDEDKPAPITESQILMPRRHDDDRRDLWSVFNRTQENLTKGGLSARAANGRRQTTRPVQGIDQSVRLNRALWLLADGLRQLKA

SEQ ID NO: 1229 - DNA, 819 bp, Unknown
  Unidentified
  CDS (1)..(819)
atgcgactagccagtcgttttggttatgcgaaccagatacgccgtgaccgtccgctgacacacgaagaactgatgcactatgtgccggggattttcggggaagataaacacacgtcccgaagccagaactatacgtacatccccaccatcaccgtactggaaagcctgcagcgggaaggctttcagccattcttcgcctgccagacccgtgtgcgcgacccgggccgccggggatacacaaaacacatgctgcgtctgcggcgggccggagagataaacggagaacatgtccctgaaattattctgctcaactctcatgacggtacctccagctaccagatgctgccgggttacttcaggttcgtctgccagaacgggtgcgtctgtggtcagtctctgggggaagtgcgtgttccgcaccggggaaatgtggtggacagagtcattgaaggggcttacgaggtagtgggcgtgtttgaccggattgaggaaaagcgtgatgccatgcagtcgctgattctgccgccaccggcacgccaggcgctggcacaggcggcactgacttaccgttatggtgacgaacatcagcccgtcaccaccgccgacattctgacgccacgacgccgggaggattacggtaaggacctgtggagtgcttatcagaccattcaggagaatatgctgaaaggcggaatttcaggtcgcagcgctaaaggaaaacgtatccatacccgtgccattcacagcattgacactgacattaagctcaaccgcgcattgtgggtgatggcggaaaccctgctggagagcctgcgctga

SEQ ID NO: 1230 - protein, 272 aa, Unknown
  Unidentified
MRLASRFGYANQIRRDRPLTHEELMHYVPGIFGEDKHTSRSQNYTYIPTITVLESLQREGFQPFFACQTRVRDPGRRGYTKHMLRLRRAGEINGEHVPEIILLNSHDGTSSYQMLPGYFRFVCQNGCVCGQSLGEVRVPHRGNVVDRVIEGAYEVVGVFDRIEEKRDAMQSLILPPPARQALAQAALTYRYGDEHQPVTTADILTPRRREDYGKDLWSAYQTIQENMLKGGISGRSAKGKRIHTRAIHSIDTDIKLNRALWVMAETLLESLR

SEQ ID NO: 1231 - DNA, 819 bp, Unknown
  Unidentified
  CDS (1)..(819)
atgcgattagccagccgttttggttatgtaaatcagatccgccgggagcgcccgctgacacgcgaagaactgatgtaccacgtcccgagtatttttgcggaagaccggcacacctcccgcagtgaacggtatgcgtacattcccaccatcaccgtcctggaaaatctgcagcgggaaggctttcagccgttcttcgcctgccagacccgtgtgcgcgaccagagccgccgggaatataccaaacatatgctgcgtctgcgacgggccggacagataaccggtcagcatgtgcctgaaattattctgctcaactcccatgacggttcatccagctaccagatgttacccggatattttcgtgccatctgcaccaatggcctggtctgcggtcagtcgctgggagaagtccgggtgccacaccggggaaacgtggtggacagtgtgattgaaagtgcttacgaggtggtgggggtttttgaccggattgaagaaaagcgtgacgccatgcagtcgctggtcctgccgccaccgtcacgccaggcgctggcacaggcggcactgacttaccgttatggtgacgaacatcagcccgtcaccaccgccgacattctgacgccacgacgccgggaggattacggtaaggacctgtggagtgcttatcagaccatccaggagaatatgctgaaaggcgggatttccggtcgcagtgccagaggaaaacgtatccatacccgtaccattcacagcatcgacaccgacattaagctcaaccgggcgttgtgggtgatggcagaaacactgctggagagcatgcgctga

SEQ ID NO: 1232 - protein, 272 aa, Unknown
  Unidentified
MRLASRFGYVNQIRRERPLTREELMYHVPSIFAEDRHTSRSERYAYIPTITVLENLQREGFQPFFACQTRVRDQSRREYTKHMLRLRRAGQITGQHVPEIILLNSHDGSSSYQMLPGYFRAICTNGLVCGQSLGEVRVPHRGNVVDSVIESAYEVVGVFDRIEEKRDAMQSLVLPPPSRQALAQAALTYRYGDEHQPVTTADILTPRRREDYGKDLWSAYQTIQENMLKGGISGRSARGKRIHTRTIHSIDTDIKLNRALWVMAETLLESMR

SEQ ID NO: 1233 - DNA, 819 bp, Unknown
  Unidentified
  CDS (1)..(819)
atgcgattagccagtcgttttggttatgcgaaccaggtacgtcgtgatcgtccgctgacacacgaagaactgatgcgccatgtaccgagtatttttggggaagaccgacatacctcccgcagtgaacactatgcgtacattcccactatcaccgtcctggaaaatctgcagcaggaaggctttcagccattcttcgcctgccagacccgcgtacgtgacccgggccgccggggatacacaaaacacatgctgcgcctgcgccgtaacggggagataaacggacaacatgtccctgaaattattctgctcaactcccatgacggtacctccagctaccagatgctgccgggttacttcagattcgtctgccagaacggctgcgtctgcggtcagtctctgggggaagtccatgtgccccaccggggaaatgtggtggacagagtcattgaaggggctcacgaggtagtgggcgtttttgaccggattgaggaaaagcgtgatgccatgcagtctctggttctgccgccaccggcacgtcaggcactggcacaggcggcgctgacttaccgttatggtgatgaacatcaacccgtcaccactgccgacattctgacaccacgacgccgggaggattacggtaaggacctgtggagcgcatatcagaccatccaggagaatatgctgaaaggcgggatttccggccgtagtgcaaaaggaaaacgtatccatacccgcgccattcacagtatcgacaccgacatcaagctcaatcgcgcattgtgggtgatggcggaaacgctgctggagagcatgcgctga

SEQ ID NO: 1234 - protein, 272 aa, Unknown
  Unidentified
MRLASRFGYANQVRRDRPLTHEELMRHVPSIFGEDRHTSRSEHYAYIPTITVLENLQQEGFQPFFACQTRVRDPGRRGYTKHMLRLRRNGEINGQHVPEIILLNSHDGTSSYQMLPGYFRFVCQNGCVCGQSLGEVHVPHRGNVVDRVIEGAHEVVGVFDRIEEKRDAMQSLVLPPPARQALAQAALTYRYGDEHQPVTTADILTPRRREDYGKDLWSAYQTIQENMLKGGISGRSAKGKRIHTRAIHSIDTDIKLNRALWVMAETLLESMR

SEQ ID NO: 1235 - DNA, 819 bp, Unknown
  Unidentified
  CDS (1)..(819)
atgcaattagccagtcgttttggtcatgtaaatcagatccgtcgggagcgcccactgacacgcgaagaactgatgtaccacgtcccgagtatttttggagaagaccggcacacctcccgcagtgaacggtatgcgtacattcccaccatcaccgtcctggaaaatctgcagcgggaaggctttcagccgttcttcgcctgccagacccgtgtgcgcgaccagagccgccgggaatataccaaacatatgctgcgtctgcggcgggccggacagataaccggtcagcatgtgcctgaaattattctgctcaactcccatgacggttcatccagctaccagatgttacccggatattttcgtgccatttgtaccaatggcctggtctgcggtcagtcgctgggagaagtccgggtgccacaccggggaaacgtggtggacagggtcatagaaggtgcttacgaagtggtgggcgtgtttgacctgattgaggaaaagcgtgatgccatgcagtcgctggtcctgccgccaccggcacgccaggcgctggcacaggcggcgctgacttaccgttatggtgatgaacatcagcccgtcaccactaccgacattctgacgccacgacgccgggaggattacggtaaggacctgtggagtgcttatcagaccatccaggagaatatgctgaaaggcgggatttccgctcgcagtgccagaggaaaacgtatccatacccgggccattcacagcatcgataccgacattaagctcaaccgggcgttgtgggtgatggcagaaacgctgctggagagcctgcgctga

SEQ ID NO: 1236 - protein, 272 aa, Unknown
  Unidentified
MQLASRFGHVNQIRRERPLTREELMYHVPSIFGEDRHTSRSERYAYIPTITVLENLQREGFQPFFACQTRVRDQSRREYTKHMLRLRRAGQITGQHVPEIILLNSHDGSSSYQMLPGYFRAICTNGLVCGQSLGEVRVPHRGNVVDRVIEGAYEVVGVFDLIEEKRDAMQSLVLPPPARQALAQAALTYRYGDEHQPVTTTDILTPRRREDYGKDLWSAYQTIQENMLKGGISARSARGKRIHTRAIHSIDTDIKLNRALWVMAETLLESLR

SEQ ID NO: 1237 - DNA, 819 bp, Salmonella typhimurium
  CDS (1)..(819): transl_table=11
atgagactcgcttcccgttttggtagacagaattccattcgtcgtgagagtcctttggctgacgctgaattaatgcagactgtgccttcagttttttccggagacaaacatgaatcccggagcgaacgttatacttatattccaaccattaatatcatcaacaggttacgtgaggaaggttttcagtcgttctttgcctgccagagtcgtgtacgtgatttaagtcgccgggaatacagtaaacatatgctgcgttttcgtcgtgaaggacagattaatgggaaagaggttccggaaattattttgctcaattctcatgacggttcgtcaagttatcagatggttcccgggctgttcagatttatctgtacaaatggactggtatgcggatcatttggtgaaatacgtgtgccacacaagggagatattgttgggcaggtgattgagggggattatgaggttatggggatcttcgataaagccaccgaaaatatggagtcaatgaagtcagtgatacttaatcaggatgagcaatatctgtttggtaaagcggcactgactgtcagatatgaggacgaaaataaaatccctgtttctcctgaacaaataattactccacgtcgtcgggaagataaacaaaatgacctgtggacaacatatcagcgtgtacagaagaatatgatgaagagtgggttacccggcaggaatgcctccggaaaaaacacccggatcagggcagttaccggtattaatggtgatatccggttaaacaaggcgctgtggatgattgctgaacagtttcgtgaatgtaagtcataa

SEQ ID NO: 1238 - protein, 272 aa, Salmonella typhimurium
MRLASRFGRQNSIRRESPLADAELMQTVPSVFSGDKHESRSERYTYIPTINIINRLREEGFQSFFACQSRVRDLSRREYSKHMLRFRREGQINGKEVPEIILLNSHDGSSSYQMVPGLFRFICTNGLVCGSFGEIRVPHKGDIVGQVIEGDYEVMGIFDKATENMESMKSVILNQDEQYLFGKAALTVRYEDENKIPVSPEQIITPRRREDKQNDLWTTYQRVQKNMMKSGLPGRNASGKNTRIRAVTGINGDIRLNKALWMIAEQFRECKS

SEQ ID NO: 1239 - DNA, 822 bp, Escherichia coli; 0157:H7
  CDS (1)..(822)
atgcgattagccagtcgttttggttatgctgcaaaccagatacgccgtgaccgtccgctgacacatgaagaactgatacgccatgtacccagtatttttggggaagaccggcacacctcccgcagtgaacggtatgcgtacattcccaccattaccgtcctggaaaatctgcagcgggaaggctttcagccgttcttcgcctgccagacccgtgtgcgcgacccgggccgccggggatacacaaaacacatgctgcgtctgcggcgggccggagagataaacggagaacatgtccctgaaattattctgctcaactctcatgacggtacctccagctaccagatgctgccgggttacttcaggttcgtctgccagaacgggtgcgtctgtggccagtctctgggggaagtgcgtgttccacaccggggaaatgtagtggagaaagttatcgaaggggcttacgaggtggtgggcgtgtttgaccggatagaggagaagcgtgatgccatgcagtcgctggtcctgccgcaaccggcacgccaggcgctggcacaggcggcactgacttaccgttatggtgacgaacatcagcccgtcaccaccgccgacattctgacgccgcgacgccgggaggattacggtaaggacctgtggagcgcatatcagaccatccaggagaatatgctgaaaggcgggatttccggtcgcagtgcaaaaggaaaacgtatccatacccgggccattcacagcattgataccgacattaagctcaatcgcgcattgtgggtgatggcagaaacgatgctggagagcctgcgctga

SEQ ID NO: 1240 - protein, 273 aa, Escherichia coli; 0157:H7
MRLASRFGYAANQIRRDRPLTHEELIRHVPSIFGEDRHTSRSERYAYIPTITVLENLQREGFQPFFACQTRVRDPGRRGYTKHMLRLRRAGEINGEHVPEIILLNSHDGTSSYQMLPGYFRFVCQNGCVCGQSLGEVRVPHRGNVVEKVIEGAYEVVGVFDRIEEKRDAMQSLVLPQPARQALAQAALTYRYGDEHQPVTTADILTPRRREDYGKDLWSAYQTIQENMLKGGISGRSAKGKRIHTRAIHSIDTDIKLNRALWVMAETMLESLR

SEQ ID NO: 1241 - DNA, 819 bp, Escherichia coli O157:H7 EDL933
  CDS (1)..(819): transl_table=11
atgagattagccagtcgttttggttatgcgaaccagatacgtcgtgatcgtccgctgacacacgaagaactgatgcgccatgtaccgagtatttttggggaaaaccgacatacctctcgcagtgaacactatgcgtacattcccactatcaccgtcctggaaaatctgcagcaggaaggctttcagccgttctttgcctgccagacccgcgtgcgcgaccagagccgccgggaatacacaaaacacatgctgcgtctgcggcgggccggacagataaccggtcagcatgtccctgaaattattctgctcaactcccatgacggttcatccagctaccagatgttacccggatattttcgtgccatttgtaccaatggactggtctgcggtcagtctctgggagaattgcgtgttccacaccggggaaatgtggtggacagagtcattgaaggggcttacgaggtggtgggcgtttttgaccggatagaggagaagcgtgatgccatgcagtcgctggtcctgccgccaccggcacgccaggcgctggcacaggcggcactgacttaccgttatggtgacgaacatcagcccgtcaccaccgccgacattctgacaccacgacgccgggaggattacggtaaggacctgtggagtgcttatcagaccatccaggagaatatgctgaaaggcgggatttccggtcgcagtgcaaaaggaaaacgtatccatacccgggccattcacagcattgataccgacattaagctcaatcgcgcattgtgggtgatggcagaaacgctgctggagagcatgcgctga

SEQ ID NO: 1242 - protein, 272 aa, Escherichia coli O157:H7 EDL933
MRLASRFGYANQIRRDRPLTHEELMRHVPSIFGENRHTSRSEHYAYIPTITVLENLQQEGFQPFFACQTRVRDQSRREYTKHMLRLRRAGQITGQHVPEIILLNSHDGSSSYQMLPGYFRAICTNGLVCGQSLGELRVPHRGNVVDRVIEGAYEVVGVFDRIEEKRDAMQSLVLPPPARQALAQAALTYRYGDEHQPVTTADILTPRRREDYGKDLWSAYQTIQENMLKGGISGRSAKGKRIHTRAIHSIDTDIKLNRALWVMAETLLESMR

SEQ ID NO: 1243 - DNA, 831 bp, Ralstonia solanacearum GMI1000
  CDS (1)..(831): transl_table=11
atgcaactcgcatcccgtttcgcttcccgttccccctcgctgcgtagcgattacccgctgaccgatgaccagattcaccgcgtggctccgtccatcttcgcggacgcgccgcatgaaagccgttcgcagcggtacgcctacatccccaccgccgccgtgctggccgaactgcgcaaggaggggtttcaacccttcatggtgacgcaaacccgcgtgcgcgacgaaggcaagcgcgagcacaccaaacacatgctgcgcctgcgccacgcaagccagatcaacggcgcggaagccaatgaaatcgtgttgctcaattcccatgacgggacgagcagttatcagatgctggccggaatgttccggttcgtgtgcagcaatggccttgtatgcggcgacaccgtggccgatgtgcgcgtgccccacaagggcgacgtttccgggcatgtcatcgaaggcgcttacgaagtcttgcgcggcttcgaccgggtgaaggattcccgcgatgccatgcgcgctatcacgctggacgaaggcgaagccaaagtgttcgcccgttccgcgctggccttgaagtacgaccccaccgacaacagacccgcgcccatcacggaaagccaaatcctgatgccgcgccggttcgacgaccgtcgcccggacttgtggagcgtgttcaaccgcacccaagagaacctgaccaaaggcggattgcatggccgcagcgtcaacggacgccgccagcaaacccgcccggtgcagggcattgattccgatgtgcgcctcaatcgcgccctctggatgctggccgatggcctgcgccagttgaaagcctga

SEQ ID NO: 1244 - protein, 276 aa, Ralstonia solanacearum GMI1000
MQLASRFASRSPSLRSDYPLTDDQIHRVAPSIFADAPHESRSQRYAYIPTAAVLAELRKEGFQPFMVTQTRVRDEGKREHTKHMLRLRHASQINGAEANEIVLLNSHDGTSSYQMLAGMFRFVCSNGLVCGDTVADVRVPHKGDVSGHVIEGAYEVLRGFDRVKDSRDAMRAITLDEGEAKVFARSALALKYDPTDNRPAPITESQILMPRRFDDRRPDLWSVFNRTQENLTKGGLHGRSVNGRRQQTRPVQGIDSDVRLNRALWMLADGLRQLKA

SEQ ID NO: 1245 - DNA, 828 bp, Pseudomonas putida
  CDS (1)..(828): transl_table=11
atgcgtctatccagcaacttccgtaacccttgcatggtccgcagcgacagcccactgagcaatgacgagatcgcccgcgtagcaccctcgatctttgccgaggaagcgcacgaaagccgctccgatcgctaccgctacattcccaccgtcgacgtactcgaagcgctgcgcagtgaggggttcatgccgttcatggcctgccaaactcgcgtgcgcaacaccgacaagcgcgaacacaccaagcacatgatccgcctgcgtcacgccaataccatcgtggccaaggaagccaacgaaatcatcctgctgaacagccacgacggcaccagcagctaccaaatgatgggcggttgcttccgtttcgtatgcgccaacggcctggtgctgggcgaggccgcgatggaccagaaagtgcgccacagcggtcgccaggatgttatcggggatgtgatcgagggcgcgtatgaagtcctgaatcaattcgagctgatcgaggatcagcgcgaaaccatgaaaggcatccagctgggcaacgacctgcagcacgctttcgccgaggcagcacttgcctaccgctatgacccagcggacggcccagcgccggtaactgcaagccagctgctggcaccgcgtcgccgcgaagacgccaccaatgacctttggtcgaccttcaaccgcgtacaggaaaacaccatcaaaggagggctgcgaggccgcaacaaacaagggcgccgtaccagcacccgtgccgtttccggcattgaccaggacgtgaaactcaatcgcgccctgtgggttctggcccagcacctgcgccaagccgcctaa

SEQ ID NO: 1246 - protein, 275 aa, Pseudomonas putida
MRLSSNFRNPCMVRSDSPLSNDEIARVAPSIFAEEAHESRSDRYRYIPTVDVLEALRSEGFMPFMACQTRVRNTDKREHTKHMIRLRHANTIVAKEANEIILLNSHDGTSSYQMMGGCFRFVCANGLVLGEAAMDQKVRHSGRQDVIGDVIEGAYEVLNQFELIEDQRETMKGIQLGNDLQHAFAEAALAYRYDPADGPAPVTASQLLAPRRREDATNDLWSTFNRVQENTIKGGLRGRNKQGRRTSTRAVSGIDQDVKLNRALWVLAQHLRQAA

SEQ ID NO: 1247 - DNA, 819 bp, Shigella flexneri 2a str. 301
  CDS (1)..(819): transl_table=11
atgcaattagtcagtcgttttggttatgcgaaccagatacgccgtgaccgtccgctgacacatgaagagctgatgcaccatgtgccggggattttcggggaagagaaacacacgtcccgaagccagaactatacgtacatccccaccatcaccgtactggaaagtctgcagcgggaaggcttccagccctttttcgcctgccagacccgtgtgcgcgacccgggccgccggggatacacaaaacacatgctgcgtctgcggcgggccggagagataaacggagaacatgtccctgaaattattctgctcaactcccatgacggtacctccagctaccagatgctgccgggttacttcagattcgtctgccagaacgggtgtgtctgtggtcagtctctgggggaagtgcgtgttccgcaccggggaaacgtggtggagaaagttattgaaggggcttacgaagtggtgggcgtgtttgaccggattgaggagaaacgtgatgccatgcagtcgctggtcctgccgccaccggcacgccaggcgctggcacaggcggcactgacttaccgttatggtgacgaacatcagcccgtcaccaccgccgacattctgacgccacgacgccgggaggattacggtaaggacctgtggagtacttatcagaccatccaggagaatatgctgaaaggcgggatttccggccgcagtgcaaaaggaaaacgtatccacacccgtgccattcacaacatcgacaccgatattaagctcaaccgcgcattgtgggtgatggcagaaacgctgctggagagcctgcgctga

SEQ ID NO: 1248 - protein, 272 aa, Shigella flexneri 2a str. 301
MQLVSRFGYANQIRRDRPLTHEELMHHVPGIFGEEKHTSRSQNYTYIPTITVLESLQREGFQPFFACQTRVRDPGRRGYTKHMLRLRRAGEINGEHVPEIILLNSHDGTSSYQMLPGYFRFVCQNGCVCGQSLGEVRVPHRGNVVEKVIEGAYEVVGVFDRIEEKRDAMQSLVLPPPARQALAQAALTYRYGDEHQPVTTADILTPRRREDYGKDLWSTYQTIQENMLKGGISGRSAKGKRIHTRAIHNIDTDIKLNRALWVMAETLLESLR

SEQ ID NO: 1249 - DNA, 822 bp, Escherichia coli CFT073
  CDS (1)..(822): transl_table=11
atgcgattagccagttgttttggttatgctgcgaaccagatacgccgtgaccgtccactgacacatgaagagctgatgcaccatgtgccggggattttcggggaagagaaacacacgtcccgaagccagaactatacgtacatccccaccatcaccgtactggaaagcctgcagcgggaaggctttcagccattcttcgcctgccagacctgtgtgcgcgacccgggccgccggggatacacaaaacacatgctgcgcctgcgccgtaacggagagataaacggagaacatgtccctgaaattattctgctcaactctcatgacggtacctccagctaccagatgctgccgggttacttcaggttcgtctgccagaacggatgcgtctgtggtcagtctctgggggaagtgcgtgttccgcaccggggaaatgtggtggacagagtcattgaaggggcttacgaggtggtgggcgtgtttgaccggatagaggagatgcgtgatgccatgcagtcgctgattctgccgccaccggcacgccaggcgctggcacaggcggcactgacttaccgttatggtgacgaacatcggcccgtcaccaccgccgacattctgacgccacgacgccgggaggattacggtaaggacctgtggagtacttatcagaccatccaggagaatatgctgaaaggcgggatttccggtcgcagtgcaaaaggaaaacgtatccacacccgtgccattcacagcatcgacaccgatattaagctcaaccgcgcattgtgggtaatggcagaaacgctgctggagagccagcgctga

SEQ ID NO: 1250 - protein, 273 aa, Escherichia coli CFT073
MRLASCFGYAANQIRRDRPLTHEELMHHVPGIFGEEKHTSRSQNYTYIPTITVLESLQREGFQPFFACQTCVRDPGRRGYTKHMLRLRRNGEINGEHVPEIILLNSHDGTSSYQMLPGYFRFVCQNGCVCGQSLGEVRVPHRGNVVDRVIEGAYEVVGVFDRIEEMRDAMQSLILPPPARQALAQAALTYRYGDEHRPVTTADILTPRRREDYGKDLWSTYQTIQENMLKGGISGRSAKGKRIHTRAIHSIDTDIKLNRALWVMAETLLESQR

SEQ ID NO: 1251 - DNA, 822 bp, Escherichia coli CFT073
  CDS (1)..(822): transl_table=11
atgcgattagccagtcgttttggttatactgcaaaccagatacgtcgtgaccgtccactgacacatgaagagctgatgcaccatgtgccggggattttcggggaagagaaacacacgtcccgaagccagaactatacgtacatccccaccatcaccgtactggaaagcctgcagcgggaaggctttcagccattcttcgcctgccagacccgtgtgcgcgacccgggccgccggggatacaccaaacacatgctgcgtctgcggcgggccggagagataaacggagagcatgtccctgaaattattctgctcaactctcatgacggtacctccagctaccagatgctgccgggttacttcaggttcgtctgccagaacggctgcgtctgtggtcagtctctgggggaagtgcgtgttccacaccggggagacgtagtggagaaagttattgaaggggcttacgaggtggtgggcgtgtttgaccggatagaggagaagcgtgatgccatgcagtcgctggtcctgccgccaccggcacgccaggcgctggcacaggcggcactgacttaccgttatggtgacgaacatcagcccgtcaccaccgccgacattctgacgccacgacgccgggaggattacggtaaggacctgtggagtgcttatcagaccatccaggagaatatgctgaaaggcgggatttccggtcgcagtgcaaaaggaaaacgtatccatacccgggccattcacagcattgataccgacattaagctcaaccgtgcattgtgggtgatggcagaaacgatgctggagagcctgcgctga

SEQ ID NO: 1252 - protein, 273 aa, Escherichia coli CFT073
MRLASRFGYTANQIRRDRPLTHEELMHHVPGIFGEEKHTSRSQNYTYIPTITVLESLQREGFQPFFACQTRVRDPGRRGYTKHMLRLRRAGEINGEHVPEIILLNSHDGTSSYQMLPGYFRFVCQNGCVCGQSLGEVRVPHRGDVVEKVIEGAYEVVGVFDRIEEKRDAMQSLVLPPPARQALAQAALTYRYGDEHQPVTTADILTPRRREDYGKDLWSAYQTIQENMLKGGISGRSAKGKRIHTRAIHSIDTDIKLNRALWVMAETMLESLR

SEQ ID NO: 1253 - DNA, 822 bp, Escherichia coli CFT073
  CDS (1)..(822): transl_table=11
atgcgattagcaagtcgttttggttatgctgcaaaccagatacgtcgtgaccgtccactgacacatgaagagctgatgcaccatgtgccggggattttcggggaagagaaacacacgtcccgaagccagaactatacgtacatccccaccatcaccgtactggaaaatctgcagcgggaaggctttcagccgttcttcgcctgccagacccgtgtgcgcgaccagagccgccgggaatataccaaacatatgctgcgtctgcggcgggccggacagataaccggtcagcatgtgcctgaaattattctgctcaactcccatgacggttcatccagctaccagatgttacccggatattttcgtgccatttgtaccaatggcctggtctgcggtcagtcgctgggagaagtccgggtgccacaccggggaaacgtggtggacagggtcatagaaggtgcttacgaagtggtgggcgtgtttgacctgattgaggaaaagcgtgatgccatgcagtcgctggtcctgccgccaccggcacgccaggcgctggcacaggcggcgctgacttaccgttatggtgatgaacatcagcccgtcaccactaccgacattctgacgccacgacgccgggaggattacggtaaggacctgtggagtgcttatcagaccatccaggagaatatgctgaaaggcgggatttccggtcgcagtgccagaggaaaacgtatccatacccgggccattcacagcatcgataccgacattaagctcaaccgggcgttgtgggtgatggcagaaacgctgctggagagcctgcgctga

SEQ ID NO: 1254 - protein, 273 aa, Escherichia coli CFT073
MRLASRFGYAANQIRRDRPLTHEELMHHVPGIFGEEKHTSRSQNYTYIPTITVLENLQREGFQPFFACQTRVRDQSRREYTKHMLRLRRAGQITGQHVPEIILLNSHDGSSSYQMLPGYFRAICTNGLVCGQSLGEVRVPHRGNVVDRVIEGAYEVVGVFDLIEEKRDAMQSLVLPPPARQALAQAALTYRYGDEHQPVTTTDILTPRRREDYGKDLWSAYQTIQENMLKGGISGRSARGKRIHTRAIHSIDTDIKLNRALWVMAETLLESLR

SEQ ID NO: 1255 - DNA, 819 bp, Escherichia coli CFT073
  CDS (1)..(819): transl_table=11
atgcgactagccagtcgttttggttatgcgaaccagatacgccgtgaccgtccgctgacacacgaagaactgatgcactatgtgccggggattttcggggaagataaacacacgtcccgaagccagaactatacgtacatccccaccatcaccgtactggaaagcctgcagcgggaaggctttcagccattcttcgcctgccagacccgtgtgcgcgacccgggccgccggggatacacaaaacacatgctgcgtctgcggcgggccggagagataaacggagaacatgtccctgaaattattctgctcaactctcatgacggtacctccagctaccagatgctgccgggttacttcaggttcgtctgccagaacgggtgcgtctgtggtcagtctctgggggaagtgcgtgttccgcaccggggaaatgtggtggacagagtcattgaaggggcttacgaggtagtgggcgtgtttgaccggattgaggaaaagcgtgatgccatacagtcgctgattctgccgccaccggcacgccaggcgctggcacaggcggcactgacttaccgttatggtgacgaacatcagcccgtcaccaccgccgacattctgacgccacgacgccgggaggattacggtaaggacctgtggagtgcttatcagaccattcaggagaatatgctgaaaggcggaatttcaggtcgcagcgctaaaggaaaacgtatccatacccgtgccattcacagcattgacactgacattaagctcaaccgcgcattgtgggtgatggcggaaaccctgctggagagcctgcgctga

SEQ ID NO: 1256 - protein, 272 aa, Escherichia coli CFT073
MRLASRFGYANQIRRDRPLTHEELMHYVPGIFGEDKHTSRSQNYTYIPTITVLESLQREGFQPFFACQTRVRDPGRRGYTKHMLRLRRAGEINGEHVPEIILLNSHDGTSSYQMLPGYFRFVCQNGCVCGQSLGEVRVPHRGNVVDRVIEGAYEVVGVFDRIEEKRDAIQSLILPPPARQALAQAALTYRYGDEHQPVTTADILTPRRREDYGKDLWSAYQTIQENMLKGGISGRSAKGKRIHTRAIHSIDTDIKLNRALWVMAETLLESLR

SEQ ID NO: 1257 - DNA, 837 bp, Pseudomonas syringae pv. tomato str. DC3000
  CDS (1)..(837): transl_table=11
atgcgtatgtccagcaacttccgtaacccatgcatgatccgcagtgacgtcccactgagcaacgatcagatcgcccactatgtgccttccatcttcgccgaagaagcgcacgacagcaggtcggcacgttatctgtatatcccgaccgtgcaggtacttgatgcgctgcgcgccgaaggatttgaaccattcatggcctgtcagacacgcgtgcgtgaccagggcaaacgtgagcacaccaagcacatgctgcgcctgcgccatgcgagccagatcctggaccaggaagccaacgaagtcatcctgctcaacagccacgatggcagcagcagctatcagatgattggaggcaaattccgtttcgtgtgtgcaaacggactggtactgggggacgttgctgctgaccagaaagtgcgccatagcggccgtggtgatgtggtgcatgacgtgatcgaaggcgccttcgaagtgttgaagcatttcgaacagatcgaccacatcaccgctgacatgaagcatcaacaattagaccaggacgagcaagaggcctttgcattggctgccttggcgtatcgctacgatccggcagaaggacctgcgcctgttaccccgtcccagttgctcatgccacgccgtcgggaggaccgtagcagcgacctttggaccaccttcaatcgagtccaggaaaacaccatcaaaggcggtttgaccgggcgtaacaagcaaggccgacgcacgaccacgcgagcggtcaatgggattgatcaggacgtgaaactgaaccgggccttgtgggtgcttgcgcaggctatgggtgagcacagaaaagccgcttaa

SEQ ID NO: 1258 - protein, 278 aa, Pseudomonas syringae pv. tomato str. DC3000
MRMSSNFRNPCMIRSDVPLSNDQIAHYVPSIFAEEAHDSRSARYLYIPTVQVLDALRAEGFEPFMACQTRVRDQGKREHTKHMLRLRHASQILDQEANEVILLNSHDGSSSYQMIGGKFRFVCANGLVLGDVAADQKVRHSGRGDVVHDVIEGAFEVLKHFEQIDHITADMKHQQLDQDEQEAFALAALAYRYDPAEGPAPVTPSQLLMPRRREDRSSDLWTTFNRVQENTIKGGLTGRNKQGRRTTTRAVNGIDQDVKLNRALWVLAQAMGEHRKAA

SEQ ID NO: 1259 - DNA, 837 bp, Pseudomonas syringae pv. tomato str. DC3000
  CDS (1)..(837): transl_table=11
atgcgtatgtccagcaacttccgtaacccatgcatgatccgcagtgacgtcccactgagcaacgatcagatcgcccactatgtgccttccatctttgccgaagaagcgcacgacagcaggtcggcacgttatctgtatatcccgaccgtgcaggtacttgatgcgctgcgcgccgaaggatttgaaccattcatggcctgtcagacacgcgtgcgtgaccagggcaaacgtgagcacaccaagcacatgctgcgcttgcgccatgcgagccagatcctggaccaggaagccaacgaaatcatccttctcaacagccacgatggcagcagcagctatcaaatgattggaggcaaattccgtttcgtgtgtgcaaacggactggtactgggggacgttgccgctgaccagaaagtgcgccatagcggccgtggtgatgtggtaaatgacgtgatcgaaggcgccttcgaagtgttgaagcatttcgaacagatcgaccacataaccgccgacatgaagcatcaacaattagaccaggacgagcaagaggcctttgcattggctgccttggcgtatcgctacgatccggcagaaggacctgcgcctgttaccccgtcccagttgctcatgccccgccgtcgtgaggaccgcagcagcgacctttggaccacgttcaatcgagtccaggaaaacaccataaaaggcggtttgaccgggcgcaacaagcaaggccgacgcacgacaacgagggcagttaatggcattgatcaggatgtgaaattgaatcgcgcactgtgggtgctcgcacaggctctgcaaggccgtcagctcgccgcctaa

SEQ ID NO: 1260 - protein, 278 aa, Pseudomonas syringae pv. tomato str. DC3000
MRMSSNFRNPCMIRSDVPLSNDQIAHYVPSIFAEEAHDSRSARYLYIPTVQVLDALRAEGFEPFMACQTRVRDQGKREHTKHMLRLRHASQILDQEANEIILLNSHDGSSSYQMIGGKFRFVCANGLVLGDVAADQKVRHSGRGDVVNDVIEGAFEVLKHFEQIDHITADMKHQQLDQDEQEAFALAALAYRYDPAEGPAPVTPSQLLMPRRREDRSSDLWTTFNRVQENTIKGGLTGRNKQGRRTTTRAVNGIDQDVKLNRALWVLAQALQGRQLAA

SEQ ID NO: 1261 - DNA, 822 bp, Escherichia coli
  CDS (1)..(822): transl_table=11
atgcgattagcttcccgttttggtcggtataattccatccgccgtgaacgtcctttaacggatgatgaattaatgcagttcgtgccttcggtattttccggtgataaacatgagtcccggagtgaacgttatacgtatattccaacaatcaatatcatcaataagttacgtgatgaaggtttccagccattctttgcctgtcagagtcgggttcgtgatttgggacgtcgcgaatacagtaaacatatgttacgtcttcgcagggaagggcatattaacggacaggaagttcctgaaattatcctgcttaattcacatgatggttcatccagttatcagatgatccccggaatttttcgttttgtctgcacaaatggcctggtgtgcggaaataattttggcgaaatccgcgttccacataaaggtgatattgtcgggcaggttatcgagggagcgtatgaagtgctcggtgtctttgataaggtcactgataatatggaggcgatgaaagaaattcatcttaacagtgacgagcaacatttatttggcagagctgcactgatggtcaggtatgaagatgaaaataaaacgccagtgacacctgaacagataattactccccgtcgtcgggaagacaaacagaacgatctctggacaacctggcagcgggttcaggagaatatgataaaaggtggattatcggggcgaagtgcctccgggaaaaataccaggacaagagccattacaggtattgatggtgatataagaatcaacaaggcgttatgggtgattgccgaacagttcagaaagtggaagtcatga

SEQ ID NO: 1262 - protein, 273 aa, Escherichia coli
MRLASRFGRYNSIRRERPLTDDELMQFVPSVFSGDKHESRSERYTYIPTINIINKLRDEGFQPFFACQSRVRDLGRREYSKHMLRLRREGHINGQEVPEIILLNSHDGSSSYQMIPGIFRFVCTNGLVCGNNFGEIRVPHKGDIVGQVIEGAYEVLGVFDKVTDNMEAMKEIHLNSDEQHLFGRAALMVRYEDENKTPVTPEQIITPRRREDKQNDLWTTWQRVQENMIKGGLSGRSASGKNTRTRAITGIDGDIRINKALWVIAEQFRKWKS

SEQ ID NO: 1263 - DNA, 828 bp, Pseudomonas putida
  CDS (1)..(828): transl_table=11
atgcgtctatccagcagcttccgcaacccttgcatggttcgcagcaacacccctttgactaacgacgaaatcgcgcgtgtcgcgccgtccatctttgccgtcgaagcgcacgacagccgctccgatcgctaccgctacatcccaaccgtcgacgtgcttaccgcgctgcgcgcagaagggttcgaacccttcatggcttgccaaacccgcgtgcgtaactccgacaagatccagcacaccaaacacatgatccgcctgcgccatgcgtccaacatcatggacaaggaagccaacgaaatcatcctgctcaacagccacgatggcaccagcagttatcaaatgatgggcgggtgcttccgctttgtgtgcgccaacggccttgtcctgggcgaagccgcgatggatcagaaagtccgtcacagcggtcgacaagacgtaatcggcgaagtcatcgagggggcatatgaggtgctggaccaattcgcactgatcgaggatcagcgcgaaaccatgaagcaaatccagattcgccccgagctgcaacacgctttcgccgaagctgcattagcgtaccgctacgacccagccgaaggcccggcgcctgtgacagcttcacagctgctcatgcctcgccgccgtgaagatcgcaccgatgatctctggaccacattcaaccgcgtacaggaaaactccatcaagggagggcttacaggtcgcaacaagcaaggtcgccgcaccagtacccgcgccgtcaccggcattgaccaggacgtgaagctaaatcgcgccctttgggttctggctcagcacattcgcgaagccgcctaa

SEQ ID NO: 1264 - protein, 275 aa, Pseudomonas putida
MRLSSSFRNPCMVRSNTPLTNDEIARVAPSIFAVEAHDSRSDRYRYIPTVDVLTALRAEGFEPFMACQTRVRNSDKIQHTKHMIRLRHASNIMDKEANEIILLNSHDGTSSYQMMGGCFRFVCANGLVLGEAAMDQKVRHSGRQDVIGEVIEGAYEVLDQFALIEDQRETMKQIQIRPELQHAFAEAALAYRYDPAEGPAPVTASQLLMPRRREDRTDDLWTTFNRVQENSIKGGLTGRNKQGRRTSTRAVTGIDQDVKLNRALWVLAQHIREAA

SEQ ID NO: 1265 - DNA, 822 bp, Escherichia coli
  CDS (1)..(822): transl_table=11
atgcgattagcttcccgttttggtcgatataattctattcgccgtgagcgcccgttaacggatgacgaattaatgcagtttgttccatctgtcttttctggtgataaacatgaatcccggagtgagcgttatacatatatcccaaccatcaatatcatcaataagttacgtgatgaaggtttccagccattctttgcctgtcagagtcgggttcgtgatttgggacgccgcgaatacagtaaacatatgttacgtcttcgcagggaagggcatattaacgggaaagaagttcctgaaattatcctgcttaattcacatgatggttcatccagttatcagatgatcccaggaatttttcgttttgtctgcacaaatggcctggtgtgtgggaataattttggcgaaatccgcgttccacataaaggtgatattgtcgggcaggttattgagggagcgtatgaagtgctcggtgtctttgataaagtcactgaaaatatggagacaatgaaagagatacatcttaacagtgacgaacaacatttatttggcagagctgcattgatggccaggtacgaagatgaaaataaaacgccagtgacgccagaacaaataattactccccgccgttgggaggataaacagaacgatctctggacaacctggcagcgggttcaggagaatatgataaaaggtggattatcggggcgaagtgcctccggtaaaaataccagaacaagagccattacaggcattgacggtgatatccgaatcaacaaagcattatggatgattgccgaacagttcagggagtggaagtcatga

SEQ ID NO: 1266 - protein, 273 aa, Escherichia coli
MRLASRFGRYNSIRRERPLTDDELMQFVPSVFSGDKHESRSERYTYIPTINIINKLRDEGFQPFFACQSRVRDLGRREYSKHMLRLRREGHINGKEVPEIILLNSHDGSSSYQMIPGIFRFVCTNGLVCGNNFGEIRVPHKGDIVGQVIEGAYEVLGVFDKVTENMETMKEIHLNSDEQHLFGRAALMARYEDENKTPVTPEQIITPRRWEDKQNDLWTTWQRVQENMIKGGLSGRSASGKNTRTRAITGIDGDIRINKALWMIAEQFREWKS

SEQ ID NO: 1267 - DNA, 864 bp, Rhodobacter sphaeroides 2.4.1
  CDS (1)..(864): transl_table=11
atgagctatcatttctatatgcgcgggatgagcaacggcggcgcggcctacagccggggcgatcagccgctgacgaatgacgagctgatggcgcgcgttccctcgatctttgcgaccgaggctcacgagagccgcagcgcccggttcgctcctgtccccaccgtcaccgtgctggatggcctgcgcgcggaaggattcgaaccgttctttgctcagcaggcccgcacccgagtcgagggcaaggccgagtttacgaagcacatgctgcgcctgcgtcaccgcggcatcgtcaatgccgagggcgaggcgttcgagatcgtgctggtcaacgcgaatgacggcacgagcgcctatcagatgatcccggggttctttcggtttgtctgcgccaacggcctcatgtgcggcgagaccttcgacgaggtgaaggtccgccatagcggcaatgccattggcgaagtcatcgagggcgcctatcgcgtgcttgaggaggccccccgcgtgaccgagcaggtggaccggttcaaggctatccagctgcaggaccgggagcgcgagatcctggccgaagccgcgcacggccttcgcttccccggcaccgccgagggcaaggaagcgccgatcacgccggccgagctcctgcggccgcggcgctcgaccgaccgcgccaccgacctgtggaccgctttcaacgtggtgcaggagaacaccctgcgcggagggatgcgcggccgcacccggaccgaaagcggccatttccgccgccagaccgtccgcgaggtggccggcatcgaccagtcccgcggcctcaaccgcgcgctctggatgctcaccgagcgcatggccgagctgaaggcaggctga

SEQ ID NO: 1268 - protein, 287 aa, Rhodobacter sphaeroides 2.4.1
MSYHFYMRGMSNGGAAYSRGDQPLTNDELMARVPSIFATEAHESRSARFAPVPTVTVLDGLRAEGFEPFFAQQARTRVEGKAEFTKHMLRLRHRGIVNAEGEAFEIVLVNANDGTSAYQMIPGFFRFVCANGLMCGETFDEVKVRHSGNAIGEVIEGAYRVLEEAPRVTEQVDRFKAIQLQDREREILAEAAHGLRFPGTAEGKEAPITPAELLRPRRSTDRATDLWTAFNVVQENTLRGGMRGRTRTESGHFRRQTVREVAGIDQSRGLNRALWMLTERMAELKAG

SEQ ID NO: 1269 - DNA, 828 bp, Herminiimonas arsenicoxydans
  CDS (1)..(828)
atgtctctggcatcccgttttgctccgcaatccccgatcctgcgctccgatcgcccactctcggacgaccgtattcgtgccgttgttccctcgatctttgccgacgctccgcatgggagccggtccgatcggtatgcctacataccgacctcggtcgtgctgaccaggttgcgccaggagggtttcgagcccttcatggtgtgccagacgcgcgtgcgcaacgaggatcggcgcgagtacaccaagcatctcatccgacttcgccatgcaagccagatcaacggcgacgaggcgaacgagatcatcctgctcaacagccacgacggcacgagcagctaccagatgcttgccggcatgttccggttcgtctgccacaacggcctggtctgcggtgacaccaccgccgacatccgcgttcctcacaagggcgacgtggcaagccaggtgatcgaaggtgcctacgaggttctcgaaggcttcgagcgcgtgcaggacgcgcgcgatgcgatgcgcaccatcaccctcgatgagggcgaagcggaaatctttgcgaattccgcgctcgcactcaagtacgacgacccggccaagtccacccctgtcacggagagccaacttctggcgcccaggcgctgggacgaccgcaagaacgacctgtgggccgtcttcaaccgcgtccaggagaacctcgtcaaagggggactgaatggacgctcggccaatggccgcaatcaacgcacccgtccggtgcaaggaatcgaccagaacctgcgcctgaaccgggcgttgtggctgctggccgaaggcatgcgccagctcaaggcgtga

SEQ ID NO: 1270 - protein, 275 aa, Herminiimonas arsenicoxydans
MSLASRFAPQSPILRSDRPLSDDRIRAVVPSIFADAPHGSRSDRYAYIPTSVVLTRLRQEGFEPFMVCQTRVRNEDRREYTKHLIRLRHASQINGDEANEIILLNSHDGTSSYQMLAGMFRFVCHNGLVCGDTTADIRVPHKGDVASQVIEGAYEVLEGFERVQDARDAMRTITLDEGEAEIFANSALALKYDDPAKSTPVTESQLLAPRRWDDRKNDLWAVFNRVQENLVKGGLNGRSANGRNQRTRPVQGIDQNLRLNRALWLLAEGMRQLKA

SEQ ID NO: 1271 - DNA, 834 bp, Burkholderia vietnamiensis G4
  CDS (1)..(834): transl_table=11
atgcaactcgcttcctcattccgttacggctcgccgatactgcgcgccgactcgcccctctcggacgaccagatccgtagcgtcgcgccgtcaatcttcgcggacggcaagcacgcaagccgctccgaacgctacacctacattcccaccatcgatgtgctgcgcggtctgcgcaatgaaggcttccagccgttcatggtctgccagagccgcgtgcgtgatccaggcaagcgcgagtacacgaaacacatgctccggcttcgtcacgccacccagatcgtcggggaagaagccaacgaggtcgtgctgctgaactcgcacgacggcacgagcagctaccagatgctggctggtgtgctgcgtttcgtctgccagaacggcatggtcgctggcgacagcgtgcgcgatatccgcataccgcacaaaggcaacatcgcacggaacgtcatcgatggcgcgttcgacgtgctcgacaccttcgacctgatccgcgagcagaccgacagcatgcgcggcgtcgaactggaccgcgctgaacagcacgcgttcgcccgttccgcccttgcactgcgctacgacccgactgacacggaggccccctcccctgtcaccgagagccaattgcttgccccgcgccgtttcgaggatcgccgcgacgatctctggacggtgttcaaccgggtgcaggagaacctcaccaaaggcgggctgcacgggcgctcgcgaaccggccgggcaatgtccacccgccccgtcacaggcatcgatcagaacgtgaagctcaatcgcgccctctggatgctggccgacgccatgcgccaaatgaaggcgtaa

SEQ ID NO: 1272 - protein, 277 aa, Burkholderia vietnamiensis G4
MQLASSFRYGSPILRADSPLSDDQIRSVAPSIFADGKHASRSERYTYIPTIDVLRGLRNEGFQPFMVCQSRVRDPGKREYTKHMLRLRHATQIVGEEANEVVLLNSHDGTSSYQMLAGVLRFVCQNGMVAGDSVRDIRIPHKGNIARNVIDGAFDVLDTFDLIREQTDSMRGVELDRAEQHAFARSALALRYDPTDTEAPSPVTESQLLAPRRFEDRRDDLWTVFNRVQENLTKGGLHGRSRTGRAMSTRPVTGIDQNVKLNRALWMLADAMRQMKA

SEQ ID NO: 1273 - DNA, 822 bp, Escherichia coli
  CDS (1)..(822): transl_table=11
atgcgattagcttcccgttttggtcggtataattccatccgtcgtgaacgtcctttaacggatgatgaattaatgcagttcgtgccttcggtattttccggtgataaacatgagtcccggagtgaacgttatacgtatattccaacaatcaatatcatcaataagttacgtgatgaaggtttccagccattctttgcctgtcagagtcgggttcgtgatttgggacgtcgcgaatacagtaaacatatgttacgtcttcgcagggaagggcatattaacgggcaggaagttcctgaaattatcctgcttaattcacatgatggttcatccagttatcagatgatccccggaatttttcgttttgtctgcacaaattgcctggtgtgcggaaataattttggcgaaatccgcgttccacataaaggtgatattgtcgggcaggttatagagggcgcgtatgaagtgctcggtgtctttgataaggtcactgataatatggaggcgatgaaagaaattcatcttaacagtgacgagcaacatttatttggcagagctgcactgatggtcaggtatgaagatgaaaataaaacgccagtgacgcctgaacaaataattactccccgtcgttgggaggataaacagaacgatctctggacaacctggcagcgggttcaggagaatatgataaaaggtggattatcggggcgaagtgcctccgggaaaaataccaggacaagagccattacaggtattgatggtgatataagaatcaacaaggcgttgtgggtgattgccgaacagttcagaaagtggaagtcatga

SEQ ID NO: 1274 - protein, 273 aa, Escherichia coli
MRLASRFGRYNSIRRERPLTDDELMQFVPSVFSGDKHESRSERYTYIPTINIINKLRDEGFQPFFACQSRVRDLGRREYSKHMLRLRREGHINGQEVPEIILLNSHDGSSSYQMIPGIFRFVCTNCLVCGNNFGEIRVPHKGDIVGQVIEGAYEVLGVFDKVTDNMEAMKEIHLNSDEQHLFGRAALMVRYEDENKTPVTPEQIITPRRWEDKQNDLWTTWQRVQENMIKGGLSGRSASGKNTRTRAITGIDGDIRINKALWVIAEQFRKWKS

SEQ ID NO: 1275 - DNA, 822 bp, Klebsiella pneumoniae subsp. pneumoniae MGH 78578
  CDS (1)..(822): transl_table=11
atgcgtttagcatcccgatttggacttactcattccattcgtcaggaacgcccactgactaacgatgaattggtcaaggttgtaccttctgtgttttcagaagaaaagcataattcacgtagtgatcgctatacctatattccaaccattacactgctggataaattacgtgaagaaggtttccagccattttttgcctgtcagtcacgagtaagggatgaggataaacgggggcatactaagcatatggtaagacttcgccgtgaaggggccaataaaggaacagaagtacccgaaatcattcttcttaactcgcatgatggatcgtccagttatcaaatgatcccgggtatgttccgttttgtatgcacaaatggccttgtgtgcggtacgtcgtttggtgagattcgtgtacctcataaaggtgatattgtgggaagggttatcgaaggtgcttacgaagttttgggaattttcgataaaataactgaaggcgttgatgtcatgaagtctattaccttaaccaaggaagaacagagtctgtttggacaagctgcattaacctaccgatatgaagatgaaaataaatctccggtcagtattgaacagataattcatccgcgccgttatgaagataaaaaatatgacatctggactacatatcaaagggtccaggaaaatctgattaaaggcggtttgcctggccgaactgaaaaagggaaaagaacaacaacccggccagtaaaagcaattgatggtgatgtcaaactcaataaggcattgtggttaattgcggagaaattccgcactcttaaaggctaa

SEQ ID NO: 1276 - protein, 273 aa, Klebsiella pneumoniae subsp. pneumoniae MGH 78578
MRLASRFGLTHSIRQERPLTNDELVKVVPSVFSEEKHNSRSDRYTYIPTITLLDKLREEGFQPFFACQSRVRDEDKRGHTKHMVRLRREGANKGTEVPEIILLNSHDGSSSYQMIPGMFRFVCTNGLVCGTSFGEIRVPHKGDIVGRVIEGAYEVLGIFDKITEGVDVMKSITLTKEEQSLFGQAALTYRYEDENKSPVSIEQIIHPRRYEDKKYDIWTTYQRVQENLIKGGLPGRTEKGKRTTTRPVKAIDGDVKLNKALWLIAEKFRTLKG

SEQ ID NO: 1277 - DNA, 978 bp, Klebsiella pneumoniae subsp. pneumoniae MGH 78578
  CDS (1)..(978): transl_table=11
atgctcgtttacgcccttgcggcgaacggctctcaaacgggtgaaggttatatccaggggcaggttcagcaggtccccgcacaaagtcaaaaccgcggccccggcaactcaacgggtgatggtttaaaaaattcagatctaattaaggagaaaaaaatgcgtttagcatcccgatttggacttactcattccattcgtcaggaacgcccactgactaacgatgaattagtcaaggttgtaccttctgtgttttcagaagaaaagcataattcacgtagtgatcgctatacctatattccaaccattacactgctggataaattacgtgaagaaggtttccagccattttttgcctgtcagtcacgagtaagggatgaggataaacgggggcatactaagcatatggtaagacttcgccgtgaaggggccaataaaggaacagaagtacccgaaatcattcttcttaactcgcatgatggatcgtccagttatcaaatgatcccgggtatgttccgttttgtatgcacaaatggccttgtgtgcggtacgtcgtttggtgagattcgtgtacctcataaaggtgatattgtgggaagggttatcgaaggtgcttacgaagttctgggaattttcgataaaataactgaaggcgttgatgtcatgaagtctattgccttaaccaaggaagaacagcgtctgtttggacaagctgcattaacctaccgatatgaagatgaaaataaatctccggtcagtattgaacagataattcatccgcgccgttatgaagataaaaaagatgacatctggactacatatcaaagggtccaggaaaatctgattaaaggcggtttgcctggccgaactgaaaaagggaaaagaacaacaacccggccagtaaaagcaatcgatggtgatgttaaactcaataaggcattgtggttaattgcggagaaattccgcactcttaaaggctaa

SEQ ID NO: 1278 - protein, 325 aa, Klebsiella pneumoniae subsp. pneumoniae MGH 78578
MLVYALAANGSQTGEGYIQGQVQQVPAQSQNRGPGNSTGDGLKNSDLIKEKKMRLASRFGLTHSIRQERPLTNDELVKVVPSVFSEEKHNSRSDRYTYIPTITLLDKLREEGFQPFFACQSRVRDEDKRGHTKHMVRLRREGANKGTEVPEIILLNSHDGSSSYQMIPGMFRFVCTNGLVCGTSFGEIRVPHKGDIVGRVIEGAYEVLGIFDKITEGVDVMKSIALTKEEQRLFGQAALTYRYEDENKSPVSIEQIIHPRRYEDKKDDIWTTYQRVQENLIKGGLPGRTEKGKRTTTRPVKAIDGDVKLNKALWLIAEKFRTLKG

SEQ ID NO: 1279 - DNA, 828 bp, Azoarcus sp. EbN1
  CDS (1)..(828): transl_table=11
atgcaactcgcttctcgtttcgcaccccattccccgacgctgcgtgcggatcatccgttgtccgatgaccagatccgcgcggtcgcaccctcgatctttgcagagtccccgcacgaaagccggtccgagcggtacagctacataccaaccgccgccgtcctggcggagctgcgccgagaagggttcgagccattcatggtgtgccagacccgcgtgcgccaggaggatcgccgcgagtacaccaagcatatgctccgccttcgccatgcgagccagatcaacggcgccgaggcgaacgaggtcatcttgctgaactcgcacgacggcaccagcagctaccagatgctggccggcatgttccgcttcgtctgccagaacggcctggtctgcggcgatacgttcggcgatgtccgtgtgccccacaagggcaacgtcaccgaacaggtgatcgaaggcgcctacgaggtcctgcagggcttcgcgcaggttcaggactcccgcgatgccatgcgtgtcgtcgcgctcgacgatggcgaggcggaggttttcgcacactcggccctgacgctcaagtacgacagccagaacaaggcgctgccgatcaccgagagccaggtgctggcgcctcgccgtttcgacgacaagtactcggacctgtggtcggtgttcaaccgcgtacaggaaaacctcgtcaaaggcggcctgtccggccgaacggccctgggccggcatcaacggacgcgaccagtgcaaggcattgaccagaacgtccggctcaaccgggcgctgtggatgctggcagaaggcctgcggcagctgaaggcctga

SEQ ID NO: 1280 - protein, 275 aa, Azoarcus sp. EbN1
MQLASRFAPHSPTLRADHPLSDDQIRAVAPSIFAESPHESRSERYSYIPTAAVLAELRREGFEPFMVCQTRVRQEDRREYTKHMLRLRHASQINGAEANEVILLNSHDGTSSYQMLAGMFRFVCQNGLVCGDTFGDVRVPHKGNVTEQVIEGAYEVLQGFAQVQDSRDAMRVVALDDGEAEVFAHSALTLKYDSQNKALPITESQVLAPRRFDDKYSDLWSVFNRVQENLVKGGLSGRTALGRHQRTRPVQGIDQNVRLNRALWMLAEGLRQLKA

SEQ ID NO: 1281 - DNA, 834 bp, Burkholderia xenovorans LB400
  CDS (1)..(834): transl_table=11
atgcaactcgcttcctccttccgttacggttccccgatgctccgttccgactcgccgctgtcggacgaccagatccgccgtgttgctccctcgattttcgcggacggcaagcacgaaagccgctccgaccgctacacctacattcccaccatcgacgtgctgcgcggtctgcgcaacgaaggcttccagccgttcatggtgtgccagacccgcgtgcgcgcccaggacaagcgcgaattcaccaagcatctgatccgcatgcgccccgcgagcgaaattaccggcgaggatgtcaacgaagtcatcctcctcaattcgcacgatgggtccagcggattccagttgctcggtggcgtctatcgcttcgtctgccagaacgggatggttgcgggcgaaaccatcggcgaggtccgcgtcccgcacaggggcaacatcgtgcagaacgtcatcaacggcgcgttcgatgtgctcgacggcttcgacctgatccgcgaacagaaggacggcatgaaagccgtcacgctcgatcgcgacgaacagtacgcgttcgcgcgctccgccctcgcgctgcgctacgacccgtccgacaccgaagcacccgcccccgtcaccgaaagccagttactcgccccgcgtcgcttcgaggaccgccgggacgacctgtggacggtatttcaaagaacgcaggaaaacctcaccaagggcggactgcatggacgctcgcgcagcggacgctccatgtccacgcgtcccatcaccggcatcgaccagaacgtgaagctcaaccgcgcgctgtggatgctggctgacgccatgcggcagatgaaatcgtaa

SEQ ID NO: 1282 - protein, 277 aa, Burkholderia xenovorans LB400
MQLASSFRYGSPMLRSDSPLSDDQIRRVAPSIFADGKHESRSDRYTYIPTIDVLRGLRNEGFQPFMVCQTRVRAQDKREFTKHLIRMRPASEITGEDVNEVILLNSHDGSSGFQLLGGVYRFVCQNGMVAGETIGEVRVPHRGNIVQNVINGAFDVLDGFDLIREQKDGMKAVTLDRDEQYAFARSALALRYDPSDTEAPAPVTESQLLAPRRFEDRRDDLWTVFQRTQENLTKGGLHGRSRSGRSMSTRPITGIDQNVKLNRALWMLADAMRQMKS

SEQ ID NO: 1283 - DNA, 834 bp, Burkholderia xenovorans LB400
  CDS (1)..(834): transl_table=11
atgcaactcgcttcctctttccgttacggctccccgatgctgagcgccaatacaccgctgtcggacgatcaaattcaccgcgtcgccccgtcgatcttcgcggacggcaagcacgaaagccgctccgaacgctacacctacatcccgaccattgatgtgctgcgcggccttcgcaacgaaggtttccaaccgttcatggtctgccagacccgcgtacgcgacgaggccaagcgcgaatacacgaagcacatgctccggcttcgccatgctgaccagatcaccggcgacgaagctgaggaagtcgtgctgctcaattcgcacgacggcaccagcagctatcagatgatcggcggcgtgctgagattcgtttgccagaacggtctggtcgcgggcgaaaacgtggccgatatccgagtgccgcaccagggcaacatcgtccagaacgtcatcaacggcgcatttgacgtgctcgacggctttgatctgatccgcgagcagaaggacggcatgcacgccgtcgagctgaatcgcgacgagcaacacgctttcgcccgttccgcgctcgcgctgcgctacaacccgaccgacgccgaggcaccggcccccgttactgaaagccagctactcgctccccgccgcttcgaggatcgccgcgacgacctctggacggtatttcagcgggttcaggaaaacctcaccaaaggcggcctgcacggacgttcgcgcaacggacgcgccatgtctacgcgtcccatcaccggcatcgaccagaacgtgaagctcaaccgtgcgctgtggatgctcgctgacgccatgcgccagatgaaggcgtaa

SEQ ID NO: 1284 - protein, 277 aa, Burkholderia xenovorans LB400
MQLASSFRYGSPMLSANTPLSDDQIHRVAPSIFADGKHESRSERYTYIPTIDVLRGLRNEGFQPFMVCQTRVRDEAKREYTKHMLRLRHADQITGDEAEEVVLLNSHDGTSSYQMIGGVLRFVCQNGLVAGENVADIRVPHQGNIVQNVINGAFDVLDGFDLIREQKDGMHAVELNRDEQHAFARSALALRYNPTDAEAPAPVTESQLLAPRRFEDRRDDLWTVFQRVQENLTKGGLHGRSRNGRAMSTRPITGIDQNVKLNRALWMLADAMRQMKA

SEQ ID NO: 1285 - DNA, 834 bp, Burkholderia xenovorans LB400
  CDS (1)..(834): transl_table=11
atgcaactcgcttcctcattccgttacggctccccgatgctgcgcgccgattccccgctctcggacgagcagatccgtcgcgtcgcgccgtccatcttcgcggacggcaagcacgcaagtcgctccgaacgctacacctacattcccactatcgatgtgctgcgcggcctgcgcaacgaaggcttccagccgttcatggtctgccagagccgcgtgcgcgatccgggcaagcgcgagtacacgaaacacatgctccggcttcgccacgccagccagatcgtcggggacgaagccaacgaggtcgtactcctgaactcgcacgacggcacgagcagctaccagatgctggctggcgtgctgcgtttcgtctgccagaacggcatggtcgcgggcgacagcgtgcgcgatatccgcataccgcacaaaggcaacatcgcacggaacgtcatcgatggcgcgttcgacgtgctcgacggcttcgacctgatccgcgagcagaaggacagcatgcgcggcatcgaactggaccgcgatgaacagcacgcgtttgcccgttccgccctcgcgctgcgctacgacccgactgacgcggaagcccccgcccccgtcaccgagagccagttactcgccccacgccgtttcgaggatcgccgcgacgatctctggacggtgttcaaccgggtgcaggaaaacctcaccaaaggcggactgcacgggcgctcgcggaccggtcgcgcgatctccacgcgccctgtcaccggcatcgaccagaacgtgaaactcaatcgcgccctctggatgctggccgacgccatgcgcaagatgaaggcgtaa

SEQ ID NO: 1286 - protein, 277 aa, Burkholderia xenovorans LB400
MQLASSFRYGSPMLRADSPLSDEQIRRVAPSIFADGKHASRSERYTYIPTIDVLRGLRNEGFQPFMVCQSRVRDPGKREYTKHMLRLRHASQIVGDEANEVVLLNSHDGTSSYQMLAGVLRFVCQNGMVAGDSVRDIRIPHKGNIARNVIDGAFDVLDGFDLIREQKDSMRGIELDRDEQHAFARSALALRYDPTDAEAPAPVTESQLLAPRRFEDRRDDLWTVFNRVQENLTKGGLHGRSRTGRAISTRPVTGIDQNVKLNRALWMLADAMRKMKA

SEQ ID NO: 1287 - DNA, 1008 bp, Ralstonia metallidurans CH34
  CDS (1)..(1008): transl_table=11
ttgacggcccccgtccgcgcgctcctgaccgtcgcgggcgatgaactcaggaaagacggtggcaacagggccaaccgggttcctcgtgccgaccgcaccgaacagccaaaaggctgggcttccgaatctaggaatccggtgtgcggtgtgaacagcaaacctctttttgtcaggagaaagaccatgcaactcgcatcccgtttcgcttcccgctccccggcactgcgcagcgattacccactgtccgatgaccaaatccgcagggtggccccgtccatcttcgccgacgccccgcacgaaagccgttccgagcgatacagctacatccccaccgcgaccgtcctgcaagaactgcgcggagaaggtttcgagcctttcatggtgacgcaaacccgcgtgcgccacgacgaccgccgcgactacaccaagcacatgatccggctgcgccacgccagccagatcaacggccgcgaggccaacgaaatcatcctgctgaactcccatgacggcaccagcagctatcagatgctggccgggatgttccgcttcgtttgcagcaatggccttgtctgcggcgacaccgtggccgacgtgcgcgtgccgcacaagggcgacgtagccgggcacgtcatcgaaggcgcttacgaagtcctgcacggcttcgaccgggtgcaggaatcgcgcgatgccatgcgcgccatcacgctcgacgccggggaatcggaagtgttcgcccgcgctgcgctggcgttgaagtacgacgaggacaagccagcgcccatcacggaatcgcaaatcctgatgccgcgccgccatgacgacgaccgccgcgacctgtggagcgtgttcaaccgcacgcaggagaacttgaccaaaggcggcctgtccgcccgcgccgcgaatggccgccgccagaccacccggcccgtgcagggcatcgaccaaagcgtgcgcctgaatcgcgccctgtggctgctggccgatggcctgcgccagttgaaagcctga

SEQ ID NO: 1288 - protein, 335 aa, Ralstonia metallidurans CH34
MTAPVRALLTVAGDELRKDGGNRANRVPRADRTEQPKGWASESRNPVCGVNSKPLFVRRKTMQLASRFASRSPALRSDYPLSDDQIRRVAPSIFADAPHESRSERYSYIPTATVLQELRGEGFEPFMVTQTRVRHDDRRDYTKHMIRLRHASQINGREANEIILLNSHDGTSSYQMLAGMFRFVCSNGLVCGDTVADVRVPHKGDVAGHVIEGAYEVLHGFDRVQESRDAMRAITLDAGESEVFARAALALKYDEDKPAPITESQILMPRRHDDDRRDLWSVFNRTQENLTKGGLSARAANGRRQTTRPVQGIDQSVRLNRALWLLADGLRQLKA

SEQ ID NO: 1289 - DNA, 831 bp, Ralstonia metallidurans CH34
  CDS (1)..(831): transl_table=11
atgcaactcgcatcccgtttcgcttcccgttccccctcgctgcgcagcgattacccgctgtccgatgaccagattcgcagggtggccccgtccatcttcgccgatgcaccgcatgagagccgttccgagcggtacagctatatccccaccgccgccgtgctgaccgagcttcgcaaagaaggcttccagcccttcatggtgacgcagacccgcgtgcgcgatgaaggcaagcgcgagcacaccaaacacatgctgcgcctgcgccatgccagtcagatcaatggcgcagaggctaacgaaatcgtgctgctgaactcgcacgacggcacgagcagctatcagatgctggccggaatgttccgcttcgtgtgcagcaatggccttgtatgcggcgacaccgtggccgatgtgcgcgtaccccacaaaggcgacgtggccggttccgtcatcgaaggcgctttcgaggtgttgagcggcttcgagcgggtgaaggaatctcgcgatgccatgcgcgcgatcacgctggatgaaggcgaagccgaagtgttcgcccgttccgcgctggccctcaagtacgaccccacgaacaacaagcccgcgcccatcaccgaatcgcaaatcctgatgccgcgtcggttcgatgacagccgccccgacctgtggagcgtgttcaaccgcacgcaggagaacttgaccaagggcggattgcatggccgcagcgccaacggacgtcgccagcagacccgacccgtgcagggcattgattccgatgtgcgcctcaatcgcgccctctggatgctggccgatggcctgcgccagttgaaagcctga

SEQ ID NO: 1290 - protein, 276 aa, Ralstonia metallidurans CH34
MQLASRFASRSPSLRSDYPLSDDQIRRVAPSIFADAPHESRSERYSYIPTAAVLTELRKEGFQPFMVTQTRVRDEGKREHTKHMLRLRHASQINGAEANEIVLLNSHDGTSSYQMLAGMFRFVCSNGLVCGDTVADVRVPHKGDVAGSVIEGAFEVLSGFERVKESRDAMRAITLDEGEAEVFARSALALKYDPTNNKPAPITESQILMPRRFDDSRPDLWSVFNRTQENLTKGGLHGRSANGRRQQTRPVQGIDSDVRLNRALWMLADGLRQLKA

SEQ ID NO: 1291 - DNA, 828 bp, Ralstonia metallidurans CH34
  CDS (1)..(828): transl_table=11
atgtctctggtatcccgctttgctccgcaatccccgatcctgcgctctgatcgcccactctcggacgaccgcattcgtgccgtcgttccgtcgatcttcgccgacgctccacatgggagccggtccgatcggtatgcctacataccgacctcgaccgtgctgaccaagctgcgccaggagggcttcgagcccttcatggtgtgtcagacgcgcgtgcgcaacgaagaccggcgcgagtacacgaagcacctcatccgacttcgccatgcaagccagatcaacggcgacgaggcgaacgagatcatcctgctcaacagccatgacggcacgagcagctatcagatgctcgccggcatgttccggttcgtctgccacaacggcctggtttgcggtgacaccaccgcagacatccgcgttccccacaagggcgacgtggccagccaggtgatcgaaggtgcctacggagtcctcgaaggtttcgagcgcgtgcataacgcgcgcgatgcgatgcgcaccatcaccctcgatgagggcgaagcggaggtctttgcgaactctgcgctcgcactcaagtacgacgatccggccaagtccacgcctgtcaccgagagccaactgctggcccctcggcgatgggacgaccgcaagaacgacctgtgggccgtcttcaaccgcgtccaggagaacctagtcaaagggggcctgaacggacgcacggccaacggccgcaatcagcgcacccgtccggtgcaaggcatcgaccagaacctgcgcctgaaccgggcgttgtggctgctggccgaaggcatgcgccagctcaaggcgtga

SEQ ID NO: 1292 - protein, 275 aa, Ralstonia metallidurans CH34
MSLVSRFAPQSPILRSDRPLSDDRIRAVVPSIFADAPHGSRSDRYAYIPTSTVLTKLRQEGFEPFMVCQTRVRNEDRREYTKHLIRLRHASQINGDEANEIILLNSHDGTSSYQMLAGMFRFVCHNGLVCGDTTADIRVPHKGDVASQVIEGAYGVLEGFERVHNARDAMRTITLDEGEAEVFANSALALKYDDPAKSTPVTESQLLAPRRWDDRKNDLWAVFNRVQENLVKGGLNGRTANGRNQRTRPVQGIDQNLRLNRALWLLAEGMRQLKA

SEQ ID NO: 1293 - DNA, 822 bp, Escherichia coli
  CDS (1)..(822): transl_table=11
atgcgattagcttcccgttttggtcggtataattccatccgccgtgaacgtcctttaacggatgatgaattaatgcagttcgtgccttcggtattttccggtgataaacatgagtcccggagtgaacgttatacgtatattccaacaatcaatatcatcaataagttacgtgatgaaggtttccagccattctttgcctgtcagagtcgggttcgtgatttgggacgccgcgaatacagtaaacatatgttacgtcttcgcagggaagggaatattaacgggcaggaagttcctgaaattatcctgcttaattcacatgatggttcatccagttatcagatgatccccggaatttttcgttttgtctgcacaaatggcctggtgtgcggaaataattttggcgaaatccgcgttccacataaaggtgatattgtcgggcaggttatcgagggagcgtatgaagtgctcggtgtctttgataaggtcactgataatatggaggcgatgaaagaaattcatcttaacagtgacgagcaacatttatttggcagagctgcactgatggtcaggtatgaagatgaaaataaaacgccagtgacgcctgaacaaataattactccccgtcgtcgggaagataaacagaacgatctctggacaacctgtcagcgggttcaggagaatattataaaaggtggattgtcggggcgaagtgcctccggtaaaaataccaggacaagagccattacaggtattgatggtgatatccgaatcaacaaggcgttatgggtgattgccgaacagttcagaaagtggaagtcatga

SEQ ID NO: 1294 - protein, 273 aa, Escherichia coli
MRLASRFGRYNSIRRERPLTDDELMQFVPSVFSGDKHESRSERYTYIPTINIINKLRDEGFQPFFACQSRVRDLGRREYSKHMLRLRREGNINGQEVPEIILLNSHDGSSSYQMIPGIFRFVCTNGLVCGNNFGEIRVPHKGDIVGQVIEGAYEVLGVFDKVTDNMEAMKEIHLNSDEQHLFGRAALMVRYEDENKTPVTPEQIITPRRREDKQNDLWTTCQRVQENIIKGGLSGRSASGKNTRTRAITGIDGDIRINKALWVIAEQFRKWKS

SEQ ID NO: 1295 - DNA, 825 bp, Pseudomonas aeruginosa UCBPP-PA14
  CDS (1)..(825): transl_table=11
atgcaactcgcatcccgtttcgcttcccgttccccggcactgcgcagcgattacccgctgaccgatgaccaaatccgcagggtggccccgtccatcttcgcggacgccccgcacgaaagccgctccgagcggtacgcctacatccccaccgcgaccgtgttgcaggaactgcgcggggaaggcttcgagcctttcatggtgtgccagacccgcgtgcgccacgacgaccgccgcgactacaccaagcacatgatccgcctgcgccacgccagccagatcaacgggcgcgaggccaacgaaatcatcctgctgaactcccatgacggcaccagcagttaccagatgctggccggaatgttccgcttcgtgtgcagcaatggccttgtgtgcggtgacaccgtggccgacgtgcgcgtaccccacaagggcgacgtagccgggcacgtcatcgaaggcgcttacgaagtcctgcacggtttcgaccgggcgcaggaatcgcgcgatgccatgcgcgccatcaccctcgacgccggggaatcggaagtgttcgcccgcgccgcgctggccttgaagtacgacgaggacaagcccgcacccatcacggaatcgcaaatcctgatgccgcgccgtggcgacgacgaccgccgcgacctgtggagcgtgttcaaccgcacgcaagaaaacctcatcaaaggtggcctgtccgcccgcgccgccaatggccgccgccagaccacccggcccgtgcagggcatcgaccagagcgtgcgcctgaatcgcgccctgtggctgctggccgatggcctgcgccagctcaaagcctga

SEQ ID NO: 1296 - protein, 274 aa, Pseudomonas aeruginosa UCBPP-PA14
MQLASRFASRSPALRSDYPLTDDQIRRVAPSIFADAPHESRSERYAYIPTATVLQELRGEGFEPFMVCQTRVRHDDRRDYTKHMIRLRHASQINGREANEIILLNSHDGTSSYQMLAGMFRFVCSNGLVCGDTVADVRVPHKGDVAGHVIEGAYEVLHGFDRAQESRDAMRAITLDAGESEVFARAALALKYDEDKPAPITESQILMPRRGDDDRRDLWSVFNRTQENLIKGGLSARAANGRRQTTRPVQGIDQSVRLNRALWLLADGLRQLKA

SEQ ID NO: 1297 - DNA, 825 bp, Acidovorax sp. JS42
  CDS (1)..(825): transl_table=11
atgcaactcgcaagccgcttccgcaatgcttccggtatccgtgccgacatgcccctgtcggatgaccaaatccgcgccgtggctccctcgatctttgccgaggccgcccacgaaagccgctccgcgcgttacacctatatcccgaccattgacgttctgaacggcctgcgcaaagagggtttccagcccttcatggtgtgccagacccgcgtgcgcaacgaggaaaagcgcgagcacaccaagcacatgattcgcctgcgccacgccgaccaaatcaccggccgcgaggcgaacgaaatcatcctgctcaacagccacgacggcaccagcagctaccagatgctggccggcatgttccgctttgtgtgctctaacggcatggtgtgcggcgaaacgaccagcgacatccgcgtgcgccataacggcgacgtggtgggcgaggtgatcgaaggcgctttcaaggtgctggacagcttcgaggaagccaccgcccagcgcgaggccatgcaggtgctcacgctcaaccagggcgaacaggccgcctttgcccgcgccgcgctggccctgaagtacgacgagcaggacggcgctgtgcccgtcaccgaatcccaaatcctggccccgcgccgcttcgaggatcgccgcgacgacatgtggacgaccttcaaccgcgtgcaggaaaacatgatgaagggcggactgcgcggccgcaaccgcaacggccgcaccactacgacgcgcccggtcaacggcatcgaccagagcgttaagctgaaccgtgctttgtgggtgctggccgaggaaatgcgccgcctgaagggctaa

SEQ ID NO: 1298 - protein, 274 aa, Acidovorax sp. JS42
MQLASRFRNASGIRADMPLSDDQIRAVAPSIFAEAAHESRSARYTYIPTIDVLNGLRKEGFQPFMVCQTRVRNEEKREHTKHMIRLRHADQITGREANEIILLNSHDGTSSYQMLAGMFRFVCSNGMVCGETTSDIRVRHNGDVVGEVIEGAFKVLDSFEEATAQREAMQVLTLNQGEQAAFARAALALKYDEQDGAVPVTESQILAPRRFEDRRDDMWTTFNRVQENMMKGGLRGRNRNGRTTTTRPVNGIDQSVKLNRALWVLAEEMRRLKG

SEQ ID NO: 1299 - DNA, 825 bp, Acidovorax sp. JS42
  CDS (1)..(825): transl_table=11
atgcaactcgcatcccgcttcgcttcccgttccccggtgctgcgttcggaacgtcccttgtcggatgaccaaatccgggccgtggccccgtccatcttcgcggacgccccgcacgaaagccgctctgagcggtacagctacatccccaccgcgaccgtgctgcaagaactgcgcggggaaggcttcgagcccttcatggtgacgcaaacccgcgtgcgccacgacgaccgccgcgactacaccaagcacatgatccggctgcgccacgccagccagatcaacggccgcgaggccaacgaaatcatcctgctgaactcccatgacggcaccagcagctatcagatgctggccgggatgttccgcttcgtttgcagcaatggccttgtctgcggcgacaccgtggccgacgtgcgcgtgccgcacaagggcgacgtggcggcgcaggtcatcgaaggcgcttacgaagtcctgcacggcttcgaccgggcgcaggaatcgcgcgatgccatgcgcgccatcacgctggacgcaggggaatcggaagtgttcgcccgcgctgcgctggcgttgaagtacgacgaggacaagcccgcacccatcacggaatcgcaaatcctgatgccgcgccgccatgacgacgaccgccgcgacctgtggagcgtgttcaaccgcacgcaggagaacttgaccaaaggcggcctgtccgcccgcgccgcgaatggccgccgccagaccacccggcccgtgcagggcatcgaccaaagcgtgcgcctgaaccgcgccctgtggctgctggccgatggcctgcgccagttgaaagcctga

SEQ ID NO: 1300 - protein, 274 aa, Acidovorax sp. JS42
MQLASRFASRSPVLRSERPLSDDQIRAVAPSIFADAPHESRSERYSYIPTATVLQELRGEGFEPFMVTQTRVRHDDRRDYTKHMIRLRHASQINGREANEIILLNSHDGTSSYQMLAGMFRFVCSNGLVCGDTVADVRVPHKGDVAAQVIEGAYEVLHGFDRAQESRDAMRAITLDAGESEVFARAALALKYDEDKPAPITESQILMPRRHDDDRRDLWSVFNRTQENLTKGGLSARAANGRRQTTRPVQGIDQSVRLNRALWLLADGLRQLKA

SEQ ID NO: 1301 - DNA, 828 bp, Acidovorax sp. JS42
  CDS (1)..(828): transl_table=11
atgcaactcgcatcccgcttcgctcaccactcccccgcattgcgcagcgatgccccgctgtccgatgaccagattcgcagggtggccccgtccatcttcgcggatgccccgcatgagagccgttccgagcggtacagctacatccccacggctgccgtgctgaccgagcttcggaaagaagggttccagcctttcatggtgacgcagacccgcgtgcgcgatgaaggcaagcgcgagcacacgaaacacatgctgcgcttacgccatgccagccagatcaacggcgcggaggctaacgaaatcgtgctgctgaactcgcacgacggcacgagcagctatcagatgctggccggaatgttccgcttcgtgtgtagtaatggccttgtctgtggtgacaccgtggccgatgtgcgcgtgccccacaaaggcaatgtggcgggccaagtcattgaaggcgcgtacgaggtgttgagcggcttcgagcgggtgcaggaatcgcgcgacctgatgcgcggcatcaccttggacgatggcgaatcagaagtgttcgcccgcgccgcgctggccctcaagtacgacgaccccgacaagcccgcgcccatcacggaatcgcaaatcctgatgccgcgccggttcgatgaccgccgccccgatctgtggagcgtgttcaaccgcacgcaggagaacttgaccaagggcggattgcatggccgcgccgccaatggccgcaggcagcagacccgccccgtgcagggcattgattcggacattcgcatcaatcgcgccctgtggctgctggccgatggaatgcgcgccctcaaagcctga

SEQ ID NO: 1302 - protein, 275 aa, Acidovorax sp. JS42
MQLASRFAHHSPALRSDAPLSDDQIRRVAPSIFADAPHESRSERYSYIPTAAVLTELRKEGFQPFMVTQTRVRDEGKREHTKHMLRLRHASQINGAEANEIVLLNSHDGTSSYQMLAGMFRFVCSNGLVCGDTVADVRVPHKGNVAGQVIEGAYEVLSGFERVQESRDLMRGITLDDGESEVFARAALALKYDDPDKPAPITESQILMPRRFDDRRPDLWSVFNRTQENLTKGGLHGRAANGRRQQTRPVQGIDSDIRINRALWLLADGMRALKA

SEQ ID NO: 1303 - DNA, 819 bp, Escherichia coli B
  CDS (1)..(819): transl_table=11
atgcgactcgccagccgctttggccgtatcaatcagatccgccgcgaccgccccttaacccatgaagaattaatgcaggttgttcccagcgtcttcggggaaggtaagcacgtgtcccgttcagaccattacagctacataccgaccattaccctgctggagaacctgcagcgtgaaggattccagccgttctttgcctgccagacccgcgtcagggaccagagccgccgtgagcatacgaaacatatgctgcgcctgcgtcgctccgggcagataaccggtcagcaggtgccggaaattatcctgctcaattcgcatgacggttcgtccagttaccagatgttgccggggtatttccgtgccatctgtaccaacggtctcgtctgcgggcagtcatttggcgaggtgcgagtgccacaccggggaaatgtcgtggagaaagtgattgaaggcgcttacgaagtcctcggtgtgttcgaccgggtggaagagaagcgtgatgcgatgcagtcgcttttactcccgccaccggcacaacaggcttttgccagagccgcgctgacgtaccgcttcggggaagagcaccagccggtgacggaagcgcagatactgacaccccgccgctatgaagaccgtcaggatgacctgtggtcagtttttaatcggtgccaggagaacctgctcaaaggggggctgccaggacgtactgccaaaggcaaacgcagccatacccgcgcggtgaaaggcatcgacggcgacgttaagctcaaccgggcactctgggtgatggcggaaaaactgcagcaggcgctgagctga

SEQ ID NO: 1304 - protein, 272 aa, Escherichia coli B
MRLASRFGRINQIRRDRPLTHEELMQVVPSVFGEGKHVSRSDHYSYIPTITLLENLQREGFQPFFACQTRVRDQSRREHTKHMLRLRRSGQITGQQVPEIILLNSHDGSSSYQMLPGYFRAICTNGLVCGQSFGEVRVPHRGNVVEKVIEGAYEVLGVFDRVEEKRDAMQSLLLPPPAQQAFARAALTYRFGEEHQPVTEAQILTPRRYEDRQDDLWSVFNRCQENLLKGGLPGRTAKGKRSHTRAVKGIDGDVKLNRALWVMAEKLQQALS

SEQ ID NO: 1305 - DNA, 822 bp, Escherichia coli
  CDS (1)..(822): transl_table=11
atgcgattagcttcccgttttggtcggtataattccatccgccgtgaacgtcctttaacggatgatgaattaatgcagttcgtgccttcggtattttccggtgataaacatgagtcccggagtgaacgttatacgtatattccaacgatcaatatcatcaataagttacgtgatgaaggtttccagccattctttgcctgtcagagtcgggttcgtgatttgggacgtcgcgaatacagtaaacatatgttacgtcttcgcagggaagggcatattaacggtcaggaagttcctgaaattatcctgcttaattcacatgatggttcatccagttatcagatgatccccggaatttttcgttttgtctgcacaaatggcctggtgtgcggaaataattttggcgaaatccgcgttccacataaaggtgatattgccgggcaggttatcgagggagcgtatgaagtactcggtatctttgataaggtcactgataatatggaggcgatgaaagaaattcatcttaacagtgacgagcaacatttatttggcagagccgcgctgatggtcaggtatgaagatgaaaataaaacgccagtgacgcctgaacagataattactccccgtcgttgggaggataaacagaacgatctctggacaacctggcagcgggttcaggagaatatgataaaaggtggattatcggggcgaagtgcctccgggaaaaataccaggacaagagccattacaggtattgatggtgatataagaatcaacaaggcgttatgggtgattgccgaacagttcagaaagtggaagtcatga

SEQ ID NO: 1306 - protein, 273 aa, Escherichia coli
MRLASRFGRYNSIRRERPLTDDELMQFVPSVFSGDKHESRSERYTYIPTINIINKLRDEGFQPFFACQSRVRDLGRREYSKHMLRLRREGHINGQEVPEIILLNSHDGSSSYQMIPGIFRFVCTNGLVCGNNFGEIRVPHKGDIAGQVIEGAYEVLGIFDKVTDNMEAMKEIHLNSDEQHLFGRAALMVRYEDENKTPVTPEQIITPRRWEDKQNDLWTTWQRVQENMIKGGLSGRSASGKNTRTRAITGIDGDIRINKALWVIAEQFRKWKS

SEQ ID NO: 1307 - DNA, 1023 bp, Alcaligenes faecalis
  CDS (1)..(1023): transl_table=11
atgcttgtttccttgacggtccacgttcgtgggctcctgaccgtcgcgggcgatgaactcaggaaagacggtggcaacgaggccaaccgggttcctcgtgccgactgcaccgaacagctgaaaagccgggctccgaatcttggaatccggtgtgcagtgaacagccaacctttttatgtcaggagaataaccatgctggtatcccgtttcgctttccgttcccccgtgcttcgcagtgagtccccgttgtcggatgatcaaattcgtgcggttgtgccatccatttttgccgatgcgcctcatgaaagccgttctgaccggtacacctatattcccacagtggctgtgttgaccgagctgcgaaaagaagggtttcagccgtttatggtgacacaaacccgtgtgcgtaataccgagcgccgcgactttacaaaacatatgatccgtttacgccatgccgggcagatcaacacacgcggggaagccaatgaaatcattttgcttaattcccatgacggtagcagcagttatcagatgctggccggtatgttccgttttgtgtgcagcaacgggctggtgtgcggtgaaaccgtcgcagatgttcgcgtaccgcataagggggatgttgccggactggtggtcgagggcgcatatcgtgttctgggtggatttgatcgtgcaagggagtcgcgggagttgatgcgggatatcaccctggaggcgggtgagactgaggtatttgcccgtgccgcgttgtcgttgaaatatgatgatcccgataaaccagcccctgtaactgaaacccagattcttttgccgcgtcgtgccgaggatcgccgttctgatttgtggagtgtgtttaatcgtacccaggaaaacttaaccaaaggtggtttgtcggggcgttcagccaatggcagtcgtcagaaaaccagaccggtgcaggggatagaccagaatatcaaactgaatcgggccttgtggttactggctgacggcatgcgtcaattgaaggcaggttga

SEQ ID NO: 1308 - protein, 340 aa, Alcaligenes faecalis
MLVSLTVHVRGLLTVAGDELRKDGGNEANRVPRADCTEQLKSRAPNLGIRCAVNSQPFYVRRITMLVSRFAFRSPVLRSESPLSDDQIRAVVPSIFADAPHESRSDRYTYIPTVAVLTELRKEGFQPFMVTQTRVRNTERRDFTKHMIRLRHAGQINTRGEANEIILLNSHDGSSSYQMLAGMFRFVCSNGLVCGETVADVRVPHKGDVAGLVVEGAYRVLGGFDRARESRELMRDITLEAGETEVFARAALSLKYDDPDKPAPVTETQILLPRRAEDRRSDLWSVFNRTQENLTKGGLSGRSANGSRQKTRPVQGIDQNIKLNRALWLLADGMRQLKAG

SEQ ID NO: 1309 - DNA, 828 bp, Cupriavidus oxalaticus
  CDS (1)..(828): transl_table=11
atgcaacttgcatcccgcttcgctcaccactcacccgcattgcgcagcgaaaccccgctgtccgatgaccagattcgcagagtggccccgtccatcttcgcggacgccccgcacgaaagccgttccgagcggtacagctacatccccaccgccgccgtgctgaccgaacttcgcaaggaggggttccagcccttcatggtgtgccagacccgcgtgcgcaacgaggggcggcgcgagcacacgaaacacatgctgcgcctgcgccatgccaaccagatcaacgcccgcgaggccaacgaaatcatcctgctgaactcgcacgacggcacgagcagctatcaattgctgggtggcatgttccgctttgtttgcagcaatggccttgtctgcggcgacaccgtgggcgatgtgcgcgtgccccacaaaggcgacgtggccgggcatgtcatcgagggcgcttatcaggtgctgggtggcttcgagtatgcgcaggcatcgcgtgaatccatgcaggccatcacgttggatgccggggaatccgaagtgttcgcccgcgccgcgttggccctcaagtacgacgacccggacaagcccgcgcccatcacggaatcgcaaatcctgatgccgcgccgcttcgaggaccgccgtcccgacctgtggagcgtgttcaaccgcacgcaggagaacttaaccaagggcggattgcatggccgcgccgccaatggccgcaggcagcagacccgccccgtgcagggcatcgattcggacattcgcctgaatcgcgctctgtggctgctggccgatggcatgcgccaactcaaagcctga

SEQ ID NO: 1310 - protein, 275 aa, Cupriavidus oxalaticus
MQLASRFAHHSPALRSETPLSDDQIRRVAPSIFADAPHESRSERYSYIPTAAVLTELRKEGFQPFMVCQTRVRNEGRREHTKHMLRLRHANQINAREANEIILLNSHDGTSSYQLLGGMFRFVCSNGLVCGDTVGDVRVPHKGDVAGHVIEGAYQVLGGFEYAQASRESMQAITLDAGESEVFARAALALKYDDPDKPAPITESQILMPRRFEDRRPDLWSVFNRTQENLTKGGLHGRAANGRRQQTRPVQGIDSDIRLNRALWLLADGMRQLKA

SEQ ID NO: 1311 - DNA, 828 bp, Pseudomonas aeruginosa
  CDS (1)..(828): transl_table=11
atgcaactcgcctctcgtttcgctccccgctcgccgatactgcgcgctgatcatccgctgtccgatgagcagattcgcgcggtggcaccgtcgatctttgcggacaccccgcatgagagccggtccgagcgctacagctacatccccaccgcttcggtacttgccgagctgcgcggagaaggtttccagcctttcatggtgtgccagacccgcgtgcgccacgaggaccgccgcgaattcaccaagcacatgatccgccttcgccacgccagccagatcaatggcaacgaagcgaatgaaatcatcctcctcaactcgcacgacggcaccagcagctaccagatgctcgccggcatgttcaggttcgtctgccacaacggcttggtctgcggtaacaccctcgccgatgtccgtgtgcatcacaaaggcaatgtcgccgagcacgtgatcgaaggtgcctacgaggtcctccacggcttcgaacaggtgcaggcgtcgcgcgacgcgatgcgcctgatcaccctggacgaaggcgagcaagaagtcttggcccgctcggcactggcgctcaagtacgacacgcccaaccaggtagtgccgatcaccgaggcacaggtgctgatgccccgacgcgtcgatgaccggggcagcgacctgtggtccaccttcaatcgcattcaggagaacctcgtcaaaggcggtttgaacggacgcagcgcccatggccgccgccagagtacccggccggttcaggggatcgaccagaacgtgcggctcaaccgcgcactgtggatgctggccgaaggcatgcaacagctgaaggcctga

SEQ ID NO: 1312 - protein, 275 aa, Pseudomonas aeruginosa
MQLASRFAPRSPILRADHPLSDEQIRAVAPSIFADTPHESRSERYSYIPTASVLAELRGEGFQPFMVCQTRVRHEDRREFTKHMIRLRHASQINGNEANEIILLNSHDGTSSYQMLAGMFRFVCHNGLVCGNTLADVRVHHKGNVAEHVIEGAYEVLHGFEQVQASRDAMRLITLDEGEQEVLARSALALKYDTPNQVVPITEAQVLMPRRVDDRGSDLWSTFNRIQENLVKGGLNGRSAHGRRQSTRPVQGIDQNVRLNRALWMLAEGMQQLKA

SEQ ID NO: 1313 - DNA, 822 bp, Escherichia coli
  CDS (1)..(822): transl_table=11
atgacccgtctggcttcgcgctttggcgcagcaaaccttatccgtcgcgaccgtccgttaacccgtgaagagctgtttcgcgtagtgcccagtgtattcagtgaggacaaacacgagtcccgtagtgagcgttatacctatatacccaccatctccctgctcgacagcctacagcgagaaggcttccagccattctttgcctgtcagacccgcgtgcgtgacccgggtcgtcgtgaacatacaaagcatatgctgcgtctgcggcgggaagggcagatcaccggtaaacaggtgccggaaattattctactcaactctcacgatggaaccagttcgtatcagatgttgccgggactatttcgtgcggtttgtcagaacgggctcgtctgcggtgagtcgtttggcgaggtgcgggtgccacacaagggggacgtggtgagtcaggtgattgaaggcgcgtatgaggtgctggggatttttgaccgggtggaggagaaacgggatgccatgcagtcgttgctgttgccacccccggcacagcaggcactggcaaaagccgccctcacataccgctttggtgaagaccaccagccggtgactgaatcgcagatcctctcccctcgccgctggcaggatgagagcaatgacctgtggaccacgtaccagcgtattcaggagaacctgattaagggcgggctcagtggccgtaatgccaaaggaggacggtcacatacccgtgccgttcgcggtatcgacggggacgtgaaacttaaccgggcactgtgggtgatggcggaagccctgctcacgcaactgcagtga

SEQ ID NO: 1314 - protein, 273 aa, Escherichia coli
MTRLASRFGAANLIRRDRPLTREELFRVVPSVFSEDKHESRSERYTYIPTISLLDSLQREGFQPFFACQTRVRDPGRREHTKHMLRLRREGQITGKQVPEIILLNSHDGTSSYQMLPGLFRAVCQNGLVCGESFGEVRVPHKGDVVSQVIEGAYEVLGIFDRVEEKRDAMQSLLLPPPAQQALAKAALTYRFGEDHQPVTESQILSPRRWQDESNDLWTTYQRIQENLIKGGLSGRNAKGGRSHTRAVRGIDGDVKLNRALWVMAEALLTQLQ

SEQ ID NO: 1315 - DNA, 822 bp, Escherichia coli
  CDS (1)..(822): transl_table=11
atgacccgtctggcttcgcgctttggcgctgcaaatcttattcgccgtgaccgtccgttaacccgtgaagagttatttcgcgtggtgcccagcgtattcagtgaggataaacacgaatcccgcagtgaacgctacacgtatatacccacaatttccctgctggacagcctgcagcgggaaggcttccagccattctttgcctgtcagacacgggtacgtgacccccgtcgtcgtgagcatactaagcatatgctgcgcctacgtcgggaggggcaaattaccggtaaacaggttccggaaattatcctgcttaactctcacgatggcaccagttcgtaccagatgctgccgggcatgttcagggcggtgtgccagaacggtctggtctgcggcgagtcgtttggcgaggtgcgggtgccacacaagggggatgtggtgagtcaggttattgagggggcgtatgaagtgctggggatttttgagcgtgtggaagaaaagagggatgccatgcagtcgttgcttttaccgccacctgtgcagcaggcactggcaaaagcagcgcttacgtatcgctttggtgaggaccaccagccggttactgaatcgcagatactctccccacgccgctggcaggatgagagcaatgacctttggaccacctatcagcggattcaagaaaacctgattaagggcggactcagtgggcgtaatgctaaaggcggacgaactcatactcgtgccgtgcgtggcattgacggggatgtgaagcttaaccgtgcgctgtgggtgatggcagaaacactgctcacgcaactgcagtag

SEQ ID NO: 1316 - protein, 273 aa, Escherichia coli
MTRLASRFGAANLIRRDRPLTREELFRVVPSVFSEDKHESRSERYTYIPTISLLDSLQREGFQPFFACQTRVRDPRRREHTKHMLRLRREGQITGKQVPEIILLNSHDGTSSYQMLPGMFRAVCQNGLVCGESFGEVRVPHKGDVVSQVIEGAYEVLGIFERVEEKRDAMQSLLLPPPVQQALAKAALTYRFGEDHQPVTESQILSPRRWQDESNDLWTTYQRIQENLIKGGLSGRNAKGGRTHTRAVRGIDGDVKLNRALWVMAETLLTQLQ

SEQ ID NO: 1317 - DNA, 822 bp, Escherichia coli
  CDS (1)..(822): transl_table=11
atgcgattagcttcccgttttggtcggtataattccatccaccgtgaacgtcctttaacggatgatgaattaatgcagttcgtgccttcggtattttccggtgataaacatgagtcccggagtgaacgttatacgtatattccaacaatcaatatcatcaataagttacgtgatgaaggtttccagccattctttgcctgtcagagtcgggttcgtgatttgggacgtcgcgaatacagtaaacatatgttacgtcttcgcagggaagggcatattaacgggcaggaagttcctgaaattatcctgcttaattcacatgatggttcatccagttatcagatgatccccggaatttttcgttttgtctgcacaaatggcctggtgtgcggaaataattttggcgaaatccgcgttccacataaaggtgatattgtcgggcaggttatagagggcgcgtatgaagtgctcggtgtctttgataaggtcactgataatatggaggcgatgaaagaaattcatcttaacagtgacgagcaacatttatttggcagagctgcactgatggtcaggtatgaagatgaaaataaaacgccagtgacgcctgaacaaataattactccccgtcgttgggaggataaacagaacgatctctggacaacctggcagcgggttcaggagaatatgataaaaggtggattatcggggcgaagtgcctccgggaaaaataccaggacaagagccattacaggtattgatggtgatataagaatcaacaaggcgttgtgggtgattgccgaacagttcagaaagtggaagtcatga

SEQ ID NO: 1318 - protein, 273 aa, Escherichia coli
MRLASRFGRYNSIHRERPLTDDELMQFVPSVFSGDKHESRSERYTYIPTINIINKLRDEGFQPFFACQSRVRDLGRREYSKHMLRLRREGHINGQEVPEIILLNSHDGSSSYQMIPGIFRFVCTNGLVCGNNFGEIRVPHKGDIVGQVIEGAYEVLGVFDKVTDNMEAMKEIHLNSDEQHLFGRAALMVRYEDENKTPVTPEQIITPRRWEDKQNDLWTTWQRVQENMIKGGLSGRSASGKNTRTRAITGIDGDIRINKALWVIAEQFRKWKS

SEQ ID NO: 1319 - DNA, 23 bp, Artificial sequence
  primer
atgaggagtctgcttatgacccg

SEQ ID NO: 1320 - DNA, 23 bp, Artificial sequence
  primer
ttactgcagttgcgtgagcaggg

SEQ ID NO: 1321 - protein, 276 aa, Artificial sequence
  consensus sequence
  Variant (2)..(2): Xaa in position 2 is any amino acid
  Variant (6)..(6): Xaa in position 6 is any amino acid
  Variant (8)..(13): Xaa in position 8 to 13 is any amino acid
  Variant (14)..(14): Xaa in position 14 is any or no amino acid
  Variant (16)..(18): Xaa in position 16 to 18 is any amino acid
  Variant (21)..(29): Xaa in position 21 to 29 is any amino acid
  Variant (32)..(32): Xaa in position 32 is any amino acid
  Variant (34)..(37): Xaa in position 34 to 37 is any amino acid
  Variant (39)..(39): Xaa in position 39 is any amino acid
  Variant (43)..(43): Xaa in position 43 is any amino acid
  Variant (46)..(46): Xaa in position 46 is any amino acid
  Variant (51)..(53): Xaa in position 51 to 53 is any amino acid
  Variant (55)..(56): Xaa in position 55 to 56 is any amino acid
  Variant (58)..(59): Xaa in position 58 to 59 is any amino acid
  Variant (63)..(63): Xaa in position 63 is any amino acid
  Variant (66)..(67): Xaa in position 66 to 67 is any amino acid
  Variant (70)..(70): Xaa in position 70 is any amino acid
  Variant (74)..(77): Xaa in position 74 to 77 is any amino acid
  Variant (79)..(80): Xaa in position 79 to 80 is any amino acid
  Variant (85)..(85): Xaa in position 85 is any amino acid
  Variant (89)..(92): Xaa in position 89 to 92 is any amino acid
  Variant (94)..(94): Xaa in position 94 is any amino acid
  Variant (96)..(99): Xaa in position 96 to 99 is any amino acid
  Variant (100)..(100): Xaa in position 100 is any or no amino acid
  Variant (111)..(111): Xaa in position 111 is any amino acid
  Variant (117)..(118): Xaa in position 117 to 118 is any amino acid
  Variant (120)..(120): Xaa in position 120 is any amino acid
  Variant (126)..(126): Xaa in position 126 is any amino acid
  Variant (129)..(129): Xaa in position 129 is any amino acid
  Variant (133)..(137): Xaa in position 133 to 137 is any amino acid
  Variant (138)..(138): Xaa in position 138 is any or no amino acid
  Variant (143)..(143): Xaa in position 143 is any amino acid
  Variant (145)..(149): Xaa in position 145 to 149 is any amino acid
  Variant (150)..(151): Xaa in position 150 to 151 is any or no amino acid
  Variant (160)..(162): Xaa in position 160 to 162 is any amino acid
  Variant (164)..(172): Xaa in position 164 to 172 is any amino acid
  Variant (174)..(177): Xaa in position 174 to 177 is any amino acid
  Variant (179)..(186): Xaa in position 179 to 186 is any amino acid
  Variant (188)..(189): Xaa in position 188 to 189 is any amino acid
  Variant (192)..(194): Xaa in position 192 to 194 is any amino acid
  Variant (196)..(200): Xaa in position 196 to 200 is any amino acid
  Variant (201)..(204): Xaa in position 201 to 204 is any or no amino acid
  Variant (206)..(206): Xaa in position 206 is any amino acid
  Variant (208)..(211): Xaa in position 208 to 211 is any amino acid
  Variant (213)..(213): Xaa in position 213 is any amino acid
  Variant (217)..(218): Xaa in position 217 to 218 is any amino acid
  Variant (220)..(222): Xaa in position 220 to 222 is any amino acid
  Variant (226)..(231): Xaa in position 226 to 231 is any amino acid
  Variant (235)..(236): Xaa in position 235 to 236 is any amino acid
  Variant (240)..(241): Xaa in position 240 to 241 is any amino acid
  Variant (244)..(246): Xaa in position 244 to 246 is any amino acid
  Variant (248)..(251): Xaa in position 248 to 251 is any amino acid
  Variant (252)..(255): Xaa in position 252 to 255 is any or no amino acid
  Variant (258)..(261): Xaa in position 258 to 261 is any amino acid
  Variant (264)..(267): Xaa in position 264 to 267 is any amino acid
  Variant (274)..(275): Xaa in position 274 to 275 is any amino acid
MXLASXFXXXXXXXRXXXPLXXXXXXXXXPSXFXXXXHXSRSXRYXYIPTXXXLXXLXXEGFXPFXXCQXRVRXXXXRXXTKHMXRLRXXXXIXGXXXXXEIILLNSHDGXSSYQMXXGXFRFVCXNGXVCGXXXXXXRVPHXGXXXXXXXVIEGAYEVXXXFXXXXXXXXXMXXXXLXXXXXXXXAXXALXXXYXXXXXXXXXPXTXXXXLXPRRXXDXXXDLWXXXXXXQENXXKGGXXGRXXXGXXXXXXXXTRXXXXIDXXXXLNRALWXXA

SEQ ID NO: 1322 - protein, 30 aa, Artificial sequence
  protein pattern
  Variant (8)..(8): Xaa in position 8 is Ser or Thr
  Variant (14)..(14): Xaa in position 14 is Ile, Leu or Met
  Variant (15)..(15): Xaa in position 15 is Ala, Gly or Pro
  Variant (17)..(17): Xaa in position 17 is any amino acid
  Variant (20)..(20): Xaa in position 20 is any amino acid
  Variant (21)..(21): Xaa in position 21 is Ile or Val
  Variant (23)..(23): Xaa in position 23 is any amino acid
  Variant (26)..(26): Xaa in position 26 is any amino acid
  Variant (28)..(28): Xaa in position 28 is any amino acid
  Variant (30)..(30): Xaa in position 30 is Asp, Glu, Asn, Gln or Thr
LLNSHDGXSSYQMXXGXFRXXCXNGXVXGX

SEQ ID NO: 1323 - protein, 56 aa, Artificial sequence
  protein pattern
  Variant (2)..(5): Xaa in position 2 to 5 is any amino acid
  Variant (7)..(7): Xaa in position 7 is any amino acid
  Variant (11)..(11): Xaa in position 11 is Ala, Asp, Glu or Gln
  Variant (12)..(12): Xaa in position 12 is any amino acid
  Variant (14)..(14): Xaa in position 14 is any amino acid
  Variant (19)..(20): Xaa in position 19 to 20 is any amino acid
  Variant (21)..(21): Xaa in position 21 is Leu or Val
  Variant (23)..(24): Xaa in position 23 to 24 is any amino acid
  Variant (26)..(26): Xaa in position 26 is Gln or Arg
  Variant (27)..(27): Xaa in position 27 is any amino acid
  Variant (31)..(31): Xaa in position 31 is any amino acid
  Variant (34)..(34): Xaa in position 34 is Phe or Met
  Variant (35)..(35): Xaa in position 35 is Ala or Val
  Variant (36)..(36): Xaa in position 36 is Cys or Thr
  Variant (38)..(38): Xaa in position 38 is Ser or Thr
  Variant (42)..(42): Xaa in position 42 is any amino acid
  Variant (43)..(43): Xaa in position 43 is Asp, Glu, Pro, Gln, Ser or Thr
  Variant (44)..(44): Xaa in position 44 is any amino acid
  Variant (45)..(45): Xaa in position 45 is Lys or Arg
  Variant (46)..(46): Xaa in position 46 is any amino acid
  Variant (47)..(47): Xaa in position 47 is Asp, Glu, Gly or Gln
  Variant (48)..(48): Xaa in position 48 is Phe, His or Tyr
  Variant (52)..(52): Xaa in position 52 is Leu or Met
  Variant (53)..(53): Xaa in position 53 is Ile, Leu or Val
  Variant (55)..(55): Xaa in position 55 is Leu or Met
FXXXXHXSRSXXYXYIPTXXXLXXLXXEGFXPFXXXQXRVRXXXXXXXTKHXXRXR

SEQ ID NO: 1324 - protein, 40 aa, Artificial sequence
  protein pattern
  Variant (2)..(2): Xaa in position 2 is Ile or Val
  Variant (4)..(4): Xaa in position 4 is any amino acid
  Variant (5)..(5): Xaa in position 5 is Ala, Glu, Ser or Thr
  Variant (6)..(6): Xaa in position 6 is Asp or Gln
  Variant (7)..(7): Xaa in position 7 is Ile, Leu or Val
  Variant (8)..(8): Xaa in position 8 is Ile or Leu
  Variant (9)..(9): Xaa in position 9 is any amino acid
  Variant (13)..(13): Xaa in position 13 is any amino acid
  Variant (14)..(14): Xaa in position 14 is Asp, Glu or Gln
  Variant (16)..(18): Xaa in position 16 to 18 is any amino acid
  Variant (20)..(20): Xaa in position 20 is Leu or Met
  Variant (22)..(22): Xaa in position 22 is Ala, Ser or Thr
  Variant (23)..(23): Xaa in position 23 is Ala, Thr or Val
  Variant (24)..(24): Xaa in position 24 is any amino acid
  Variant (25)..(25): Xaa in position 25 is Asn or Gln
  Variant (26)..(27): Xaa in position 26 to 27 is any amino acid
  Variant (31)..(32): Xaa in position 31 to 32 is any amino acid
  Variant (36)..(36): Xaa in position 36 is Ile or Leu
  Variant (37)..(37): Xaa in position 37 is any amino acid
  Variant (40)..(40): Xaa in position 40 is Ala, Asn, Ser or Thr
PXTXXXXXXPRRXXDXXXDXWXXXXXXQENXXKGGXXGRX

SEQ ID NO: 1325 - protein, 58 aa, Artificial sequence
  protein pattern
  Variant (2)..(3): Xaa in position 2 to 3 is any or no amino acid
  Variant (6)..(6): Xaa in position 6 is any amino acid
  Variant (8)..(8): Xaa in position 8 is Asp or Asn
  Variant (9)..(9): Xaa in position 9 is Ile or Val
  Variant (10)..(10): Xaa in position 10 is Ala, Ser, Thr or Val
  Variant (11)..(11): Xaa in position 11 is Ala, Asp, Glu, Gly, Gln or Ser
  Variant (12)..(12): Xaa in position 12 is any amino acid
  Variant (14)..(14): Xaa in position 14 is Ile or Val
  Variant (15)..(15): Xaa in position 15 is Glu or Asn
  Variant (16)..(16): Xaa in position 16 is Gly or Ser
  Variant (17)..(17): Xaa in position 17 is Ala or Asp
  Variant (18)..(18): Xaa in position 18 is Phe, His or Tyr
  Variant (19)..(19): Xaa in position 19 is any amino acid
  Variant (21)..(21): Xaa in position 21 is Leu, Met or Val
  Variant (22)..(22): Xaa in position 22 is any amino acid
  Variant (23)..(23): Xaa in position 23 is Gly, Ile or Val
  Variant (25)..(25): Xaa in position 25 is Ala, Asp or Glu
  Variant (26)..(26): Xaa in position 26 is any amino acid
  Variant (27)..(27): Xaa in position 27 is Ala, Ile or Val
  Variant (28)..(28): Xaa in position 28 is any amino acid
  Variant (29)..(29): Xaa in position 29 is Ala, Asp, Glu or Asn
  Variant (30)..(31): Xaa in position 30 to 31 is any amino acid
  Variant (32)..(32): Xaa in position 32 is Asp or Glu
  Variant (33)..(33): Xaa in position 33 is any amino acid
  Variant (34)..(34): Xaa in position 34 is Ile or Met
  Variant (35)..(36): Xaa in position 35 to 36 is any amino acid
  Variant (37)..(37): Xaa in position 37 is Ile, Leu or Val
  Variant (38)..(38): Xaa in position 38 is any amino acid
  Variant (40)..(40): Xaa in position 40 is Asp, Glu, Asn, Pro or Thr
  Variant (41)..(45): Xaa in position 41 to 45 is any amino acid
  Variant (46)..(46): Xaa in position 46 is Ala, Ile, Leu or Val
  Variant (47)..(47): Xaa in position 47 is Phe or Leu
  Variant (48)..(48): Xaa in position 48 is Ala or Gly
  Variant (49)..(49): Xaa in position 49 is any amino acid
  Variant (50)..(50): Xaa in position 50 is Ala or Ser
  Variant (53)..(54): Xaa in position 53 to 54 is any amino acid
  Variant (55)..(55): Xaa in position 55 is Lys or Arg
  Variant (56)..(56): Xaa in position 56 is Phe or Tyr
  Variant (57)..(57): Xaa in position 57 is Asp, Glu, Gly or Asn
  Variant (58)..(58): Xaa in position 58 is Asp, Glu, Pro or Ser
VXXPHXGXXXXXVXXXXXXVXXXFXXXXXXXXXXXXXXLXXXXXXXXXXXALXXXXXX

SEQ ID NO: 1326 - protein, 29 aa, Artificial sequence
  protein pattern
  Variant (2)..(5): Xaa in position 2 to 5 is any amino acid
  Variant (8)..(8): Xaa in position 8 is Ala, Pro or Thr
  Variant (9)..(9): Xaa in position 9 is Ile or Val
  Variant (10)..(10): Xaa in position 10 is any amino acid
  Variant (11)..(11): Xaa in position 11 is Ala, Gly, Asn or Ser
  Variant (14)..(14): Xaa in position 14 is Gly, Gln, Ser or Thr
  Variant (15)..(15): Xaa in position 15 is Asp, Asn or Ser
  Variant (16)..(16): Xaa in position 16 is Ile, Leu or Val
  Variant (17)..(17): Xaa in position 17 is Lys or Arg
  Variant (20)..(20): Xaa in position 20 is Lys or Arg
  Variant (24)..(24): Xaa in position 24 is Leu, Met or Val
  Variant (25)..(25): Xaa in position 25 is Ile, Leu or Met
  Variant (27)..(27): Xaa in position 27 is Asp, Glu or Gln
  Variant (28)..(28): Xaa in position 28 is any amino acid
  Variant (29)..(29): Xaa in position 29 is Phe, Ile, Leu or Met
GXXXXTRXXXXIDXXXXLNXALWXXAXXX

SEQ ID NO: 1327 - DNA, 723 bp, Escherichia coli
  CDS (1)..(723)
atgggacacaagcccttataccggcagattgccgatcgcattcgtgaacaaattgcgcgtggcgagcttaaacctggcgatgcgttacccactgaatcagcgctacaaacagagtttggcgtcagccgggttacggtgcgtcaggctttgcgccagctagtcgagcagcagatcctcgaaagcattcagggcagcgggacttacgtcaaagaagagcgggtcaattacgatatttttcagttaaccagttttgatgaaaaactgtcggaccgtcacgtcgatacacacagtgaagttctgatattcgaagtgattccggctgacgattttcttcagcaacagctacaaatcaccccgcaggatcgtgtgtggcatgtgaagcgcgtgcgctatcgcaagcaaaagccaatggcgctggaagaaacctggatgccgcttgcgttgttcccggatctcacctggcaggtcatggaaaattcgaaatatcactttatcgaagaagtgaagaaaatggttatcgatcgtagcgaacaggaaatcattcctctgatgccaaccgaagagatgagccgtctgcttaatatcagccagacaaagccgattcttgaaaaagtatcgcgtggatatttagttgatggtcgggtgtttgaatatagccgcaacgcttttaataccgatgactataaatttaccctgatagcgcagcgaaaatcatcgcgataa

SEQ ID NO: 1328 - protein, 240 aa, Escherichia coli
MGHKPLYRQIADRIREQIARGELKPGDALPTESALQTEFGVSRVTVRQALRQLVEQQILESIQGSGTYVKEERVNYDIFQLTSFDEKLSDRHVDTHSEVLIFEVIPADDFLQQQLQITPQDRVWHVKRVRYRKQKPMALEETWMPLALFPDLTWQVMENSKYHFIEEVKKMVIDRSEQEIIPLMPTEEMSRLLNISQTKPILEKVSRGYLVDGRVFEYSRNAFNTDDYKFTLIAQRKSSR

SEQ ID NO: 1329 - DNA, 723 bp, Listeria innocua
  CDS (1)..(723)
atgatcgataaacaatcaggaataccgatttacattcagattcaaagtgaaattaaaaagaaaatggaagatggtgtctggaaagttggcacttctattccagctgaacgtcaacttgctgaaatgtttcacgttagtcgaatgacagtaagacaagccattcaaggactagtcgatgataatattttgcaaagacgcgttggcgctgggacttttattgcggaaaagaaattaaccgaacgactagaagctgtcacaagttttacgaatttgatgttgcaagaagggaaagttccttcaacgcgtatcgtatcgtatggcattcgtccggcaagtacgcaagaacaagaagcgttacaactaccagaaaacagcaatgtaatgaaaattgaacggattcgttacggcgaccgtgtaccaattctttatgaagttgccgccattccagaaaaaattgcttcactgcttacaaaggaagacattatggattccctttataaagcgattgaattaaaacttggtcaaaaaatcggagaagcagaacaaacgatggaagcttctttagtatcagaaaaaattgcgccatatcttgatgtgaaactcggatcaccggttatgaaacttcggcagattacaactttagaagatggtcgaccatttgaatttacacgttctcaatatgtaggtagtagatttcaatttgtagctaggattaaacaataa

SEQ ID NO: 1330 - protein, 240 aa, Listeria innocua
MIDKQSGIPIYIQIQSEIKKKMEDGVWKVGTSIPAERQLAEMFHVSRMTVRQAIQGLVDDNILQRRVGAGTFIAEKKLTERLEAVTSFTNLMLQEGKVPSTRIVSYGIRPASTQEQEALQLPENSNVMKIERIRYGDRVPILYEVAAIPEKIASLLTKEDIMDSLYKAIELKLGQKIGEAEQTMEASLVSEKIAPYLDVKLGSPVMKLRQITTLEDGRPFEFTRSQYVGSRFQFVARIKQ

SEQ ID NO: 1331 - DNA, 798 bp, Yersinia pestis
  CDS (1)..(798)
atgccgggtggaatgggtggaaagggtgtggacagaaaattcatcgagacactgaaaacatactgtgatgatgctaaccggggagggggtccgctctaccagcgtctggagaaaggtttccgcgatctgatcacccgtggtgagctaaaagccggatacgcgattcccagcgaacgcgaactttcggaacgcttgaatctgtccagagtgacagtccggcgtgcgttaagtgaactggctaacgcgcaggttatcgtgcagcgtcgtggagcgagaagtactgtggcgggaagggttgaaaagccgctgtcttcgctgaccagctttagtgaggatatgatttcacgtggctatgagccaggcgcacgctggctacagaaagagcttactcacgcttctccctcggaaattattgcactgaatctgtctccaggtgctctggtgtggcgtctcaagcgcctgcgtaccgtagatgaacacccgatggcagtggagatcgccgtggtgccgcagatgtttattccagagatggatgaactgagggattcgctttattcagtactgcagttgcacgggtttatgcccgcccgcgcgttacagcgtattcgagcagaaccgctgagtcgcgatcacagccaactgttagatatgcctgctcacagcccggcgctgcatgttgagcgccattgctatctggaagatggccgcccgattgaatacacccatacctggtatcggggcgacagttacgattttctggttgaacttcagcgcgacatcacccccggtctgtcatga

SEQ ID NO: 1332 - protein, 265 aa, Yersinia pestis
MPGGMGGKGVDRKFIETLKTYCDDANRGGGPLYQRLEKGFRDLITRGELKAGYAIPSERELSERLNLSRVTVRRALSELANAQVIVQRRGARSTVAGRVEKPLSSLTSFSEDMISRGYEPGARWLQKELTHASPSEIIALNLSPGALVWRLKRLRTVDEHPMAVEIAVVPQMFIPEMDELRDSLYSVLQLHGFMPARALQRIRAEPLSRDHSQLLDMPAHSPALHVERHCYLEDGRPIEYTHTWYRGDSYDFLVELQRDITPGLS

SEQ ID NO: 1333 - DNA, 744 bp, Salmonella enterica subsp. enterica serovar Typhi
  CDS (1)..(744)
atgaaaacattgagtaaaagttcacacatcccactgtatcaacaggttgtggagtggataagggaaagtatttatagcggagaattggttgaggatgaccggataccttcagagtttcaaatcatggatatgctggaggtgagtcgcggtaccgttaaaaaagcggttgaccaacttgtccgggaaggtgttcttgtgcaagtgcagggtaaaggaactttcgtaaagaaggaaaatgttgcttacccactgggtgaaggtttgctctcctttgctgaagccttagccagccagaagataaacttcacaaccagcgtcataacctcccgactggaacccgctaaccgctttgtagcagagaaactgagtatcaaaccgggacaagatgttttatttcttaaacgccttcgttgtattggcgatgaaaaagtcatgttgattgaaaatcgtatcaacattgatctctgccccggtattattgatgtagattttaccagggagaatttattttcagcaatagaaagattatctgataagaaaataagtttttctgaaagccgttacgcagctaaattaattggtaatgagcgaggccattatcttgatattggtgaagacgcacctgttttgcatttggaacagttggtatttttctctagaggattggccattgattttggtaacgtctggttaaaaggtaataaatattatcttggcactattttacagcgcctggatgcctga

SEQ ID NO: 1334 - protein, 247 aa, Salmonella enterica subsp. enterica serovar Typhi
MKTLSKSSHIPLYQQVVEWIRESIYSGELVEDDRIPSEFQIMDMLEVSRGTVKKAVDQLVREGVLVQVQGKGTFVKKENVAYPLGEGLLSFAEALASQKINFTTSVITSRLEPANRFVAEKLSIKPGQDVLFLKRLRCIGDEKVMLIENRINIDLCPGIIDVDFTRENLFSAIERLSDKKISFSESRYAAKLIGNERGHYLDIGEDAPVLHLEQLVFFSRGLAIDFGNVWLKGNKYYLGTILQRLDA

SEQ ID NO: 1335 - DNA, 714 bp, Listeria innocua
  CDS (1)..(714)
atggttaagtatgaactgattgccgcagaaatccgtgaaaaaataaacaacggtacttatccaccagaatccattcttcctgatcaagtgagcttatctagagcttatgattgtagcagaatgacaataaaaaaagcctttgacgtacttgcgcttgaaggacttgtttacagacaacgtggtgcaggaacttttgtgatgaaaaatgccttagctaataaacaagatgcgagtttgcgagattatgacggtctaacaaaaatgatgggagacaatcgaatccgaagtaaaatcattgcattcgatattgctttcccagatgaaaaaacgcaagaacaactcttgattaaagcagaccaaccagtgtataaattgattcgtttgcgcctgttagatggtgagccgtatgtattagagcatacaaccatgccagcagatttagttccaggtttaacgagagagattttgcatcattctatttatgcatacttacaagacacactagggctcgttttaagtggtgcatttcgaaaaattaatgccgataagccatctgaatatgaccaagaatatttagcgtgcggagaacatgatccagttttagaagtggagcaagtagtgtatttaaaagacggtagaccagtcgaatattcccgttcaagacatcgctatgatacgagaagtttcattatggttgatcaccgagaaaagtaa

SEQ ID NO: 1336 - protein, 237 aa, Listeria innocua
MVKYELIAAEIREKINNGTYPPESILPDQVSLSRAYDCSRMTIKKAFDVLALEGLVYRQRGAGTFVMKNALANKQDASLRDYDGLTKMMGDNRIRSKIIAFDIAFPDEKTQEQLLIKADQPVYKLIRLRLLDGEPYVLEHTTMPADLVPGLTREILHHSIYAYLQDTLGLVLSGAFRKINADKPSEYDQEYLACGEHDPVLEVEQVVYLKDGRPVEYSRSRHRYDTRSFIMVDHREK

SEQ ID NO: 1337 - DNA, 723 bp, Listeria monocytogenes
  CDS (1)..(723)
atgatcgataaacaatcaggaataccgatttacattcagattcaaagtgaaattaaaaagaaaatggaagatggtgtctggaaagttggcacttctattccagctgaacgtcagcttgcagaaatgttccacgtcagccgaatgacggtaagacaagccattcaaggcctcgttgatgataacattttgcaaaggcgtgttggtgccgggacttttattgcggaaaagaaactaaccgaacgacttgaagcggttacgagttttacgaatttgatgttacaagaggggaaagttccttcgacgcgaatcgtatcgtacggtattcgtccggcaagtacgcaagaacaagaggcgttgcaactaccagaaaacagcaatgtaatgaaaattgagcggattcgttatggcgaccgcgttccaattctttatgaagttgcggccattccagaaaaaattgcttcactgcttacaaaggaagacattatggattccctttataaagcgattgaattaaaacttggtcaaccaattggagaagcggaacaaatcatggaagcttctttagtatcagaaaaaattgcgccatatcttgatgtgaaactcggatcaccggttatgaaacttaggcaaattacaacgttagaagacggtcgaccatttgaatttacgcgttcccagtatgtaggtagtagatttcaatttgtagctaggattaaacaataa

SEQ ID NO: 1338 - protein, 240 aa, Listeria monocytogenes
MIDKQSGIPIYIQIQSEIKKKMEDGVWKVGTSIPAERQLAEMFHVSRMTVRQAIQGLVDDNILQRRVGAGTFIAEKKLTERLEAVTSFTNLMLQEGKVPSTRIVSYGIRPASTQEQEALQLPENSNVMKIERIRYGDRVPILYEVAAIPEKIASLLTKEDIMDSLYKAIELKLGQPIGEAEQIMEASLVSEKIAPYLDVKLGSPVMKLRQITTLEDGRPFEFTRSQYVGSRFQFVARIKQ

SEQ ID NO: 1339 - DNA, 729 bp, Listeria monocytogenes
  CDS (1)..(729)
atggctcagaaccagacaaaatatagctttattgctgaagaaatccgcaaaagaattatgaatcacgcctatccgctaaatcaacctattcctgatgagataactttggcgaaagagtttgattgtagtcgaatgacaatgaaaaaagcgcttgaagtacttgtacttgaaggcttactataccggaaacgtggacatggtactttcattatcaaatcggcgctggacgcggaccgcttgcagattcataaccaagaggtaaacggcttcactaaacttttgaatggtaagaaagttattagtaaagtaatcgagtttaaagtcatttttccaaccgaagaaattgcagagcgccttcatatcgaaatggaaacgccaatctatgatattcttcgtgttcggctagtgaaagatgaaccatatgtattagaacacacgtatatgccggttggggttatcccaggcatcaatcagcaaattttggaaggatcgatttattcgtatattcaagatgatttgaacctaaaaatcgctagttcgtacaaacaaattcgcgcggataaagcgacgctgcttgatcagcaatatctcgactgcgcttctgatgacccagttgttgaagtagaacaaaccgtgtatttaaacaatggtctcgcgtttgaattttccagatcgcgccaccgttatgataaattcgtttttactaccgtgaatatcgctagacgataa

SEQ ID NO: 1340 - protein, 242 aa, Listeria monocytogenes
MAQNQTKYSFIAEEIRKRIMNHAYPLNQPIPDEITLAKEFDCSRMTMKKALEVLVLEGLLYRKRGHGTFIIKSALDADRLQIHNQEVNGFTKLLNGKKVISKVIEFKVIFPTEEIAERLHIEMETPIYDILRVRLVKDEPYVLEHTYMPVGVIPGINQQILEGSIYSYIQDDLNLKIASSYKQIRADKATLLDQQYLDCASDDPVVEVEQTVYLNNGLAFEFSRSRHRYDKFVFTTVNIARR

SEQ ID NO: 1341 - DNA, 729 bp, Listeria innocua
  CDS (1)..(729)
atggctcagaaccagacaaaatatagctttattgctgaagaaatccgcaaaagaattatgaatcacgcctatccgcttaatcaacctattcctgatgagataactttggcgaaagagtttgattgtagtcgaatgacaatgaaaaaggcgcttgaagtacttgtacttgaaggcttactatatcgtaaacgcgggcatggtactttcattatcaaatcggcgctggacgcggaccgtttgcagattcataaccaagaagtaaatggtttcactaaacttttagacggaaaaaaggtcattagcaaagtaattgagtttaaagtcatctttccaacagaagaaattgcggaacgtcttcatatcgaaatggaaacgccaatctatgatattcttcgtgttcggctagtgaaagatgaaccgtatgtgctagaacatacgtatatgccggttggggttatcccaggcattaaccagcaaattttagaaggttcgatttactcatatattcaagacgatttgaacctaaaaattgctagttcgtacaaacaaattcgcgcggataaagcgacactgcttgatcagcaatatctcgactgcgcttctgatgaccccgttgtcgaagtagaacaaaccgtttatttaaacaacggtctcgcgtttgagttttccagatcgcgtcaccgttatgataaattcgtgtttactaccgttaatattgctagacgttga

SEQ ID NO: 1342 - protein, 242 aa, Listeria innocua
MAQNQTKYSFIAEEIRKRIMNHAYPLNQPIPDEITLAKEFDCSRMTMKKALEVLVLEGLLYRKRGHGTFIIKSALDADRLQIHNQEVNGFTKLLDGKKVISKVIEFKVIFPTEEIAERLHIEMETPIYDILRVRLVKDEPYVLEHTYMPVGVIPGINQQILEGSIYSYIQDDLNLKIASSYKQIRADKATLLDQQYLDCASDDPVVEVEQTVYLNNGLAFEFSRSRHRYDKFVFTTVNIARR

SEQ ID NO: 1343 - DNA, 729 bp, Bacillus subtilis
  CDS (1)..(729)
atgttaaacaacggaagttctacacctttatacattcagctaaaacaaatcatcactgatgacatcaaaaagggcgtgtattccccaaccgccaagctgcctaccgaaaacgagctttgcaccaagtataacgtcagccgcatcaccgtcaggaaagccattctcgatttagtcgaagaaggctatctgatcaggcagcagggaaagggaacgttcgttaaaagccctaaattaaaacgagagctgatcgctgtaaacggctactcggaatttatggaatcaaccggcaaaaaaccgaagcatcatgtgctgtcccatgacatcattccagcgtcaaaacccatcgccgaaaagcttcaaatccaacccgagagccctgtggttgaattaaaacggattttatataatgatgatcagcctctcacctttgaagtgacgcattatccgcttgatttgtttcccggcattgatacctttattgctgacggcgtctccatgcatgatattttgaaacagcaatacaaagttgtacccacgcacaatacgaagctattaaacgttgtatatgcccaacaggaggaaagcaaatacctggattgtgatatcggggatgcgctgtttgaaattgataaaacggcttttacatcaaacgaccagccaatctattgctcattgtttttgatgcacacaaaccgtgtcacttttaccatcaacagcccctacacataa

SEQ ID NO: 1344 - protein, 242 aa, Bacillus subtilis
MLNNGSSTPLYIQLKQIITDDIKKGVYSPTAKLPTENELCTKYNVSRITVRKAILDLVEEGYLIRQQGKGTFVKSPKLKRELIAVNGYSEFMESTGKKPKHHVLSHDIIPASKPIAEKLQIQPESPVVELKRILYNDDQPLTFEVTHYPLDLFPGIDTFIADGVSMHDILKQQYKVVPTHNTKLLNVVYAQQEESKYLDCDIGDALFEIDKTAFTSNDQPIYCSLFLMHTNRVTFTINSPYT

SEQ ID NO: 1345 - DNA, 747 bp, Bacillus halodurans
  CDS (1)..(747)
atgaataaaaaaaacattgatcaatctctacactcctatgttaaaaatgagttagttaacgccatacaacaaggggtttatccagttaaatctcaattgccgacagaggctgaactatgccaaatgtacgacgttagtcgaacaacgattcgaaatgcattacaacaactcgtaatcgatggctatgtagagagaattcaaggaaaaggaaccttcgtcgcaagccgcagagtaaagcaaacgttatctgcaaccgaaggaaattatagtgaacagctacgcctgcaagggaaaaaaccgaaaatacaagtaattgatttaactgttgttccatctgatgagcttttgtcggctatgctggaaattgacgaaaatgaacctgtccaccgccttgaacgtattcgttatgcagacgacgcccctctacaatatgaaatttcttatttgccttggcgcaaaacgacttggttaacgaaagaaggctgtgaacactctctctatcaattgctgcaaagtcatcctgatctatcattagcaaagacgaaagagcatttgcatatcgtcctcgctgatgaagaagtcgctgaaaagctatcaatctctattggagatccttgtattcaaattgaaacccatgcgtacttagcggacgatacaaagatcgagtattccattgcttattttcacggtgaaaaggcgagctttacgatcgaacgaaactaccaaaaaccgactcagacgtcataa

SEQ ID NO: 1346 - protein, 248 aa, Bacillus halodurans
MNKKNIDQSLHSYVKNELVNAIQQGVYPVKSQLPTEAELCQMYDVSRTTIRNALQQLVIDGYVERIQGKGTFVASRRVKQTLSATEGNYSEQLRLQGKKPKIQVIDLTVVPSDELLSAMLEIDENEPVHRLERIRYADDAPLQYEISYLPWRKTTWLTKEGCEHSLYQLLQSHPDLSLAKTKEHLHIVLADEEVAEKLSISIGDPCIQIETHAYLADDTKIEYSIAYFHGEKASFTIERNYQKPTQTS

SEQ ID NO: 1347 - DNA, 723 bp, Bacillus halodurans
  CDS (1)..(723)
atgattaataaaaactctcctttaccgatttattatcagattgaagaacaaattaagcagcaaatcgaatcaggggtgctcaaacccggggatatgctcaaatccgagcgggagtatgcggagtattatgatgtcagtagaatgacggtaaggcaagcgattaacaaccttgtgaatcaaggatacatatataagaaaaaaggtagcggtacttatgttcaagagaaaaaaattgagcaggcgttaaacgggctgacgagttttacagaagatatgagaaaaagaggaatggagcctagcagtcgcttgctcaaatttgaactgattccagcaacggcaaaaatcgcaaaggaattaaacttgaaagagaacacgcccgttacagagattaaacgaatccgttatggtgatggggtaccaattgccattgaacgcaacctgttgcctgcgaacttagtgaagggattaaatgaggaaatcataaaccaatccttatatcaatacattgaggaagagttgaatttgcggatcgccgatgccctacaagtgattgaagcctcgactgctagcaaaacagaagccgatctattagagattcaaaaaggtagcccgattttgttaattgagcgtaaaacgtttttagccgatgggactgtattagagctagtgaaatccgcttaccgagccgatcggtataaatttatgattacgatgcaacgataa

SEQ ID NO: 1348 - protein, 240 aa, Bacillus halodurans
MINKNSPLPIYYQIEEQIKQQIESGVLKPGDMLKSEREYAEYYDVSRMTVRQAINNLVNQGYIYKKKGSGTYVQEKKIEQALNGLTSFTEDMRKRGMEPSSRLLKFELIPATAKIAKELNLKENTPVTEIKRIRYGDGVPIAIERNLLPANLVKGLNEEIINQSLYQYIEEELNLRIADALQVIEASTASKTEADLLEIQKGSPILLIERKTFLADGTVLELVKSAYRADRYKFMITMQR

SEQ ID NO: 1349 - DNA, 714 bp, Bacillus halodurans
  CDS (1)..(714)
atgaatgttaaaaaaagacctttatataaacagcttaaacaggaattaattcaaaaaattgaaagaggagagttaaaaccaggtgatgtattacctcctgaaagagaacttgcaaagatatttaatatgagtcgtatgacggttagacaagcgatttctgaacttgttaatgaatacgttcttattaggcgacatggtagtggaacatatgtggctgaacataaaattccacaagggaaaaaattaaaaagctttagtgaggagatgcgtttaagaggaatgttgcctgggtctaaactttgtgagaaaaaaattgttttaagcccttcagcgaacatggcggctgaactaaaatcagagggaaagctattcatgttaaaacgtttacggttagcagatctcgagcctatggcgatagagacaagtttgcttccgattaatagattccctagccttgaaaatagaaattttgaaaatgagtcactctatgaaatattagaggaagaatacaatattaaaatgacaaaggctcaacaaaaaattgaagtgagaatgccgacacctcaggaatcagaattacttgatataaattacacgataccagtttttcattttaaacaggtaacttttgatcaaaatgatactatttttgaggttgcccattcagtttataggggggaccgatatgaaatagagacggaaatctatcgctga

SEQ ID NO: 1350 - protein, 237 aa, Bacillus halodurans
MNVKKRPLYKQLKQELIQKIERGELKPGDVLPPERELAKIFNMSRMTVRQAISELVNEYVLIRRHGSGTYVAEHKIPQGKKLKSFSEEMRLRGMLPGSKLCEKKIVLSPSANMAAELKSEGKLFMLKRLRLADLEPMAIETSLLPINRFPSLENRNFENESLYEILEEEYNIKMTKAQQKIEVRMPTPQESELLDINYTIPVFHFKQVTFDQNDTIFEVAHSVYRGDRYEIETEIYR

SEQ ID NO: 1351 - DNA, 810 bp, Corynebacterium glutamicum
  CDS (1)..(810)
atgaacaccatgcctgaccaaccgctcaaccaggacggattccctaccgcatccaaaggggtggaacccgacaacctccccgaccgcgttctcgtggacggccttaaaccaaagcatcagcagcttcgtgaaattttggaggaaatctgcaccacccagcttcagcctggggacatgctgcctggtgagcgcatcctggaagaaaagtatggcgtcagccgaattacggttcgtcgggcgattggtgatctggtcgcgtccggcaggttgaagcgagctcgcggcaaaggtaccttcgtggcccactcgccgttgatttcccgcctgcatttggcctcgttttccgcagagatggccgcccagaagctatcggctaccagcaggattttgagttcttcccgcggtcccgccccagatgatattgctgatttctttggtaccgatcgcgcggcccagcacatcacgttgcgccgcctgcgctttggaaatggtcgaccctatgccattgacaacggttggtacaactccgaattcgcacctgacctgctggaaaatgatgtgtacaactccgtgtactccatcctggaccgcgtctatggcgtccccgtcacccaggccgagcaaacggtcaccgccgtagcagccgacgaagacaccgcacggcttctggacgtcacccccggcgccccactccttcgtatccttcgacagtcactttctggcgataagcccgtggaatggtgcgtttccttgtaccgaaccgaccgatattctttaaaaacattggttacacgctccgaagatctctag

SEQ ID NO: 1352 - protein, 269 aa, Corynebacterium glutamicum
MNTMPDQPLNQDGFPTASKGVEPDNLPDRVLVDGLKPKHQQLREILEEICTTQLQPGDMLPGERILEEKYGVSRITVRRAIGDLVASGRLKRARGKGTFVAHSPLISRLHLASFSAEMAAQKLSATSRILSSSRGPAPDDIADFFGTDRAAQHITLRRLRFGNGRPYAIDNGWYNSEFAPDLLENDVYNSVYSILDRVYGVPVTQAEQTVTAVAADEDTARLLDVTPGAPLLRILRQSLSGDKPVEWCVSLYRTDRYSLKTLVTRSEDL

SEQ ID NO: 1353 - DNA, 732 bp, Bacillus subtilis
  CDS (1)..(732)
atgaatatcaataaacaatcgcctattccgatttactatcagattatggagcaattaaaaacccaaattaagaacggagagctgcagccggatatgcctcttccttctgagcgcgaatatgccgaacaattcgggatcagccggatgacagttcgccaggcgctttctaatttagttaatgaaggcttgctctatcgcctgaaagggcggggcacctttgtcagcaagccaaaaatggaacaagcacttcaagggctgacaagctttaccgaggatatgaaaagccgcgggatgacaccgggcagcaggctcattgattatcagcttattgattcaactgaggagctcgcggctatattaggctgcgggcacccctcctctatccataaaatcactcgggtgcggctggcaaatgatattccgatggcgattgagtcctcacatattccgtttgagcttgcgggtgaattgaacgaatcgcattttcagtcgtcgatctatgatcatattgaaaggtacaacagcataccgatttcccgtgcaaaacaggagcttgagccaagcgctgccaccacggaagaagcgaatattcttggtattcaaaagggagcgcctgtcctattaattaaacgaacaacatatctgcagaacggaactgcttttgagcatgcaaaatccgtatacagaggcgaccgttatacatttgtccactatatggatcgtctttcataa

SEQ ID NO: 1354 - protein, 243 aa, Bacillus subtilis
MNINKQSPIPIYYQIMEQLKTQIKNGELQPDMPLPSEREYAEQFGISRMTVRQALSNLVNEGLLYRLKGRGTFVSKPKMEQALQGLTSFTEDMKSRGMTPGSRLIDYQLIDSTEELAAILGCGHPSSIHKITRVRLANDIPMAIESSHIPFELAGELNESHFQSSIYDHIERYNSIPISRAKQELEPSAATTEEANILGIQKGAPVLLIKRTTYLQNGTAFEHAKSVYRGDRYTFVHYMDRLS

SEQ ID NO: 1355 - DNA, 744 bp, Caulobacter crescentus
  CDS (1)..(744)
atgacgtttgcggaacgaatcggccgtctcgacgccacgggcgatcacgccccgctgtaccggcagctgcagcgcgcgctgcgcgaagccatccagaagaaggtgctggctccggacgacgcccttcccgccgagcgggacatggcggacgaattcaacatctcgcgcatcaccgttcgcaaggcgctggacggcctggtcagcgagggcctgctgacgcgccgccaaggcgccgggacctttgtcgccgcgcgggtcgagaagagcttctccaagctgtcctcgttcaccgaggacatgatctctcgcggccgcgtcccgcgcagcgagtggatcagccgcagcgagggccaggtgacccccgaggagtcgctgaccctgggcctgtcgcccggaaccccggtctatcggttcgcacggatccgctatgcggacggcgcgccgatggcggtggaatacacaacgatcgcggccttcgccctgccctccaccgaagtggtcggcacatcgctctatgaagcgctggagacgaccggtcaccgcccggtgcgcgcgctccagcggctgcgcgcggtgctgttccaggccgagcaggcggacctgctgggcgtgcccgtcaaggacgccggcctgctgatcgagcggcgaggcttcctgaaggacgggcgggccgtcgaggtcacgcaatcctactaccgcggcgacgcctacgacttcgtcgccgaactgaattccctgtcctga

SEQ ID NO: 1356 - protein, 247 aa, Caulobacter crescentus
MTFAERIGRLDATGDHAPLYRQLQRALREAIQKKVLAPDDALPAERDMADEFNISRITVRKALDGLVSEGLLTRRQGAGTFVAARVEKSFSKLSSFTEDMISRGRVPRSEWISRSEGQVTPEESLTLGLSPGTPVYRFARIRYADGAPMAVEYTTIAAFALPSTEVVGTSLYEALETTGHRPVRALQRLRAVLFQAEQADLLGVPVKDAGLLIERRGFLKDGRAVEVTQSYYRGDAYDFVAELNSLS

SEQ ID NO: 1357 - DNA, 711 bp, Streptococcus pneumoniae
  CDS (1)..(711)
atgaagaaataccaacaattatttaagcaaatccaagaaaccattcaaaacgagacttacgctgtcggagatttccttcctagcgagcacgaccttatggagcaatatcaagtgagtcgtgataccgtccgaaaggccctgtctctcctccaagaggaaggattgatcaaaaagataagagggcaaggttctcaagtcgtcaaagaagaaaccgtcaatttccctgtatccaacctaaccagctaccaagaactagttaaagaacttggactgcgctctaaaaccaacgtggtcagtctggacaagattattattgataaaaaatcctcactgataaccggtttcccagagtttcggatggtttggaaggtggtccgccagcgtgtggtggatgatctggtatccgttctggatacggactatctggatatggaactcatcccaaatctcactcgccaaattgctgagcagtctatctattcttatatagaaaatggcctcaaactccttattgattatgctcagaaggaaatcaccattgaccactcaagcgaccgagacaagattctcatggacattggcaaagacccttatgtcgtttcgattaaatcaaaagtctatctccaagacggacgccaatttcagtttaccgaaagtcgccataagttagagaaatttagatttgtagattttgcaaaacgcaagaaatag

SEQ ID NO: 1358 - protein, 236 aa, Streptococcus pneumoniae
MKKYQQLFKQIQETIQNETYAVGDFLPSEHDLMEQYQVSRDTVRKALSLLQEEGLIKKIRGQGSQVVKEETVNFPVSNLTSYQELVKELGLRSKTNVVSLDKIIIDKKSSLITGFPEFRMVWKVVRQRVVDDLVSVLDTDYLDMELIPNLTRQIAEQSIYSYIENGLKLLIDYAQKEITIDHSSDRDKILMDIGKDPYVVSIKSKVYLQDGRQFQFTESRHKLEKFRFVDFAKRKK

SEQ ID NO: 1359 - DNA, 729 bp, Streptococcus pneumoniae
  CDS (1)..(729)
atgagtacaaaatatttatttatttacaatgagattcgtgaaaagattctttgtaataaatataccatgaacgaacaattgcctgatgaaatgacattagctaaacagtttgcctgtagtcgaatgacgatcaaaaaagctttagacttgttagtttctgagggcttaatttttagaaaacgtgggcagggaacctttgttctctctcgtggcagctcaaaaagaaaattaatcgttccagaaagagatatccggggactgacaaaaatatctgaagatgctcattctacaattgactcgaggattattcacttcaaattagaatttgcaaatgaatttttagcagaaaaactacaggtcgctttgcagagtccagtttataatatttaccgcctgcgtattattgacggtaaaccttatgttctggaacaaacttatatgagtaccgatgttattccaggtattactgaagatattttacaaaaatcgatttacaattacattgaaggaaagttaggattgcatattgccagtgctacaaaaatcttacgagcttcttctagttcagaaaatgagcaacattacttgcagctccttccaacggaaccggtatttgaagtagaacaagtggcttatttggataacggaactccgtttgagtactcgattagtcgtcatcgctatgatttatttgaatttaattcttttgcattacgacattcctcctag

SEQ ID NO: 1360 - protein, 242 aa, Streptococcus pneumoniae
MSTKYLFIYNEIREKILCNKYTMNEQLPDEMTLAKQFACSRMTIKKALDLLVSEGLIFRKRGQGTFVLSRGSSKRKLIVPERDIRGLTKISEDAHSTIDSRIIHFKLEFANEFLAEKLQVALQSPVYNIYRLRIIDGKPYVLEQTYMSTDVIPGITEDILQKSIYNYIEGKLGLHIASATKILRASSSSENEQHYLQLLPTEPVFEVEQVAYLDNGTPFEYSISRHRYDLFEFNSFALRHSS

SEQ ID NO: 1361 - DNA, 708 bp, Streptococcus pneumoniae
  CDS (1)..(708)
atgaaaaatatgctacctgcttatatgaaaatccatgatcagataaaaaaggatattgacgagcaccgttgggctattggtgagaggcttcccagtgaaagagatttagctgagcagtttgcggtcagtcgcatgaccctccgccaagccgtatctctattagtcgaagaaggcgtcttagagcgccgtgtaggaagcggcacctttgtttccagtactcgagtacaagaaaagatgcgagggacaaccagttttactgaaattgtcaaatcccaaggtaaagttccctctagccagctcatttcctacaaaaaaaccattcccaatgagcaagaagttgccaagctaggaatttttccaacggacaatattatccgaatggagcgggtccgctatgccgaccaagttcccctagtttatgaagttgcttctattcctgaaaaattcattaaggactttaaaaaagaagaaatcaccagtcatttcttccaaaccttgcaaaaacatggctatcgtatcggtaaatcccaacagaccatctatgctcgccttgctaaagaaaagattgcccactatttggaagttgaaaaaggacatgctattcttggattgacccagatttcctacctagaagatggtactgcttttgaatacgtaaaaagtcaatatgtaggcgaacgctttgaattttatcttgaaaataattag

SEQ ID NO: 1362 - protein, 235 aa, Streptococcus pneumoniae
MKNMLPAYMKIHDQIKKDIDEHRWAIGERLPSERDLAEQFAVSRMTLRQAVSLLVEEGVLERRVGSGTFVSSTRVQEKMRGTTSFTEIVKSQGKVPSSQLISYKKTIPNEQEVAKLGIFPTDNIIRMERVRYADQVPLVYEVASIPEKFIKDFKKEEITSHFFQTLQKHGYRIGKSQQTIYARLAKEKIAHYLEVEKGHAILGLTQISYLEDGTAFEYVKSQYVGERFEFYLENN

SEQ ID NO: 1363 - DNA, 717 bp, Escherichia coli
  CDS (1)..(717)
atgatctacaaaagcattgcggagcggttaagaattcgacttaactccgcagatttcacgctaaacagccttcttcccggtgaaaaaaagctggcggaagagtttgcggtatcgcggatgaccatccgtaaagccattgacctgctggtagcgtgggggctggtggtccgccgccacggtagtggcacttacctggtgcgcaaagatgtactgcatcaaaccgccagtctgaccgggctggtggaggtgttaaaacggcagggaaaaacggtcaccagccaggtgctgatttttgaaatcatgcctgcgcctccggccattgccagccagttacggattcaaatcaacgagcagatctacttctcccgtcgcgttcgttttgtggaagggaaaccgctgatgctggaagacagctatatgccggtaaaactgttccgtaatctttcgctgcaacatctggaagggtcgaagtttgaatatattgaacaagagtgcgggattttgattggcggtaattatgaaagcctgacgccagtgctcgccgatagactgctggcgcggcaaatgaaggtagcggaacacacgccactgctgcggatcacctcgttgtcatatagcgagagcggggagtttttgaattattcagtgatgttcagaaatgccagcgaataccaggtggagtaccatttacggcgactccacccggaaaagagttaa

SEQ ID NO: 1364 - protein, 238 aa, Escherichia coli [sequence omitted]

SEQ ID NO: 1365 - DNA, 708 bp, Lactococcus lactis subsp. lactis
  CDS (1)..(708)
atggcaagaaaatcagtaccgaattatgtaaaaatacatgatgccttaaaagatgaagttgaaaaaggcatctggaaaattggacaacgtcttccaagcgaacgtgatttggccgagcgttttactgtcagtcgaatgacagcaagacaagcggtaacagctttggttgatgaaggaattcttgaccgtcgtgtgggttctggaacttatgttgctagccgacgtgttcgcgaaaaaatgcgtggaacaacttcctttacagaaattatcagctcacaaggtaaagttccttcaacagaagttttgagttatattagaacggcgccaaatgaggttgaatgtgaaaaactaaatatcaccaaaaaggattccatcatccgaatggagcggattcgttatgcggataatgttccaatttgttatgaagtggcaagcattcctttcaaattggtcaaatcttttgataaaaaagaaattactagtaacttctttaaaactttagaaagtcacggacatgtgattggtcgtagtgaacagattgtttcagctaaaagagtcagtacagaggtttcagagtatttaaaaacaagagttggagctgctattcttggtttaactcaggtttcttatttaacagatggtacagcttttgaatatgtcttatctcaatatgttggtgaccgttttgaattttatttggaaagataa

SEQ ID NO: 1366 - protein, 235 aa, Lactococcus lactis subsp. lactis
MARKSVPNYVKIHDALKDEVEKGIWKIGQRLPSERDLAERFTVSRMTARQAVTALVDEGILDRRVGSGTYVASRRVREKMRGTTSFTEIISSQGKVPSTEVLSYIRTAPNEVECEKLNITKKDSIIRMERIRYADNVPICYEVASIPFKLVKSFDKKEITSNFFKTLESHGHVIGRSEQIVSAKRVSTEVSEYLKTRVGAAILGLTQVSYLTDGTAFEYVLSQYVGDRFEFYLER

SEQ ID NO: 1367 - DNA, 756 bp, Escherichia coli
  CDS (1)..(756)
atgcgcgccatgaaatcattaagtaagtcgtcacaaataccgctctatcaacaagtggtggagtggataagagaaagtatttataccggagatctggtggaagacgatcgcattccttcggaataccagattatggatatgctggacgtgagtcggggaaccgttaaaaaagcggtcgcccaactggtaaaagaaggcgtgttaatacaggtccagggtaagggaacatttgtcaaaaaagagaacgtggcatatccgttaggtgaaggattattgtcattcgcggaatcgctggaaagccagaaaatacattttaccactgaagttattacgtcacggattgaatcggctaatcgttatgtggcagagaaattaagaataacgcccggtcaggatattctttaccttgaacgcttacgctcaattggtgatgaaaaagcgatgctgatagagaaccgtatcaatattgagctatgccccggtattgctgaaatcgattttaatcaacacaatttatttccaacaatagaaagtttgtcgcaaagaaaaattcgttactcggaaagtcgctatgccgcgcgattaattggtaatgaacgtggtcattttttagatatcagtgaagacgcacccgttttgcatctggagcagttagtctttttctcccgaggattacccattgagtttggcaacgtctggttaaaaggaaataaatattatcttggcaccgtactgcaacggcgggaagtgagttaa

SEQ ID NO: 1368 - protein, 251 aa, Escherichia coli
MRAMKSLSKSSQIPLYQQVVEWIRESIYTGDLVEDDRIPSEYQIMDMLDVSRGTVKKAVAQLVKEGVLIQVQGKGTFVKKENVAYPLGEGLLSFAESLESQKIHFTTEVITSRIESANRYVAEKLRITPGQDILYLERLRSIGDEKAMLIENRINIELCPGIAEIDFNQHNLFPTIESLSQRKIRYSESRYAARLIGNERGHFLDISEDAPVLHLEQLVFFSRGLPIEFGNVWLKGNKYYLGTVLQRREVS

SEQ ID NO: 1369 - DNA, 732 bp, Clostridium acetobutylicum
  CDS (1)..(732)
atgaagatagtatcaaaatcaagtcctcttcctcttcattatcagctcaagatgattttacaggaaatgatcgaaaatgaagaattgcttcctggagatactattcctactgaaagagaactttgtgaaatccagaaaataagtagaatgactgtaaataaagcaattctatcattagtgtctgaaggtattctctatagggagcaaggtaagggaacctttgtagccaaaaaaaaggagaaacaacaactgacaaagctaaagagttttactgaagaaatgagggaaaagggcctaaacataagtacaaaaatactatcctttgaaataaaaactgccacaaaacatataagcaccttattggaacttccacataagaaaatgaaagttatagaaataatacgtcttagattaacagataatgatccctctgcaatagaaactgttgtacttcccttgtatttatttagtgatatgacaaaagaagttattgatgggaaatctctatacaatacctttagagagaaatatggctatgagcctacaaaggcaaaacaaactattgaacctatcatgctaacagactatgaggcaaaattcttaaatcaagtaggtaattccttagcccttctttttcgaagactcacctatagaaaggatggagttcctattgaatacacaaaatcaatatatagaagtgaaaaatataaatatgaagtaatattaacttag

SEQ ID NO: 1370 - protein, 243 aa, Clostridium acetobutylicum
MKIVSKSSPLPLHYQLKMILQEMIENEELLPGDTIPTERELCEIQKISRMTVNKAILSLVSEGILYREQGKGTFVAKKKEKQQLTKLKSFTEEMREKGLNISTKILSFEIKTATKHISTLLELPHKKMKVIEIIRLRLTDNDPSAIETVVLPLYLFSDMTKEVIDGKSLYNTFREKYGYEPTKAKQTIEPIMLTDYEAKFLNQVGNSLALLFRRLTYRKDGVPIEYTKSIYRSEKYKYEVILT

SEQ ID NO: 1371 - DNA, 747 bp, Bordetella parapertussis
  CDS (1)..(747)
atgatgtctgaatcgaaccatgccccgctctatgcccgggtcgaggccgtgctggccgaggcgatcgccgcgggcgaactgccgccgggcagccagttgcccgccgaagacggcctgatcgcgcgcttccaggtcagccgcaccacggtgcgcaaggccatccagaacctggccgagcgtgggctggtcgagatccggcgcggcaagggcaccttcgtggcgcagccgagggtggtgcaggagctcaccgagctcaccggtttcgtggaggacatgcaggccttgggccgcgtgccctcggcgcgcctgctggacgccgagatcgtggccgccggccaggccgtggcgcgccagctggcggtggcgccgggcacgcaggtcatgcgcatccggcgcgtgcgcctggccgatggcgtggccatgtcgctggacgaaacctatctgccgcgcgaaatcggcgaacaggtcgtcacgcacgacctggaggccgagcccatcttcgcgctgctggaacagaaatacgacctgccgctggtcgaggccgaataccggctcgaggccgccatcgccacgcccgaagtggcgcgggccctggcggtgccgcccggcagtccggtcttcctgatcgagcgcacctcgtattgcgcgggccctcggcccatcgactacgaaaagctgtactaccgcggcgacctgatccgcttcgtgacgcggctggcgcggcgcgcgcggcccgtgccggcatga

SEQ ID NO: 1372 - protein, 248 aa, Bordetella parapertussis
MMSESNHAPLYARVEAVLAEAIAAGELPPGSQLPAEDGLIARFQVSRTTVRKAIQNLAERGLVEIRRGKGTFVAQPRVVQELTELTGFVEDMQALGRVPSARLLDAEIVAAGQAVARQLAVAPGTQVMRIRRVRLADGVAMSLDETYLPREIGEQVVTHDLEAEPIFALLEQKYDLPLVEAEYRLEAAIATPEVARALAVPPGSPVFLIERTSYCAGPRPIDYEKLYYRGDLIRFVTRLARRARPVPA

SEQ ID NO: 1373 - DNA, 747 bp, Bordetella bronchiseptica
  CDS (1)..(747)
atgatgtctaaatcaaaccatgcgccgctctatgcccgggtcgaggccgtgctggccgaggcgatcgccgcgggcgaactgccgccgggcagccagttgcccgccgaagacggcctgatcgcgcgcttccaggtcagccgcaccacggtgcgcaaggccatccagaacctggccgagcgcgggctggtcgagatccggcgcggcaagggcaccttcgtggcgcagccgagggtggtgcaggagctcaccgagctcaccggtttcgtggaggacatgcaggccttgggccgcgtgccctcggcgcgcctgctggacgccgagatcgtggccgccggccaggccgtggcgcgccagctggcggtggcgccgggcacgcaggtcatgcgcatccggcgcgtgcgcctggccgatggcgtggccatgtcgctggacgaaacctatctgccgcgcgaaatcggcgaacaggtcgtcacgcacgacctggaggccgagcccatcttcgcgctgctggaacagaaatacgacctgccgctggtcgaggccgaataccggctcgaggccgccatcgccacgcccgaagtggcgcgggccctggcggtgccgcccggcagcccggtcttcctgatcgagcgcacctcgtattgcgcgggcccccggcccatcgactacgaaaagctgtactaccgcggcgacctgatccgcttcgtgacgcggctggcgcggcgcgcgcggcccgtgccggcatga

SEQ ID NO: 1374 - protein, 248 aa, Bordetella bronchiseptica
MMSKSNHAPLYARVEAVLAEAIAAGELPPGSQLPAEDGLIARFQVSRTTVRKAIQNLAERGLVEIRRGKGTFVAQPRVVQELTELTGFVEDMQALGRVPSARLLDAEIVAAGQAVARQLAVAPGTQVMRIRRVRLADGVAMSLDETYLPREIGEQVVTHDLEAEPIFALLEQKYDLPLVEAEYRLEAAIATPEVARALAVPPGSPVFLIERTSYCAGPRPIDYEKLYYRGDLIRFVTRLARRARPVPA

SEQ ID NO: 1375 - DNA, 738 bp, Bacillus cereus
  CDS (1)..(738)
atgctgatgaacatcgacaagtattcaccatttccgatctattatcagattcaagagtgggtgaaacagctaattgaggacggcgaatggaagccgggagataaaatcccatctgagaatgaactttgtgataagttcgaagtgagtcgaatgacaatcagacaggcgattaataatttagtggaacaaggctatttatatcggaagcgtggaattggaacatttgtccaacttccgaaagtggaacaaaaattgcaaggaatgacgggattcacagaagacatgatttctcgtgggatgaacccaagtagtcaattacttagtttccgcctagttccagctactgctaaaatagcagaccggttgagaatacaggagggggaatcggtttatgaagtgaggcgtattcgcttagctgatgatgaaccgattgcttttgagacgacatatttgtcgccagctcttgtaaaagatattaacgaagagatattgcaacaatctttatatgaacatttagagaaaaaactgggctttaaacttgttagcgctactcagtcaattgaagcttccgttgcgacggaaaatgaagctgaacatctgcatattcctaaaaaggcgcctgtacttgtaatgcgtcaatggtcatattcagaaggtgagataccgctagagtacgtgaaatgtatttatcgtggagatcgttataaatttattacgaatatcgcacgtaacaaatag

SEQ ID NO: 1376 - protein, 245 aa, Bacillus cereus
MLMNIDKYSPFPIYYQIQEWVKQLIEDGEWKPGDKIPSENELCDKFEVSRMTIRQAINNLVEQGYLYRKRGIGTFVQLPKVEQKLQGMTGFTEDMISRGMNPSSQLLSFRLVPATAKIADRLRIQEGESVYEVRRIRLADDEPIAFETTYLSPALVKDINEEILQQSLYEHLEKKLGFKLVSATQSIEASVATENEAEHLHIPKKAPVLVMRQWSYSEGEIPLEYVKCIYRGDRYKFITNIARNK

SEQ ID NO: 1377 - DNA, 732 bp, Bacillus anthracis
  CDS (1)..(732)
atgaacatcgacaagtattcaccatttccgatctattatcagattcaagagtgggtgaaacagctaattgaggacggcgaatggaagccgggagataaaatcccatctgagaatgaactttgcgataagttcgaagtgagtcgtatgacaatcagacaggcgattaataatttagtggaacaaggttatttatatcggaaacgtggaatcggtacgtttgtccaacttccgaaagtggaacaaaaattgcaaggaatgacaggattcacagaagatatgatttctcgtgggatgaacccaagtagccaattattaagtttccgcctcgttccagctactgcgaaaatagcagaccggctgagaatacaggagggagagtcggtttatgaagtgaggcgtattcgcttagctgacgatgaaccgattgcttttgagacgacatatttgtcgccagctcttgtaaaagatattaacgaagaaatattgcaacaatctttatatgaacatttagagaaaaaactgggcttcaaacttgttagcgctactcaatcaattgaagcttcaattgcaacggataatgaagcggaacatctgcatattcctaaaaaggcgccagtgcttgtcatgcgtcaatggtcatattcagaaggtgaagtaccgttagagtatgtgaaatgtatttatcgtggagatcgttataagtttattacaaacatcgcacgtaacaaataa

SEQ ID NO: 1378 - protein, 243 aa, Bacillus anthracis
MNIDKYSPFPIYYQIQEWVKQLIEDGEWKPGDKIPSENELCDKFEVSRMTIRQAINNLVEQGYLYRKRGIGTFVQLPKVEQKLQGMTGFTEDMISRGMNPSSQLLSFRLVPATAKIADRLRIQEGESVYEVRRIRLADDEPIAFETTYLSPALVKDINEEILQQSLYEHLEKKLGFKLVSATQSIEASIATDNEAEHLHIPKKAPVLVMRQWSYSEGEVPLEYVKCIYRGDRYKFITNIARNK

SEQ ID NO: 1379 - DNA, 738 bp, Bacillus anthracis
  CDS (1)..(738)
atggcaagcggatccacacaagtaaaatacctcggcatttatcaaaaaatgaaacagcaaattttagacggcgaatataagattaacgaaaaaattccaagtagccccgtccttgctgaagaatttgatgtttctgtccttactataaaaaaagcgctggatctgttagttagagacggctacatcattcgccggcgcggaagtggaacagtcgttcaagattggcgtcagcaggaaaaagcacgaatgattcaaactttaacaggtacaaaagctgtttatggcagcgaggtagaaagtaaaattattgagtttacgattgtcggtgccgatgaaattattgctgaaaaattgggcatttcagtaggagattttgtatataaaatcatccgcctccgcatcattcacagtattccaacgattatggagcatacatggatgccgatttcggtcattccaggtgttgaagtttctgttttagaggaatcaatctactcccacattcaaaataaactaggccttcaagtgggaacatccgttgttagggtaaaaggaattcgcccggatgataaagaaaagcagtttatgaacttaacaaatcaagatttcctaatgagagtggaacaggtggcctacttaacggatggacgcacttttgaatactcttacgccgatcacttgccggaaacctttgaattcgaaacagttattactgcaaaaagttataaagaggcataa

SEQ ID NO: 1380 - protein, 245 aa, Bacillus anthracis
MASGSTQVKYLGIYQKMKQQILDGEYKINEKIPSSPVLAEEFDVSVLTIKKALDLLVRDGYIIRRRGSGTVVQDWRQQEKARMIQTLTGTKAVYGSEVESKIIEFTIVGADEIIAEKLGISVGDFVYKIIRLRIIHSIPTIMEHTWMPISVIPGVEVSVLEESIYSHIQNKLGLQVGTSVVRVKGIRPDDKEKQFMNLTNQDFLMRVEQVAYLTDGRTFEYSYADHLPETFEFETVITAKSYKEA

SEQ ID NO: 1381 - DNA, 765 bp, Streptomyces avermitilis
  CDS (1)..(765)
atgagcaccgacgtcagcagtgcggagaacgagggcggggcacccatccgtaccgcgcgtgtgcccaagtactaccgcctgaagaagcacctgctcgacatgacggagacgctgccgcccggcacacccgtgccgcccgagcgcacgctggccgccgagttcgacacctcccgcacgaccgtccgccaggccctccaggagctggtcgtcgagggccgcctggagcgcatccagggcaagggcacgttcgtcgccaagccgaaggtctcccaggcgctgcaactcacctcgtacaccgaggacatgcgcgcccagggtctcgaaccgacctcgcagctcctggacatcggctacatcaccgcggacgacaccctcgccgggctgctcgacatcaccgcgggcggccgcgtgctgcgcatcgagcggctgcgcctggccagcggcgagccgatggccatcgagacgacccatctgtccgccaagcgcttccccgcgctgcgcaggtcgctggtcaagtacacgtcgctctacaccgcgctcgccgaggtctacgacgtccgtctcgccgaggccgaggagaccatcgagacctcgctggccaccccgcgcgaggccggactgctgggcaccgacgtcggcctgcccatgctgatgctctcgcggcactcgctggacaaggacggccggccggtggagtgggtgcggtcggtgtaccgcggggaccgctacaagttcgtggcgagactcaagcgcccccaggactga

SEQ ID NO: 1382 - protein, 254 aa, Streptomyces avermitilis
MSTDVSSAENEGGAPIRTARVPKYYRLKKHLLDMTETLPPGTPVPPERTLAAEFDTSRTTVRQALQELVVEGRLERIQGKGTFVAKPKVSQALQLTSYTEDMRAQGLEPTSQLLDIGYITADDTLAGLLDITAGGRVLRIERLRLASGEPMAIETTHLSAKRFPALRRSLVKYTSLYTALAEVYDVRLAEAEETIETSLATPREAGLLGTDVGLPMLMLSRHSLDKDGRPVEWVRSVYRGDRYKFVARLKRPQD

SEQ ID NO: 1383 - DNA, 756 bp, Enterococcus faecalis
  CDS (25)..(756)
ccagttagggtaaaggagaaagttatggaaaatgcctttaaaaacaaagctttgtatcatcaacttgttgatttgctgcaggaacgaatcgaaacatgcatgattcctcatgacaagttgccctctgaacgtgaattgactgcacaatatggagtgagtcggacgacggtccggttagcgctacaagaactagaaaatagaggttccatctatcgtcgtcatggcaaaggaacatttgtttcagatataaaaaaagaggccgctgatttagctggcgcatatagttttacagaacaaatgaaagggctgggtcgaaaaccacatacccgtatattatccttcgaaaaattggaagcggataaatttatttgtcagcatttgaatctttcgttaggagaggcagtttttaaattaagtcggttgcggattgctgataacgagccattaatggttgaagacacatacttgcctgtgaaatttttcttatcactcacggatcaattactacgtagcaaaccattatatgatctattttcggaagattttaagcaaaccgttcgtttagctgatgaagaattatacgctagcattgcgtcaaaagaagatgccaaattattgatgattccggaaggagcgccagtccttcatttagcacgccagacatataacatgaaaaatgaaattattgaatttacgttgagtgtggcgcgagcagatcaatttcattatcagatacgccatattcggaatagttag

SEQ ID NO: 1384 - protein, 243 aa, Enterococcus faecalis
MENAFKNKALYHQLVDLLQERIETCMIPHDKLPSERELTAQYGVSRTTVRLALQELENRGSIYRRHGKGTFVSDIKKEAADLAGAYSFTEQMKGLGRKPHTRILSFEKLEADKFICQHLNLSLGEAVFKLSRLRIADNEPLMVEDTYLPVKFFLSLTDQLLRSKPLYDLFSEDFKQTVRLADEELYASIASKEDAKLLMIPEGAPVLHLARQTYNMKNEIIEFTLSVARADQFHYQIRHIRNS

SEQ ID NO: 1385 - DNA, 708 bp, Enterococcus faecalis
  CDS (1)..(708)
atggttcaaaatataccaatttatattcaaattcacgataaaatcaaagaagatattgaaaaaggtgtctggagtatcggggatcgtttgccctctgagcgagaattagccttgaaatttgatgttagtcgaatgaccttacgccaagccatccagactttagcagacgaagggattttagaacgaaaaattggttcaggaacgtatgtagcacgtaagaaagttcaagaaacaatgacaggtaccactagttttacagaaattaccttgtctcaaaatcgcgttccttctagtcggacggtgtcttattttgtagcgaaacctagttctagtgagatggaaaaattacaactaggtccagaagattcaattttacgaatggaaagaattcgttttgcggatgacattccgatttgttttgaggtggcgagcattccttattcattggtctcgcaatatggcaaatctgaaatcacgaactctttttataaaacacttgaagccaaatctggccacaaaattggccattctaaccaaacaatctctgctgttcaagcatcggaacagatcgcagaatatttagagattaaacgaggcgatgcgattctgcgtgtgcgccaagtatcctattttgaaaacggactaccttttgaatatgttcgtacgcagtatgcaggaagtcgatttgagttttatttagagaagtag

SEQ ID NO: 1386 - protein, 235 aa, Enterococcus faecalis
MVQNIPIYIQIHDKIKEDIEKGVWSIGDRLPSERELALKFDVSRMTLRQAIQTLADEGILERKIGSGTYVARKKVQETMTGTTSFTEITLSQNRVPSSRTVSYFVAKPSSSEMEKLQLGPEDSILRMERIRFADDIPICFEVASIPYSLVSQYGKSEITNSFYKTLEAKSGHKIGHSNQTISAVQASEQIAEYLEIKRGDAILRVRQVSYFENGLPFEYVRTQYAGSRFEFYLEK

SEQ ID NO: 1387 - DNA, 675 bp, Shigella flexneri
  CDS (1)..(675)
atgatctacaaaagcattgcggagcggttaagaattcgacttaattccgcggatttcacgctaaacagccttcttcccggtgaaaaaaagctggcggaagagtttgcggtatcgcggatgactatccgtaaagccattgacctgctggtagcgtgggggctggtggtccgccgccacggcagcggcacttacctggtgcgcaaagatgtgctgcatcaaaccgccagcctgaccggactggtggaggtgttaaaacggcagggaaaaacggtcaccagccaggtgctgatttttgaaatcatgcctgcgcctccggccattgccagccagttacggattcaaatcaacgagcagatctacttctcccgtcgcgttcgttttgtggaagggaaaccgctaatgctggaagacagctatatgccggtaaaactgttccgtaacctttcgctgcaacatctggaagggtcgaagtttgaatatattgaacaagagtgcgggattttgattggcggtaattatgaaagcctgatgccggtgctcgccgatagactgctggcgcggcaaatgaaggtagcggaacacacgccactgctgcggatcacctcgttgtcatatagcgagagcggggagtttttgaattattcagtgatgttcagaaatgccagcgaatactag

SEQ ID NO: 1388 - protein, 224 aa, Shigella flexneri
MIYKSIAERLRIRLNSADFTLNSLLPGEKKLAEEFAVSRMTIRKAIDLLVAWGLVVRRHGSGTYLVRKDVLHQTASLTGLVEVLKRQGKTVTSQVLIFEIMPAPPAIASQLRIQINEQIYFSRRVRFVEGKPLMLEDSYMPVKLFRNLSLQHLEGSKFEYIEQECGILIGGNYESLMPVLADRLLARQMKVAEHTPLLRITSLSYSESGEFLNYSVMFRNASEY

SEQ ID NO: 1389 - DNA, 723 bp, Shigella flexneri
  CDS (1)..(723)
atgggacacaaacccttataccgacagattgctgatcgcattcgtgagcaaattgcgcgtggcgagcttaaacctggcgatgcgttacctaccgaatcggcattacaaacagagtttggcgtcagccgggttacggtgcgtcaggctttgcgccagttagtcgagcaacagatcctcgaaagcattcagggcagcgggacttacgtcaaagaagagcgggtcaattacgatatttttcagttaaccagttttgatgaaaaactgtcggaccgtcacgtcgatacacacagtgaagttctgatatttgaagtgattccggctgacgattttcttcagcaacagctacaaatcaccgtgcaggatcgtgtgtggcatgtgaagcgcgtgcgctatcgcaagcaaaagccaatggcgctggaagaaacctggatgccgcttgcgttgttcccggatctcacctggcaggtcatggaaaattcgaaatatcactttattgaagaagtgaagaagatggttatcgatcgtagcgaacaggaaatcattcctctgatgccaaccgaagagatgagccgtctgcttaatatcagccagacaaagccgattcttgaaaaagtatcgcgtggatatttagttgatggtcgggtgtttgaatatagccgcaacgcttttaataccgatgactataaatttaccctgatagcgcagcgaaaatcatcgcgataa

SEQ ID NO: 1390 - protein, 240 aa, Shigella flexneri
MGHKPLYRQIADRIREQIARGELKPGDALPTESALQTEFGVSRVTVRQALRQLVEQQILESIQGSGTYVKEERVNYDIFQLTSFDEKLSDRHVDTHSEVLIFEVIPADDFLQQQLQITVQDRVWHVKRVRYRKQKPMALEETWMPLALFPDLTWQVMENSKYHFIEEVKKMVIDRSEQEIIPLMPTEEMSRLLNISQTKPILEKVSRGYLVDGRVFEYSRNAFNTDDYKFTLIAQRKSSR

SEQ ID NO: 1391 - DNA, 927 bp, Pseudomonas putida
  CDS (1)..(927)
atggcggcgagcattgccacgtccttgttgtgcgggtttgccgagcacaagcataagccacatgcggtcctcccgacacaaggctgtttcgcctaccaaagggcgacaggcggaggattgacagcctgtcaggctcagggaatactctcgaaaaattcatatatatgtttatataacaagacgagagcgagacccatgcacccattgaccggtgatgctcgactgccccgctaccaacaactgcgcgatcacatggttgcgcaaattgccaacaaccgctggcgcccgggggaagcgatcccgaccgaggcagccttggccaccgagttcgacctgtcgatcggtaccgtgcgcaaggccgtcgatgtcctggtggccgaaggcgtgctggagcgccagcagggccgcggcaccttcattcgccgcccacagttccagtcgtcgctgttccgcttcttccgtttcgaggccgccaatggcgagcgcatagtgccggaaagccgcattctctccatcgagtcgctgccggcgccttccgcggtggccgaggcattgggcctggcaggggaggcagaagtgatccgcatcattcgcacacgtctgctcggcgcccagccggtgctggccgaagaaatctggctgccgcgccaaaccttccagccgctgctggacgtggatctgaacagcgagggcccgctgctgtacccgatctacgaagcgctgtgcggtcaggtggtcgcctacgccgaagaaaccctgaccgccgaagcggtcgacgcggtgcatggccgcttgctgcaactgccggccgacagcccggtggtcgtgatcgagcgcctggcccgcgattacgccggcaaacctctggaatggcgccgctcgcgcggccatgcgcagcacttccgctaccgcatcgacattcgttag

SEQ ID NO: 1392 - protein, 308 aa, Pseudomonas putida
MAASIATSLLCGFAEHKHKPHAVLPTQGCFAYQRATGGGLTACQAQGILSKNSYICLYNKTRARPMHPLTGDARLPRYQQLRDHMVAQIANNRWRPGEAIPTEAALATEFDLSIGTVRKAVDVLVAEGVLERQQGRGTFIRRPQFQSSLFRFFRFEAANGERIVPESRILSIESLPAPSAVAEALGLAGEAEVIRIIRTRLLGAQPVLAEEIWLPRQTFQPLLDVDLNSEGPLLYPIYEALCGQVVAYAEETLTAEAVDAVHGRLLQLPADSPVVVIERLARDYAGKPLEWRRSRGHAQHFRYRIDIR

SEQ ID NO: 1393 - DNA, 711 bp, Lactobacillus plantarum
  CDS (1)..(711)
atgagtaccatgagttcgccaatttatattcaaatccacaaccaaattaagcaggcgattgaagcaggtcggtgggccgttggtgaccggattccgtctgaacgggagctggctacacagttcgatgttagtcggatgacccttcgacaagcaatccagacattggttgacgaaggaatattagagcggcgagtcggtgccggcacgtttgtcgcgaatcagaaggtccaagaaaaaatgtccggtgtcaccagttttactgatctaatgctggcccagggtaaggtcccatcaagtaagacgatttcatatcacgtgacgagcccgtcgctatctgagagcgaaaagttggcgttaggcgccaacgaacaagttctacggatggaacgaattcgctatggtgatgatgtgccaatttgttttgaggtcgcaacagttccagaacgactcgtcaagcagttcaccaaggacgaaattacgagttcgttgtatcggacgttagaagagaaggcaagtttagtgcctggtaaggctcaacagacggtttcggcgatgtctgcttctgagcgtatcgcggaatacttgtcagtccggcgtggcgatgcgttgctacggttacggcagatttcgtatttgcaaaccggcgaaccgtttgaatacgtgcggacccagtacgttggtaaccggtttgagttttatcttgaaaaataa

SEQ ID NO: 1394 - protein, 236 aa, Lactobacillus plantarum
MSTMSSPIYIQIHNQIKQAIEAGRWAVGDRIPSERELATQFDVSRMTLRQAIQTLVDEGILERRVGAGTFVANQKVQEKMSGVTSFTDLMLAQGKVPSSKTISYHVTSPSLSESEKLALGANEQVLRMERIRYGDDVPICFEVATVPERLVKQFTKDEITSSLYRTLEEKASLVPGKAQQTVSAMSASERIAEYLSVRRGDALLRLRQISYLQTGEPFEYVRTQYVGNRFEFYLEK

SEQ ID NO: 1395 - DNA, 699 bp, Streptococcus mutans
  CDS (1)..(699)
atgttaccggcttatattcgcattcatgatcaaatcaaaaaagaaatcgatgaaggtctttggaaaatcggcgatcgtcttcctagcgaacgtgatttggcagaacgatttgaagttagccgaatgacgcttcgacaggctataacactccttgttgaagaagggattttagagcgtcgagtgggaagcggtacttacatcgctagcagtcgtgttcaagaaaaaatgcgtgggacaactagttttacagaaattgtaaaatcacaaggcaaaacaccttcgaccaaattaatttcttaccggcgggttcatccaagcgaacaagaaataaaatttttagatattaaacctaaatcttatattatccgaatggagcgagttcgctatgcagatgatattcctgttgtttttgaagtgacagctattcctgaaaagattattaagagtttcaaaaaggaagctattaccaagcatttctttaaaacgttgacagatcatggttttgttatcggaaaaagtcagcaaaccatttctgccagtaatgctaatgagatgacggctgattatttggcgatctcgcgtggacatgcagtactaaccttggctcaagtttcctattttgaaaatggtatgccttttgaatatgtccgcagccaatatgtcggtgagcgttttgagttttatttagaaaataagtaa

SEQ ID NO: 1396 - protein, 232 aa, Streptococcus mutans
MLPAYIRIHDQIKKEIDEGLWKIGDRLPSERDLAERFEVSRMTLRQAITLLVEEGILERRVGSGTYIASSRVQEKMRGTTSFTEIVKSQGKTPSTKLISYRRVHPSEQEIKFLDIKPKSYIIRMERVRYADDIPVVFEVTAIPEKIIKSFKKEAITKHFFKTLTDHGFVIGKSQQTISASNANEMTADYLAISRGHAVLTLAQVSYFENGMPFEYVRSQYVGERFEFYLENK

SEQ ID NO: 1397 - DNA, 699 bp, Streptococcus agalactiae
  CDS (1)..(699)
atgttaccagcatatattaaaattcacgacgctattaaaaaggaaatcgataaagggacttggaagattgggcagcggttacctagcgaaagagatttagcggatgattatagtgtaagtcgtatgacacttcgccaatcaattacattgttagttgaagaaggtattttggagagacgagttggtagtggcacctatgttgctagtcatcgtgttcaagaaaaaatgcggggaacaactagttttacagaaattgtcaattctcaagggcgtaagccatccagtaaactaatctcatttcaaagaaaactagcaaatgaaaccgaaattcaaaaattaaatttatcacagtcagattatgtggttcgtatggaaagggtacgttatgctgataaggtaccgttggtttatgaggtagcctctataccagagaatttaattaaaggttttgaacaatcagaggttacagaacatttctttaaaaccttaacagagaatggctacgaaattgggaaaagccaacaaactatatatgctagaaatgctagtgaacgtgttgcttcgcatttagaagttaacgcaggccatgctattttggcattgacacaagtttcatactttactgatggtaagccttttgaatatgttcatgggcaatatgttggagatcgttttgagttttatttagagaataactag

SEQ ID NO: 1398 - protein, 232 aa, Streptococcus agalactiae
MLPAYIKIHDAIKKEIDKGTWKIGQRLPSERDLADDYSVSRMTLRQSITLLVEEGILERRVGSGTYVASHRVQEKMRGTTSFTEIVNSQGRKPSSKLISFQRKLANETEIQKLNLSQSDYVVRMERVRYADKVPLVYEVASIPENLIKGFEQSEVTEHFFKTLTENGYEIGKSQQTIYARNASERVASHLEVNAGHAILALTQVSYFTDGKPFEYVHGQYVGDRFEFYLENN

SEQ ID NO: 1399 - DNA, 747 bp, Oceanobacillus iheyensis
  CDS (1)..(747)
atgattgataaaaattcacctataccaatttattaccaattagaagaatatataaaacatcaaattgataatcaaaagtggctgccgggagagcttcttccatctgaaagagaatttgcagaacaatatcatatcagccgtatgacagtccgccaggctataaataatttagctgctgctggccttctgtatcgtgtgaaagggaaaggaacctttattgctcaacctaaatttgaacatgacctttctggtttaacgagttttacagaagatatgatgcaacgaggcttaacgccgtctaatcaattgttatatattcaactgcataatcaaccgagtcaaattgcgcataagcttcaattacaatcagaggattcttactatgaaattaaacgaatacgctttgcagatgaagacccccttgcatttgaaattatttacaccccgaaaaaactaattggtgaactggaagaaaaatatttacaaggttctttttatcaatatgttgaacaaaaaataggaaagcacattattgttggaaatcaaacaattgaaggtgctcttgcaactaaagaacaagctaatttcttacaaattaatgtcggtgatccggtattaattatggaaagagtaagttatctagatcaaccgatagaagttcctattgaatttactcaaacgatatatcgtgcagataaatataaatttcacctcacgcttcatagagatgaacaaaccaagggctaa

SEQ ID NO: 1400 - protein, 248 aa, Oceanobacillus iheyensis
MIDKNSPIPIYYQLEEYIKHQIDNQKWLPGELLPSEREFAEQYHISRMTVRQAINNLAAAGLLYRVKGKGTFIAQPKFEHDLSGLTSFTEDMMQRGLTPSNQLLYIQLHNQPSQIAHKLQLQSEDSYYEIKRIRFADEDPLAFEIIYTPKKLIGELEEKYLQGSFYQYVEQKIGKHIIVGNQTIEGALATKEQANFLQINVGDPVLIMERVSYLDQPIEVPIEFTQTIYRADKYKFHLTLHRDEQTKG

SEQ ID NO: 1401 - DNA, 756 bp, Escherichia coli O6
  CDS (1)..(756)
atgcgcgccatgaaatcattaagtaagtcgtcacaaataccgctctatcaacaagtggtggagtggataagagaaagtatttataccggggatctggtggaagacgatcgcattccttcggaataccagattatggatatgctggaagtgagccggggaaccgttaaaaaagcggtcgcccaactggtaaaagaaggcgtgttgatacaggtccaggggaagggaacatttgtcaaaaaagagaacgtggcatatccgttaggtgaaggattattgtcattcgcggaatcgctggaaagccagaaaatacactttaccactgaagttattacgtcacggattgaaccggctaatcgttatgtggcagagaaattaagaataacgcccggtcaggatattctttaccttgagcgtttacgttcaattggtgatgaaaaagcgatgctgatagagaaccgtatcaatattgagctatgccccggcatcgtggaaatcgattttaatcaacacaatttatttccaacaatagaaagtttgtcgaaaagaaaaattcgttactcggaaagtcgctatgccgcgcgattaattggtaatgaacgcggtcattttttagatatcagtgaagatgcacccgttttgcatctggagcaattagtctttttctcccgagagttacccgttgagtttggcaacgtctggttaaaaggaaataaatattatctgggcaccgtgctgcaacggcgggaattgagttaa

SEQ ID NO: 1402 - protein, 251 aa, Escherichia coli O6
MRAMKSLSKSSQIPLYQQVVEWIRESIYTGDLVEDDRIPSEYQIMDMLEVSRGTVKKAVAQLVKEGVLIQVQGKGTFVKKENVAYPLGEGLLSFAESLESQKIHFTTEVITSRIEPANRYVAEKLRITPGQDILYLERLRSIGDEKAMLIENRINIELCPGIVEIDFNQHNLFPTIESLSKRKIRYSESRYAARLIGNERGHFLDISEDAPVLHLEQLVFFSRELPVEFGNVWLKGNKYYLGTVLQRRELS

SEQ ID NO: 1403 - DNA, 699 bp, Escherichia coli O6
  CDS (1)..(699)
atgatttttcaaaagattgcccgcttacttaaatccgagatcaatggcaattcatggcatgttggtgatttgttgccgtcagaagcggaactcgctgttcgttataatgtttcgcgtaataccctgcgtaaggcattatccctgctggaaggcgaaggaattattcacagaaagcatggttcaggaacatacattcaaaaaaagaattttgttgcacacattgatcacatgaacagtttcagtgaaattgcacataaaagcggcaaagaggcaggaagtcagattatgaaatttgaagtgcaggatgcttctcctactattgcgactgagctgaatttagtgactggtgagcaggtttattacataaagagactgcgattcattgaggataatgcagcacaattagaagaaacgtggatgtcagtggcacgttttcctgatttaaccgtatcgcatatgcaaaaatccaaattttcgtatattgagaacgaatgcgggatcaaaatcattggcacctttgaaactttctccccgacttttcctacccctgaaatcgccagtattttacggatcagcccacgggatcccatacttaaaattcagacccaggctgtggatagtaactctattccgctggattattcgttactttacagcaatattttcgagttccaggtaaagtactttttcccgcgataa

SEQ ID NO: 1404 - protein, 232 aa, Escherichia coli O6
MIFQKIARLLKSEINGNSWHVGDLLPSEAELAVRYNVSRNTLRKALSLLEGEGIIHRKHGSGTYIQKKNFVAHIDHMNSFSEIAHKSGKEAGSQIMKFEVQDASPTIATELNLVTGEQVYYIKRLRFIEDNAAQLEETWMSVARFPDLTVSHMQKSKFSYIENECGIKIIGTFETFSPTFPTPEIASILRISPRDPILKIQTQAVDSNSIPLDYSLLYSNIFEFQVKYFFPR

SEQ ID NO: 1405 - DNA, 765 bp, Streptomyces sp
  CDS (1)..(765)
atgagtacggacgtcagcagcgccggggccgacacgagggcgccgggccgccgggaccgcgtgccgaagtactacctcatcaagcagcggctgctgcagatgaccgacgagcgcgcgccgggctccccgatgccggccgagcggctgctcgccgtcgagttcggcacgtcccgcaccaccgtccgcaaggcactgctggaactggtgagcgagggccggctcgaccgcatccagggcaagggcaccttcgtggcccggccgaaggtgtatcggacactccaactgacctcgtacaccgaggacatgcgcgcccaggggctcagccccgcctcgcaggtcctggacatcggatacgtcccggcggacgcggagctggcggcgctgctggaggtggaaccggaggaccgggtcctgcggatcgagcggctgcggctggccggtggcgagccgatggccatcgaggcgacccacctctccgcccgccgcttccccggcctgcggcgcaacctcacccgctacacctctctctacaccacgctcgccgaggtgtacggggtccggcccgcggaggccgacgagaccatcgagacctccccggcgacaccgcgtgaggcgggcctcctcggcacggacgtgggcctgccgatgctgctgctgtcccgccactcgcgggacgagaacggggccccggtggagtgggtacggtcggtgtaccgcggctcccgctacaagttcaccgcgcgactgcggcgaccgcgggggtga

SEQ ID NO: 1406 - protein, 254 aa, Streptomyces sp
MSTDVSSAGADTRAPGRRDRVPKYYLIKQRLLQMTDERAPGSPMPAERLLAVEFGTSRTTVRKALLELVSEGRLDRIQGKGTFVARPKVYRTLQLTSYTEDMRAQGLSPASQVLDIGYVPADAELAALLEVEPEDRVLRIERLRLAGGEPMAIEATHLSARRFPGLRRNLTRYTSLYTTLAEVYGVRPAEADETIETSPATPREAGLLGTDVGLPMLLLSRHSRDENGAPVEWVRSVYRGSRYKFTARLRRPRG

SEQ ID NO: 1407 - DNA, 714 bp, Streptococcus mutans
  CDS (1)..(714)
atgaaaaaatatgaaattatttttaaaaaactagaagaagatattctcaaaggacactatcaaatgggtgactatcttccccctgaaatggaacttagccagacctatgccagcagccgagatactgttagaaaggctttacagctcttgactaaggcaggttttattaaaacagtacagggaaggggatcccaaattatcaagcgtgagcgcattaactttcctgtttctcaactaaccagctatcaagaattggttaaacaattgcagatgaatgtcaagacaaatgttattgctattgataaactgattgttgatgagaaactcaccaaactaaccggttttgaaaataaaggtcttgtctggcgcatcacaagacagcgcgtcatagacggcgttgcttccattttagatacggattatttggataaagcattgattcctcatatgaccagagaaatcgctgaacattctatctatgattatcttgaaaatcaacttaagctggacattgcctatgctcaaaagattattaccatagatcaagtatcgcaaaaagataaaattttgcttgatttggattctgaaaatcatgtcgtttcggttaaatctaaagtttatctcagtaatcagcagcaatttcaattcactgaaagccggcacaaactggaaaagttccgttttgttgactttgccagacggcatcgtgattag

SEQ ID NO: 1408 - protein, 237 aa, Streptococcus mutans
MKKYEIIFKKLEEDILKGHYQMGDYLPPEMELSQTYASSRDTVRKALQLLTKAGFIKTVQGRGSQIIKRERINFPVSQLTSYQELVKQLQMNVKTNVIAIDKLIVDEKLTKLTGFENKGLVWRITRQRVIDGVASILDTDYLDKALIPHMTREIAEHSIYDYLENQLKLDIAYAQKIITIDQVSQKDKILLDLDSENHVVSVKSKVYLSNQQQFQFTESRHKLEKFRFVDFARRHRD

SEQ ID NO: 1409 - DNA, 762 bp, Streptomyces griseus
  CDS (1)..(762)
atgggcgccgaaggggcagtacggggggcgagaccggtaccggtacgcgcacagcgcgtaccgaagtactaccggctcaagcgccatctcctcgacatgacggacaccctgccgcccggcacccccgtgccgcccgaacgcaccctggcggccgaattcgacacctcgcgcaccaccgtgccgcaggcgctccaggagctggtcgtggagggccggctggagcgcatccagggcaagggcaccttcgtggccaagccgaaggtctcccaggccctccagctcacctcgtacaccgaggacatgcgtgcccagggactggagccgacgtcccaactgctggacatcggctatgtgacggcggacgacacgctcgccggcctgctggacatctcgacgggcggccgggtgctgcgcatcgagcggctgcggctcgccagcggggagccgatggcgatcgagaccacgcacctttcggccaaacgcttcccggcgctgcgccgttcgctggtgaagtacacctcgctctacaccgcgctcgccgaggtgtacgacgtgcgcctcgccgaggcggaggagaccatcgagacctcgctcgcgacgccgcgcgaggcgggactgctcggcaccgacgtggggctgccgatgctcatgctgtcccgccattcggtggacggccagggcgaacccgtggagtgggtgcgatcggtgtaccggggcgaccggtacaagttcgtggcccgcctgaagcggggcacggactga

SEQ ID NO: 1410 - protein, 253 aa, Streptomyces griseus
MGAEGAVRGARPVPVRAQRVPKYYRLKRHLLDMTDTLPPGTPVPPERTLAAEFDTSRTTVPQALQELVVEGRLERIQGKGTFVAKPKVSQALQLTSYTEDMRAQGLEPTSQLLDIGYVTADDTLAGLLDISTGGRVLRIERLRLASGEPMAIETTHLSAKRFPALRRSLVKYTSLYTALAEVYDVRLAEAEETIETSLATPREAGLLGTDVGLPMLMLSRHSVDGQGEPVEWVRSVYRGDRYKFVARLKRGTD

SEQ ID NO: 1411 - DNA, 726 bp, Clostridium perfringens
  CDS (1)..(726)
atgtttaagagaagcaggggcatagccctgtatcatcaattagaaacagagctaattgatcttataaatagcggagaacttaaggaaaatgataagttaccatctgaaagagaattatgtgagcaatataatgttagtagaacaacagctaggcaagctattggagaattagaaagaaaagagtatgtatataaggtccatggaaagggaacttttatatctcctaaagtgtataaacaacaattattaaaattttatagttttactgaagaaatgaaaaagcttgggaaaaatccatcttcaaaaatattatcctttgatttaataagagctgacaataagatttctgaaaaattaaaagtggaagaaaactcactggtatataagatagtaagactaagaatagcagatgaagttccaatgatggtagagtgtacttatttacctgaatatagatttattgatttgaaagaaaagatgcttaaagaaaagcctatgtatgatatatttagagaagtctataatgttagtctaactaaggctaaggaaagttttaaaccaatattaatttcaaagagtgattcaaaattattaaatgtggaagatggtacagctgcaatgagaattgaaagagttacctttgaaaatgaaagagttatagagtatacagtaagtgtttcaagaggagataaatttgaatatactgtagttttagaagaagattaa

SEQ ID NO: 1412 - protein, 241 aa, Clostridium perfringens
MFKRSRGIALYHQLETELIDLINSGELKENDKLPSERELCEQYNVSRTTARQAIGELERKEYVYKVHGKGTFISPKVYKQQLLKFYSFTEEMKKLGKNPSSKILSFDLIRADNKISEKLKVEENSLVYKIVRLRIADEVPMMVECTYLPEYRFIDLKEKMLKEKPMYDIFREVYNVSLTKAKESFKPILISKSDSKLLNVEDGTAAMRIERVTFENERVIEYTVSVSRGDKFEYTVVLEED

SEQ ID NO: 1413 - DNA, 726 bp, Streptococcus pyogenes
  CDS (1)..(726)
atgaataaccgacttgaggagtgtggcatgttaccagcttatataaaaattcatgatgcaattaaaaaagacattgatctgggcatctggccaattggtagtcgcttaccaagtgaacgacatttagcggaacatttcaccgttagtcgaatgactctacggcaggctattacattactagtagaagaagggattcttgaaaggcggataggaagtggtacttatgttgccagtcatcgtgttcaagaaaaaatgcgaggaacaacaagtttcacagaaattatacgctcccaaggacgacaaccctcctctaaattattatcctatcaaaagcaattagctagtgataccgaagttaaagaattgaacttagacaaaacagacttggtcattcgaatggaacgtatccgctatgcagacagtgtccctttggtgtacgaaattgcttcaatcccagaaaaatttataaaaacggttaaacgagctgatattacagaacacttttttcactcattgatagcaaatggttacgagattggtaaaagtaaacagacaatctacgctaagctagcaagtgagcgtgtagcctcctacttggaagttgctaaaggacatgccattttggctctaactcaggtgtcttactttacagacggcaaaccttttgagtatgtccgcagtcagtatatcggtgaccgttttgaattttacttagaaaataattag

SEQ ID NO: 1414 - protein, 241 aa, Streptococcus pyogenes
MNNRLEECGMLPAYIKIHDAIKKDIDLGIWPIGSRLPSERHLAEHFTVSRMTLRQAITLLVEEGILERRIGSGTYVASHRVQEKMRGTTSFTEIIRSQGRQPSSKLLSYQKQLASDTEVKELNLDKTDLVIRMERIRYADSVPLVYEIASIPEKFIKTVKRADITEHFFHSLIANGYEIGKSKQTIYAKLASERVASYLEVAKGHAILALTQVSYFTDGKPFEYVRSQYIGDRFEFYLENN

SEQ ID NO: 1415 - DNA, 705 bp, Pseudomonas fluorescens
  CDS (1)..(705)
atgagcaaatacaaccagatctatacggatctgcttgccagcatcaccaccgaacgcctgcaacgcggcacgcgccttccctctgaaaccgaattgatggacgcctaccaggccagccgtggcaccgtgcgtcgggccatcgagcaattgcaagagcgtgggttcgcgcaaaagatccatggcaagggcacgttcgtgctgtcccccaacccgattgagttccaactggggggcattgtcagcttccacgaaacccacgccgacctgggcgatgacgtacgtaccgaagtggtcgaattcactcaactgcccctggaaggctccctgcagcagcatatcgaggccgagcccggcaccctgatcacgcgcatcaagcgagtgcggcgcatcggcggcaaacgggtgatcctcgacatcaaccgcttcgtcgccgacctgatcccgggcctggaccagacgattgccgaacagtcgatctacgcgtttatcgagcagacgctgcaactgcagatcagctacgcccagcgcaccatcgaagccctgccccgcagcaaggacgaccaggcgcacttggacctcgacggccagagccatgtgattgtggtgagtaaccagacgtttttgcaggatgggcggcagttcgagtacaccgagtcgcggcatacattggataagttttacttttcggatattgcgcggcgctaa

SEQ ID NO: 1416 - protein, 234 aa, Pseudomonas fluorescens
MSKYNQIYTDLLASITTERLQRGTRLPSETELMDAYQASRGTVRRAIEQLQERGFAQKIHGKGTFVLSPNPIEFQLGGIVSFHETHADLGDDVRTEVVEFTQLPLEGSLQQHIEAEPGTLITRIKRVRRIGGKRVILDINRFVADLIPGLDQTIAEQSIYAFIEQTLQLQISYAQRTIEALPRSKDDQAHLDLDGQSHVIVVSNQTFLQDGRQFEYTESRHTLDKFYFSDIARR

SEQ ID NO: 1417 - DNA, 765 bp, Streptomyces coelicolor
  CDS (1)..(765)
atgagcaccgacgtcagcagtgcggagaacgagggtggggcgaccgtccgtaccgcgcgcgtgcccaagtactaccgtctgaagaagcatctgctcgacatgacccggacccagacgccgggcacaccggtcccgccggagcgcaccctggccgccgagttcgacacctcgcgcacgacggtgcgccaggccctgcaggagctggtggtcgagggccgcctggagcgcatccagggcaagggcaccttcgtcgccaagcccaaggtgtcgcaggcgctgcaactcacctcgtacaccgaggacatgcgggcccagggcctcgaaccgacctctcagctgctggacatcggctacatcaccgccgacgaccggctcgccgggctgctggacatcacggccggcggccgggtgctgcgcatcgagcggctgcgcatggccaacggcgagccgatggccatcgagaccacccacctcagcgcgaagcgcttccccgccctgcgccgctccctggtgaagtacacgtccctctacaccgcgctcgccgaggtgtacgacgtccatctcgccgaggccgaggagaccatcgagacctccctggccaccccgcgcgaggccggtctgctcggcaccgacgtcggcctgcccatgctgatgctctcccggcactcccaggaccgcaccggccagccggtggagtgggtccgctcggtgtaccggggcgaccgctacaagttcgtggcccgcctcaagcggccccaggactag

SEQ ID NO: 1418 - protein, 254 aa, Streptomyces coelicolor
MSTDVSSAENEGGATVRTARVPKYYRLKKHLLDMTRTQTPGTPVPPERTLAAEFDTSRTTVRQALQELVVEGRLERIQGKGTFVAKPKVSQALQLTSYTEDMRAQGLEPTSQLLDIGYITADDRLAGLLDITAGGRVLRIERLRMANGEPMAIETTHLSAKRFPALRRSLVKYTSLYTALAEVYDVHLAEAEETIETSLATPREAGLLGTDVGLPMLMLSRHSQDRTGQPVEWVRSVYRGDRYKFVARLKRPQD

SEQ ID NO: 1419 - DNA, 708 bp, Vibrio sp. Ex25
  CDS (1)..(708): transl_table=11
atgaaacccaaatacatagacattgcggaacgattagaaaaaaagatcaaagatggggaactacaacctaaatcgatgcttccaaaagagagtgatttgcaagaagagttttccgtaagccgcgtaaccatcagaaaaagcttacaaattctggtcgacaataatttaattagtcggacaagaggtagtggaacttatgtaaacgatctaaaagcccaacatgatgccttacatttgctgggttttatcgaggaagtcagtaaacaggggaaaactcctagctctcaagtcataaagttcgaacttaaaaagccgaatgagcaggttgctaagcagttaaatctctcgcccaatgatgatacatatgaaatacatagactcagatgtattaatgatgagcctgaaatttacgaagtcactcatatgccagcagtgttatttccagacttgagcatagccataatgaatggttctaaatatgagtacattgaaaatagcaaaggattgaaaattgcgaaaagcagtcagtctgtcaaaccgtatttgttagatgcagagacggcctcatacctgaatgaatcagaagcttcccctattctaaaagttgagtccactggttacctagaagatggtcgtgcatttgaatataccgtcaattacttccgacttcatcaatacagcttcgagtttatttcaactaggacgtag

SEQ ID NO: 1420 - protein, 235 aa, Vibrio sp. Ex25
MKPKYIDIAERLEKKIKDGELQPKSMLPKESDLQEEFSVSRVTIRKSLQILVDNNLISRTRGSGTYVNDLKAQHDALHLLGFIEEVSKQGKTPSSQVIKFELKKPNEQVAKQLNLSPNDDTYEIHRLRCINDEPEIYEVTHMPAVLFPDLSIAIMNGSKYEYIENSKGLKIAKSSQSVKPYLLDAETASYLNESEASPILKVESTGYLEDGRAFEYTVNYFRLHQYSFEFISTRT

SEQ ID NO: 1421 - DNA, 23 bp, Artificial sequence
  primer
atgggacacaagcccttataccg

SEQ ID NO: 1422 - DNA, 23 bp, Artificial sequence
  primer
ttatcgcgatgattttcgctgcg

SEQ ID NO: 1423 - protein, 222 aa, Artificial sequence
  consensus sequence
  Variant (2)..(11): Xaa in position 2 to 11 is any amino acid
  Variant (13)..(21): Xaa in position 13 to 21 is any amino acid
  Variant (22)..(23): Xaa in position 22 to 23 is any or no amino acid
  Variant (25)..(25): Xaa in position 25 is any amino acid
  Variant (27)..(28): Xaa in position 27 to 28 is any amino acid
  Variant (30)..(35): Xaa in position 30 to 35 is any amino acid
  Variant (38)..(38): Xaa in position 38 is any amino acid
  Variant (40)..(42): Xaa in position 40 to 42 is any amino acid
  Variant (44)..(46): Xaa in position 44 to 46 is any amino acid
  Variant (48)..(50): Xaa in position 48 to 50 is any amino acid
  Variant (52)..(57): Xaa in position 52 to 57 is any amino acid
  Variant (59)..(59): Xaa in position 59 is any amino acid
  Variant (62)..(106): Xaa in position 62 to 106 is any amino acid
  Variant (107)..(113): Xaa in position 107 to 113 is any or no amino acid
  Variant (115)..(126): Xaa in position 115 to 126 is any amino acid
  Variant (127)..(127): Xaa in position 127 is any or no amino acid
  Variant (129)..(129): Xaa in position 129 is any amino acid
  Variant (131)..(135): Xaa in position 131 to 135 is any amino acid
  Variant (137)..(139): Xaa in position 137 to 139 is any amino acid
  Variant (141)..(189): Xaa in position 141 to 189 is any amino acid
  Variant (190)..(195): Xaa in position 190 to 195 is any or no amino acid
  Variant (197)..(218): Xaa in position 197 to 218 is any amino acid
  Variant (219)..(221): Xaa in position 219 to 221 is any or no amino acid
YXXXXXXXXXXIXXXXXXXXXXXPXEXXLXXXXXXSRXTXXXAXXXLXXXGXXXXXXGXGTXXXXXXXXXXXXXXXXXXXXXXXXXXXXXXXXXXXXXXXXXXXXXXXXXXXXLXXXXXXXXXXXXXRXRXXXXXPXXXEXXXXXXXXXXXXXXXXXXXXXXXXXXXXXXXXXXXXXXXXXXXXXXXXXXXXXXXLXXXXXXXXXXXXXXXXXXXXXXXXXE

SEQ ID NO: 1424 - protein, 38 aa, Artificial sequence
  protein pattern
  Variant (2)..(10): Xaa in position 2 to 10 is any amino acid
  Variant (13)..(13): Xaa in position 13 is any amino acid
  Variant (15)..(17): Xaa in position 15 to 17 is any amino acid
  Variant (19)..(19): Xaa in position 19 is Ile, Leu or Val
  Variant (20)..(21): Xaa in position 20 to 21 is any amino acid
  Variant (23)..(25): Xaa in position 23 to 25 is any amino acid
  Variant (26)..(26): Xaa in position 26 is Glu, Gly, Asn or Gln
  Variant (27)..(27): Xaa in position 27 is any amino acid
  Variant (28)..(28): Xaa in position 28 is Ala, Ile, Leu or Val
  Variant (29)..(32): Xaa in position 29 to 32 is any amino acid
  Variant (34)..(34): Xaa in position 34 is any amino acid
  Variant (37)..(37): Xaa in position 37 is Phe or Tyr
  Variant (38)..(38): Xaa in position 38 is Ile, Leu or Val
EXXXXXXXXXSRXTXXXAXXXLXXXXXXXXXXGXGTXX

SEQ ID NO: 1425 - DNA, 366 bp, Escherichia coli
  CDS (1)..(366): transl_table=11
atgaaccatgcaccgcatttatatttcgcctggcaacaactcgtcgaaaaaagccagctcatgttacgcctggcaacggaagaacaatgggacgaactcatcgccagcgaaatggcgtatgtgaatgcggtgcaggagattgcacatttgactgaagaggttgacccgtccaccacgatgcaggagcagctccgcccgatgctgcgcctgattctcgacaacgaaagcaaggtaaagcagttattacagattcggatggatgaactggcgaaactggtcggtcagtcatcggtgcaaaaatcggtgttaagtgcctatggcgatcagggcggctttgtgctggctccgcaggataacctcttttaa

SEQ ID NO: 1426 - protein, 121 aa, Escherichia coli
MNHAPHLYFAWQQLVEKSQLMLRLATEEQWDELIASEMAYVNAVQEIAHLTEEVDPSTTMQEQLRPMLRLILDNESKVKQLLQIRMDELAKLVGQSSVQKSVLSAYGDQGGFVLAPQDNLF

SEQ ID NO: 1427 - DNA, 363 bp, Yersinia pestis CO92
  CDS (1)..(363): transl_table=11
atggaacgtcaccagcatcttttgtccgaatatcaacaaatcctaactctcagtgagcaaatgcttatgttggctactgtggaaaactggaatgcgctggttgatctggaaatgacttatctcaaagccgttgaaaatacagctaatatcactatttcctcttgtacatcaccagtattgcaagaattactgcgccaaaaattgagatccatattggagaatgagatagaaattaagcggttactgcaacgtcgtttagataaattaagtgaattggtggggcaatctacccgccaacaggcagttaatcgtacttatggtcagttccccgatcaggcactgctgctgggtgaaacacaataa

SEQ ID NO: 1428 - protein, 120 aa, Yersinia pestis CO92
MERHQHLLSEYQQILTLSEQMLMLATVENWNALVDLEMTYLKAVENTANITISSCTSPVLQELLRQKLRSILENEIEIKRLLQRRLDKLSELVGQSTRQQAVNRTYGQFPDQALLLGETQ

SEQ ID NO: 1429 - DNA, 414 bp, Yersinia pestis KIM
  CDS (1)..(414): transl_table=11
atgcgtggcggcagatcggcccgaattatcaacccaattaggacccatttaatggaacgtcaccagcatcttttgtccgaatatcaacaaatcctaactctcagtgagcaaatgcttatgttggctactgtggaaaactggaatgcgctggttgatctggaaatgacttatctcaaagccgttgaaaatacagctaatatcactatttcctcttgtacatcaccagtattgcaagaattactgcgccaaaaattgagatccatattggagaatgagatagaaattaagcggttactgcaacgtcgtttagataaattaagtgaattggtggggcaatctacccgccaacaggcagttaatcgtacttatggtcagttccccgatcaggcactgctgctgggtgaaacacaataa

SEQ ID NO: 1430 - protein, 137 aa, Yersinia pestis KIM
MRGGRSARIINPIRTHLMERHQHLLSEYQQILTLSEQMLMLATVENWNALVDLEMTYLKAVENTANITISSCTSPVLQELLRQKLRSILENEIEIKRLLQRRLDKLSELVGQSTRQQAVNRTYGQFPDQALLLGETQ

SEQ ID NO: 1431 - DNA, 366 bp, Shigella flexneri 2a str. 2457T
  CDS (1)..(366): transl_table=11
atgaacaatgcaccgcatttgtatttcgcctggcaacaactcgtcgaaaaaagccagctcatgttacgcctggcaacggaagaacaatgggacgaactcatcgctagcgaaatggcgtatgtgaatgcggtgcaggagatcgcacacctgactgaagaggttgccccgtccactacgatgcaggagcagctccgcccgatgctgcacctgattctcgacaacgaaagcaaggtaaagcagttattacagattcggatggatgaactggcgaaactggtcggtcagtcatcggtgcaaaaatcggtgttaagtgcctatggcgatcagggcggctttgtgctggctccgcaggataacctcttttga

SEQ ID NO: 1432 - protein, 121 aa, Shigella flexneri 2a str. 2457T
MNNAPHLYFAWQQLVEKSQLMLRLATEEQWDELIASEMAYVNAVQEIAHLTEEVAPSTTMQEQLRPMLHLILDNESKVKQLLQIRMDELAKLVGQSSVQKSVLSAYGDQGGFVLAPQDNLF

SEQ ID NO: 1433 - DNA, 378 bp, Photorhabdus luminescens subsp. laumondii TTO1
  CDS (1)..(378): transl_table=11
atggataataaaatggatcttttgtcagcttaccaacggatcctaagtttaagtgagcaaatgcttaatttagctaaaaatgaaaaatgggatgaacttgttgatatggaaatcacctacctcaaagcagtagaagtgatcagccattcttcaatatcatcgacgacttctctttcgttacagcaaaaaatgaccaacattttgcaaataattttagataatgaaaatgagattaaaaaactactacagaaaagacttgatgaattaagtaaactcatcaaacaagcaagccaacagcaattattaaatgatagctacggccaattccctgttgaaccctatcataatacccttatgaactctacggagcaaaagtaa

SEQ ID NO: 1434 - protein, 125 aa, Photorhabdus luminescens subsp. laumondii TTO1
MDNKMDLLSAYQRILSLSEQMLNLAKNEKWDELVDMEITYLKAVEVISHSSISSTTSLSLQQKMTNILQIILDNENEIKKLLQKRLDELSKLIKQASQQQLLNDSYGQFPVEPYHNTLMNSTEQK

SEQ ID NO: 1435 - DNA, 381 bp, Erwinia carotovora subsp. atroseptica SCRI1043
  CDS (1)..(381): transl_table=11
atggtctccccccatcggcttctaaaagattaccaacaacttttgtctctgagtcaaaaaattcttcatttggccatcagcggccaatgggatacgttggttgagcaagagattgtttatgttcagtccgttgaaggcttagttaacacgccaattcctgacgaaattgacagcgtgatgcgactgcatctgcgacaaattttgcaggaagtgatggataatgaagcgaaagtgaaacaacttttgcagaagcggatggatgagttaagttcgttaatggggcaatcactgaagcaaaagtcaattaatgcaacttatagcgaatttgcagggcagcgacggttacttgacgaccccttgcctgacgaaacgcgctcataa

SEQ ID NO: 1436 - protein, 126 aa, Erwinia carotovora subsp. atroseptica SCRI1043
MVSPHRLLKDYQQLLSLSQKILHLAISGQWDTLVEQEIVYVQSVEGLVNTPIPDEIDSVMRLHLRQILQEVMDNEAKVKQLLQKRMDELSSLMGQSLKQKSINATYSEFAGQRRLLDDPLPDETRS

SEQ ID NO: 1437 - DNA, 363 bp, Yersinia pseudotuberculosis IP 32953
  CDS (1)..(363): transl_table=11
atggaacgtcaccagcatcttttgtccgaatatcaacaaatcctaactctcagtgagcaaatgcttatgttggctactgtggaaaactgggatgcgctggttgatctggaaatggcttatctcaaagccgttgaaaatacagctaatatcactatttcctcttgttcatcgccagtattgcaagaattactgcgccaaaaattgagatccatattggagaatgagatagaaattaagcggttactgcaacgtcgtttagataaattaagtgaattggtggggcaatctacccgccaacaggcggttaatcgtacttatggtcagttccccgatcaggcactgctgctgggtgaaacacaataa

SEQ ID NO: 1438 - protein, 120 aa, Yersinia pseudotuberculosis IP 32953
MERHQHLLSEYQQILTLSEQMLMLATVENWDALVDLEMAYLKAVENTANITISSCSSPVLQELLRQKLRSILENEIEIKRLLQRRLDKLSELVGQSTRQQAVNRTYGQFPDQALLLGETQ

SEQ ID NO: 1439 - DNA, 366 bp, Escherichia coli B
  CDS (1)..(366): transl_table=11
atgaaccacgcaccgcatttgtatttcgcctggcaacaactcgtcgaaaaaagccagctcatgttacgcctggcaacggaagaacaatgggacgaactcatcgccagcgaaatggcgtatgtgaatgcggtgcaggagattgcacatctgactgaagagattgacccgtccaccacgatgcaggagcagctccgcccgatgctgcgcctgattctcgacaacgaaagcaaggtaaagcagttattacagattcggatggatgaactggcgaaactggtcggtcagtcatcggtgcaaaaatcggtgttaagtgcctatggcgatcagggcggctttgtgctggctccgcaagataacttctcgtga

SEQ ID NO: 1440 - protein, 121 aa, Escherichia coli B
MNHAPHLYFAWQQLVEKSQLMLRLATEEQWDELIASEMAYVNAVQEIAHLTEEIDPSTTMQEQLRPMLRLILDNESKVKQLLQIRMDELAKLVGQSSVQKSVLSAYGDQGGFVLAPQDNFS

SEQ ID NO: 1441 - DNA, 363 bp, Erwinia chrysanthemi
  CDS (1)..(363): transl_table=11
atggaaaacctctctccattactaattgagtatcaggggttactcaaactcatccgaaatatcaaggccatggcgcttaacggattatgggatgatgttgttgaacaggagatagtttatatccagtcaatagagagaatcagccagattaacgttccagccaatattcccagcacggtgcaattacagttccggcagcttcttcaggacatactggatacggaatcacaggtgaaagagctgctgcagaacagaatgcaggagctggcggtactcatccagcaatcacaaaatcaaaaatcgattaacaacacttatgccgagttttccgacgatattctcccgggaaaaccgcagccctga

SEQ ID NO: 1442 - protein, 120 aa, Erwinia chrysanthemi
MENLSPLLIEYQGLLKLIRNIKAMALNGLWDDVVEQEIVYIQSIERISQINVPANIPSTVQLQFRQLLQDILDTESQVKELLQNRMQELAVLIQQSQNQKSINNTYAEFSDDILPGKPQP

SEQ ID NO: 1443 - DNA, 25 bp, Artificial sequence
  primer
atgaaccatgcaccgcatttatatt

SEQ ID NO: 1444 - DNA, 25 bp, Artificial sequence
  primer
ttaaaagaggttatcctgcggagcc

SEQ ID NO: 1445 - protein, 106 aa, Artificial sequence
  consensus sequence
  Variant (2)..(6): Xaa in position 2 to 6 is any amino acid
  Variant (8)..(11): Xaa in position 8 to 11 is any amino acid
  Variant (13)..(17): Xaa in position 13 to 17 is any amino acid
  Variant (19)..(21): Xaa in position 19 to 21 is any amino acid
  Variant (23)..(23): Xaa in position 23 is any amino acid
  Variant (26)..(29): Xaa in position 26 to 29 is any amino acid
  Variant (31)..(32): Xaa in position 31 to 32 is any amino acid
  Variant (34)..(36): Xaa in position 34 to 36 is any amino acid
  Variant (38)..(39): Xaa in position 38 to 39 is any amino acid
  Variant (41)..(43): Xaa in position 41 to 43 is any amino acid
  Variant (45)..(60): Xaa in position 45 to 60 is any amino acid
  Variant (62)..(64): Xaa in position 62 to 64 is any amino acid
  Variant (66)..(67): Xaa in position 66 to 67 is any amino acid
  Variant (69)..(70): Xaa in position 69 to 70 is any amino acid
  Variant (73)..(73): Xaa in position 73 is any amino acid
  Variant (76)..(78): Xaa in position 76 to 78 is any amino acid
  Variant (80)..(80): Xaa in position 80 is any amino acid
  Variant (84)..(84): Xaa in position 84 is any amino acid
  Variant (86)..(86): Xaa in position 86 is any amino acid
  Variant (88)..(88): Xaa in position 88 is any amino acid
  Variant (90)..(91): Xaa in position 90 to 91 is any amino acid
  Variant (93)..(94): Xaa in position 93 to 94 is any amino acid
  Variant (97)..(98): Xaa in position 97 to 98 is any amino acid
  Variant (100)..(105): Xaa in position 100 to 105 is any amino acid
MXXXXXLXXXXQXXXXXSXXXLXLAXXXXWXXLXXXEXXYXXXVXXXXXXXXXXXXXXXXQXXXRXXLXXILXNEXXXKXLLQXRXDXLXXLXXQSXXQXXXXXXY

SEQ ID NO: 1446 - protein, 57 aa, Artificial sequence
  protein pattern
  Variant (2)..(4): Xaa in position 2 to 4 is any amino acid
  Variant (6)..(7): Xaa in position 6 to 7 is any amino acid
  Variant (9)..(9): Xaa in position 9 is Leu or Val
  Variant (10)..(10): Xaa in position 10 is any amino acid
  Variant (11)..(11): Xaa in position 11 is Ala or Ser
  Variant (13)..(13): Xaa in position 13 is Glu or Gln
  Variant (14)..(15): Xaa in position 14 to 15 is any amino acid
  Variant (16)..(16): Xaa in position 16 is Ala, Ser or Val
  Variant (17)..(18): Xaa in position 17 to 18 is any amino acid
  Variant (19)..(19): Xaa in position 19 is Pro, Ser or Thr
  Variant (20)..(20): Xaa in position 20 is any amino acid
  Variant (21)..(21): Xaa in position 21 is Glu, Pro or Ser
  Variant (22)..(24): Xaa in position 22 to 24 is any amino acid
  Variant (25)..(25): Xaa in position 25 is Asp or Ser
  Variant (26)..(26): Xaa in position 26 is any amino acid
  Variant (27)..(27): Xaa in position 27 is Ser, Thr or Val
  Variant (28)..(28): Xaa in position 28 is Leu or Met
  Variant (29)..(29): Xaa in position 29 is Gln or Arg
  Variant (30)..(31): Xaa in position 30 to 31 is any amino acid
  Variant (32)..(32): Xaa in position 32 is Leu or Met
  Variant (33)..(33): Xaa in position 33 is any amino acid
  Variant (34)..(34): Xaa in position 34 is Asn, Pro or Gln
  Variant (35)..(35): Xaa in position 35 is any amino acid
  Variant (37)..(38): Xaa in position 37 to 38 is any amino acid
  Variant (39)..(39): Xaa in position 39 is Ile or Val
  Variant (40)..(40): Xaa in position 40 is Leu or Met
  Variant (41)..(41): Xaa in position 41 is Asp or Glu
  Variant (44)..(44): Xaa in position 44 is any amino acid
  Variant (45)..(45): Xaa in position 45 is Glu or Lys
  Variant (46)..(46): Xaa in position 46 is Ile or Val
  Variant (48)..(48): Xaa in position 48 is any amino acid
  Variant (52)..(52): Xaa in position 52 is any amino acid
  Variant (54)..(54): Xaa in position 54 is Leu or Met
  Variant (56)..(56): Xaa in position 56 is Glu or Lys
LXXXEXXYXXXVXXXXXXXXXXXXXXXXXXXXXXXLXXXXXNEXXXKXLLQXRXDXL

SEQ ID NO: 1447 - protein, 22 aa, Artificial sequence
  protein pattern
  Variant (2)..(2): Xaa in position 2 is Ala, Ile or Val
  Variant (3)..(3): Xaa in position 3 is any amino acid
  Variant (5)..(5): Xaa in position 5 is Ala, Asp or Ser
  Variant (6)..(6): Xaa in position 6 is Gln, Ser or Thr
  Variant (7)..(7): Xaa in position 7 is any amino acid
  Variant (9)..(10): Xaa in position 9 to 10 is any amino acid
  Variant (11)..(11): Xaa in position 11 is Ile, Leu or Val
  Variant (12)..(12): Xaa in position 12 is any amino acid
  Variant (13)..(13): Xaa in position 13 is Asp, Asn, Arg or Ser
  Variant (14)..(14): Xaa in position 14 is Ala, Ser or Thr
  Variant (16)..(16): Xaa in position 16 is Ala or Gly
  Variant (17)..(17): Xaa in position 17 is Asp, Glu or Gln
  Variant (18)..(18): Xaa in position 18 is any amino acid
  Variant (19)..(19): Xaa in position 19 is Gly, Pro or Ser
  Variant (20)..(20): Xaa in position 20 is Asp, Gly or Val
  Variant (21)..(21): Xaa in position 21 is any amino acid
  Variant (22)..(22): Xaa in position 22 is Ala, Ile, Pro or Val
LXXQXXXQXXXXXXYXXXXXXX

SEQ ID NO: 1448 - protein, 29 aa, Artificial sequence
  protein pattern
  Variant (2)..(5): Xaa in position 2 to 5 is any amino acid
  Variant (6)..(6): Xaa in position 6 is Asp, His or Arg
  Variant (8)..(9): Xaa in position 8 to 9 is any amino acid
  Variant (10)..(10): Xaa in position 10 is Ala, Asp or Glu
  Variant (11)..(11): Xaa in position 11 is Trp or Tyr
  Variant (13)..(13): Xaa in position 13 is Gln or Arg
  Variant (14)..(14): Xaa in position 14 is Ile or Leu
  Variant (15)..(15): Xaa in position 15 is Leu or Val
  Variant (16)..(16): Xaa in position 16 is Glu, Ser or Thr
  Variant (17)..(17): Xaa in position 17 is any amino acid
  Variant (19)..(19): Xaa in position 19 is any or no amino acid
  Variant (21)..(22): Xaa in position 21 to 22 is any or no amino acid
  Variant (24)..(24): Xaa in position 24 is any amino acid
  Variant (27)..(28): Xaa in position 27 to 28 is any amino acid
  Variant (29)..(29): Xaa in position 29 is Glu or Gly
MXXXXXLXXXXQXXXXXSXQXXLXLAXXX

SEQ ID NO: 1449 - DNA, 858 bp, ESCHERICHIA COLI
  CDS (1)..(858): transl_table=11
atgtttatcctgtattttcagagggaatggagtgtaacgctctgtattaacaaggagagcattaaaatgggtaaactcacgggcaagacagcactgattacgggcgcattgcagggaattggcgaaggaattgccagaacttttgcacgtcatggcgcgaacctaatcttgctggatatctcccctgagatcgaaaagctggcggacgaactgtgtggtcgtggtcatcgctgtacggcggttgtcgccgatgtgcgtgacccggcgtcggtagccgcagctatcaaacgcgcgaaggaaaaagaagggcgcattgatatcctggtgaataacgcaggcgtttgtcgtctgggcagtttcctcgatatgagcgatgacgatcgcgatttccatattgacatcaatattaaaggcgtatggaacgtcacgaaggcggtgctgccggagatgattgcccgcaaagatggtcgcattgtgatgatgtcttcagtcactggtgatatggtggccgatcctggcgaaacggcgtacgccttaacgaaagcggcgattgttggcctgacaaaatcgctggcggtggagtacgcgcagtctggtattcgcgttaacgccatttgcccgggatacgtgcgcacaccaatggcggaaagcattgcccgccagtcgaacccggaagatccagagtcggtgctgactgaaatggcgaaagcaatcccgatgcgtcgcctcgccgatccgctggaagtcggcgaactggcggccttcctcgcatcggatgaatccagctatttaaccggtacacagaatgtgattgatggcggcagcacactgccggagacggttagcgtcggtatctaa

SEQ ID NO: 1450 - protein, 285 aa, ESCHERICHIA COLI
MFILYFQREWSVTLCINKESIKMGKLTGKTALITGALQGIGEGIARTFARHGANLILLDISPEIEKLADELCGRGHRCTAVVADVRDPASVAAAIKRAKEKEGRIDILVNNAGVCRLGSFLDMSDDDRDFHIDINIKGVWNVTKAVLPEMIARKDGRIVMMSSVTGDMVADPGETAYALTKAAIVGLTKSLAVEYAQSGIRVNAICPGYVRTPMAESIARQSNPEDPESVLTEMAKAIPMRRLADPLEVGELAAFLASDESSYLTGTQNVIDGGSTLPETVSVGI

SEQ ID NO: 1451 - DNA, 792 bp, Unknown
  Unidentified
  CDS (1)..(792)
atgggtaaactcacgggcaagacagcactgattacgggcgcattgcagggaattggcgaaggaattgccagaacttttgcacgtcatggcgcgaacctaatcttgctggatatctcccctgagatcgaaaagctagcggacgaactgtgtggtcgtggtcatcgctgtacggcggttgtcgccgatgtgcgtgacccggcgtcggtagccgcagctatcaaacgcgcgaaggaaaaagaagggcgcattgatatcctggtgaataacgcaggcgtttgtcgtctgggcagtttcctcgatatgagcgatgaagatcgcgatttccatattgatatcaatattaaaggcgtatggaacgtcacgaaggcggtgctgccggagatgattgcgcgcaaagatggtcgcattgtgatgatgtcttcagtcactggtgatatggtggccgatcctggcgaaacggcgtatgccttaacgaaagcggcgattgttggcctgactaaatcgctggcggtggagtacgcgcaatccggtattcgcgttaacgccatctgcccgggatacgtccgcacgccaatggcggaaagcattgcccgccagtcgaacccggaagatccagaatcggtgctgactgaaatggcaaaagcaatcccgctgtgtcgcctcgccgatccgctggaagtcggcgaactggcggccttcctcgcatcggatgaatccagctatttaaccggtacacagaatgtgattgatggcggcagcacactgccggagacggttagcgtcggtatctga

SEQ ID NO: 1452 - protein, 263 aa, Unknown
  Unidentified
MGKLTGKTALITGALQGIGEGIARTFARHGANLILLDISPEIEKLADELCGRGHRCTAVVADVRDPASVAAAIKRAKEKEGRIDILVNNAGVCRLGSFLDMSDEDRDFHIDINIKGVWNVTKAVLPEMIARKDGRIVMMSSVTGDMVADPGETAYALTKAAIVGLTKSLAVEYAQSGIRVNAICPGYVRTPMAESIARQSNPEDPESVLTEMAKAIPLCRLADPLEVGELAAFLASDESSYLTGTQNVIDGGSTLPETVSVGI

SEQ ID NO: 1453 - DNA, 846 bp, Oryza sativa Japonica Group
  CDS (1)..(846)
atgtccgccgccgccgccgccgccgcatcctcccccgctccccggttggaaagcaaggttgcgctggttaccggtggtgcttcaggtattggtgaagcaattgttcgcctctttagagagcatggtgcaaaggtatgtattgcagatatccaagatgaagcaggtcagaagctccgggactcccttggaggtgaccaagatgtcttatttgtccactgcgatgtttcggtggaagaggatgtagcccgagcggtcgatgcaacagctgaaaagtttggtactcttgacatcatggtcaacaatgctggctttacaggccagaaaatcacagatatccgaaacatcgacttttctgaagtcaggaaggtaatcgacatcaatttagttggtgtattccacgggatgaaacacgcagcgcgcatcatgatccccaataagaaggggtccatcatctcattgggaagtgtttctagtgtcattggagggttgggacctcattcatacacagcaaccaagcatgctgtggtgggtctaaccaagaatgtagctggggaattggggaagcatgggatacgcgtgaactgcgtatctccctatgcagtgcccacggctctctccatgccgtatctgccccagggcgagcgcaaggatgatgccctgaaagactttttcgcctttgttggtggtgaagcaaacctgaaaggtgtggatctgctacctaaggatgttgctcaagcagtgctctacttggcaagcgatgaagcgaggtacatcagcgcgctcaacctcatggtggatggtggctttacctctgtgaatcacaatttgagagcatttgaagattaa

SEQ ID NO: 1454 - protein, 281 aa, Oryza sativa Japonica Group
MSAAAAAAASSPAPRLESKVALVTGGASGIGEAIVRLFREHGAKVCIADIQDEAGQKLRDSLGGDQDVLFVHCDVSVEEDVARAVDATAEKFGTLDIMVNNAGFTGQKITDIRNIDFSEVRKVIDINLVGVFHGMKHAARIMIPNKKGSIISLGSVSSVIGGLGPHSYTATKHAVVGLTKNVAGELGKHGIRVNCVSPYAVPTALSMPYLPQGERKDDALKDFFAFVGGEANLKGVDLLPKDVAQAVLYLASDEARYISALNLMVDGGFTSVNHNLRAFED

SEQ ID NO: 1455 - DNA, 825 bp, Oryza sativa Japonica Group
  CDS (1)..(825)
atggcaggcagctcccatgtttctgctgatgcaaggaagctggtgggcaaggtggcggtgatcaccggcggcgcgagcggcatcggcgcgtgcacggcgcggctgttcgtgaagcacggcgcccgcgtcgtggtcgccgacatccaggacgagctgggagctagcctcgtcgcggagctcggcccggacgcctccagctacgtgcactgcgacgtcacgaacgagggcgacgtcgccgccgcggtcgaccacgccgtcgccacgttcgggaagctcgacgtcatgttcaacaacgccggcgtcaccggcccgccgtgcttcaggatcaccgagagcaccaaggaggacttcgagcgcgtgctggccgtgaacctgatcggcccgttcctcggcaccaagcacgcggcgcgggtgatggcgccggcgcgccgtggcagcatcatctcgacggcgagcctgtcgtcgtcggtgtccggcacggcgtcgcacgcgtacacgacgtcgaagcgcgccctggtggggttcacggagaacgcggccggcgagttgggccggcacgggatccgcgtcaactgcgtttcccccgccgcggtcgccacgccgctggctagggctgccatgggtatggacatggacgacgagaccattgaggcgatcatggagaagtcggcgaacctaaagggcgttggactcaaggtggacgacatcgccgccgcggcgctgttcctcgccagcgacgacgggcggtacgtgagcggccagaacctgcgcgtcgacggcggcgtgtccgtcgtcaactcgagctttggtttcttcagggactga

SEQ ID NO: 1456 - protein, 274 aa, Oryza sativa Japonica Group
MAGSSHVSADARKLVGKVAVITGGASGIGACTARLFVKHGARVVVADIQDELGASLVAELGPDASSYVHCDVTNEGDVAAAVDHAVATFGKLDVMFNNAGVTGPPCFRITESTKEDFERVLAVNLIGPFLGTKHAARVMAPARRGSIISTASLSSSVSGTASHAYTTSKRALVGFTENAAGELGRHGIRVNCVSPAAVATPLARAAMGMDMDDETIEAIMEKSANLKGVGLKVDDIAAAALFLASDDGRYVSGQNLRVDGGVSVVNSSFGFFRD

SEQ ID NO: 1457 - DNA, 825 bp, Oryza sativa Japonica Group
  CDS (1)..(825)
atggcagctggaagctcccatgtttctgctgatgcaaggaagctggtgggcaaggtggcggtgatcaccggcggcgcgagcggcatcggcgcgtgcacggcgcggctgttcgtgaagcacggcgcccgcgtcgtggtcgccgacatccaggacgagctgggagctagcctcgtcgccgagctcggcccggacgcgtccagctacgtgcactgcgacgtcacgaacgagggcgacgtcgccgccgcggtcgaccacgccgtcgccaggttcgggaagctcgacgtcatgttcaacaacgccggcgtcagtggcccgccgtgcttcaggatgagcgagtgcaccaaggaggacttcgagcgcgtgctcgccgtgaacctggtcggcccgttcctgggcaccaagcacgcggcgcgggtgatggcgccggcgcgccgcggcagcatcatctcgacggcgagcctgtcgtcgtcggtgtccggcgcggcgtcgcacgcgtacacgacgtcgaagcacgcgctggtggggttcacggagaacgcggccggcgagctgggccggcacgggatccgcgtcaactgcgtttcgcccgccggggtcgccacgccgctggcgagggctgccatgggcatggacgacgaggcaatcgaggcgatcatggcgaactcggcgaacctgaagggcgcaggcgcactcaaggcggacgacatcgccgccgcggcgctgttcctcgccagcgacgacggccggtacgtgagcggccagaacctgcgcgtcgacggcggcttgtccgtcgtcaacagcagctttggtttcttcagggactga

SEQ ID NO: 1458 - protein, 274 aa, Oryza sativa Japonica Group
MAAGSSHVSADARKLVGKVAVITGGASGIGACTARLFVKHGARVVVADIQDELGASLVAELGPDASSYVHCDVTNEGDVAAAVDHAVARFGKLDVMFNNAGVSGPPCFRMSECTKEDFERVLAVNLVGPFLGTKHAARVMAPARRGSIISTASLSSSVSGAASHAYTTSKHALVGFTENAAGELGRHGIRVNCVSPAGVATPLARAAMGMDDEAIEAIMANSANLKGAGALKADDIAAAALFLASDDGRYVSGQNLRVDGGLSVVNSSFGFFRD

SEQ ID NO: 1459 - DNA, 828 bp, Oryza sativa Japonica Group
  CDS (1)..(828)
atggcgggtagcagctacggcgacgttcatgagtctgcaagaaagttggtgggcaaggtggcgctgatcaccggcggcgcgagcggcatcggggagtgcacggcgcggctgttcgtgaagcacggggcgcaagtcgtggtcgccgacatccaggacgaggcgggggcgcggctgtgcgccgagctcgggagcgccaccgccagctacgtgcggtgcgacgtgacgagcgaggacgacgtcgcggccgcggtggaccacgccgtggcgaggtacgggaagctggacgtcatgttcaacaacgccgggatcggcggcgcggcgtgccacagcatcctggagagcaccaaggccgactttgaccgcgtgctggccgtgaacctgacgggcccgttcctgggcacgaagcacgcggcgcgggtgatggtggccgcggggcgcggcgggtgcatcatcgggacggcgagcctcgcgtcggcggtggccggcacggcgtcgcacgcgtacacgtgcgccaagcgcgcgctggtggggctgacggagaacgcggcggcggagctgggccgccacgggatccgcgtcaactgcgtgtcgcccgccgcggcggcgacgccgctggccacggggtacgtgggcctggagggggaggcgttcgaggccgccatggaggccgtggccaacctcaagggcgtgcgcctccgagtggaggacatcgccgccgccgtgctgttcctcgccagcgacgacgcgcgctacgtcagcggccacaacctgctcatcgacggcggctgctccatcgtcaacccgtcctttggcatcttcaaggactga

SEQ ID NO: 1460 - protein, 275 aa, Oryza sativa Japonica Group
MAGSSYGDVHESARKLVGKVALITGGASGIGECTARLFVKHGAQVVVADIQDEAGARLCAELGSATASYVRCDVTSEDDVAAAVDHAVARYGKLDVMFNNAGIGGAACHSILESTKADFDRVLAVNLTGPFLGTKHAARVMVAAGRGGCIIGTASLASAVAGTASHAYTCAKRALVGLTENAAAELGRHGIRVNCVSPAAAATPLATGYVGLEGEAFEAAMEAVANLKGVRLRVEDIAAAVLFLASDDARYVSGHNLLIDGGCSIVNPSFGIFKD

SEQ ID NO: 1461 - DNA, 903 bp, Oryza sativa Japonica Group
  CDS (1)..(903)
atgttgagagcaacgcaactcgttgtcaggagggagaagagcggagctatgggagctctgtgtggtttgggcagccacttctcgactgcctcgagttgccagaggttacccggcaaggtcgcggtgatcaccggcgcggccagcggcatcggcaaggcgacggccgccgagttcatccgcaacggcgccaaggtcatcctggccgatatacaggacgacctcggccgcgccgtcgcggccgagctgggcccggacgccgcgtacacccgctgcgacgtcaccgacgaggcgcagatcgccgcggcggtggacctcgccgtggcgcggcacggccgcctcgacatcctctacagcaacgccggcatctcgggctcctcggcgcccgcgccgctcgcgtcgctcgacctcgcggacttcgaccgcgtcatggcggccaacgcgcggtccgcggtggcggccgtcaagcacgccgcgcgcgtcatggtgccccggcgcggcggctgcgtcctctgcacggggagcaccacgggcatgctcggcgggctcgcggcgctgccgtacagcctctcgaaggcggcggtggtgggcgtggtgcggctggcggcggccgagctggcgcgctccggcgtgcgcgtgaacgccatctcgccgcacgccatcgcgacgccgctgctggtccggtcgctggcgaggatgaacccgggggtcagcgacgagcagctgaaggagatggtggagagggggatgagcgagctccatggcgcggtgctggagctggaggacgtggcgagggcggccgtctacctggcgtccgacgaggccaagttcgtcaccgggcagaaccacgtcatcgacggcgggttcacggtcgggaagccgatggacatgcgggttccacgttga

SEQ ID NO: 1462 - protein, 300 aa, Oryza sativa Japonica Group
MLRATQLVVRREKSGAMGALCGLGSHFSTASSCQRLPGKVAVITGAASGIGKATAAEFIRNGAKVILADIQDDLGRAVAAELGPDAAYTRCDVTDEAQIAAAVDLAVARHGRLDILYSNAGISGSSAPAPLASLDLADFDRVMAANARSAVAAVKHAARVMVPRRGGCVLCTGSTTGMLGGLAALPYSLSKAAVVGVVRLAAAELARSGVRVNAISPHAIATPLLVRSLARMNPGVSDEQLKEMVERGMSELHGAVLELEDVARAAVYLASDEAKFVTGQNHVIDGGFTVGKPMDMRVPR

SEQ ID NO: 1463 - DNA, 876 bp, Oryza sativa Japonica Group
  CDS (1)..(876)
atggagaagaagaagcagaagagacagatcaaagatcaagatgttcagagcattgcagatcgtcctcaggggttggctgggaaggtggcggtgatcaccggcgcggcgagcggcatcggcaaggcgaccgcggcggagttcgtcaggaatggcgccaaggtcatcctcgccgacgtccaggacgacgtcggccgcgccgtcgcctcggagctcggcgcggacgcggcgtcgtacacccgctgcgacgtcaccgacgaggcgcaggtcgcggcggccgtggacctcgccgtggcgcggcacgggcagctcgacgtcatggtcaacaacgccggcatcgtgggctccctgtcgcgccccccgctcggcgccctcgacctcgccgacttcgacgccgtcatggcggtgaacacgcgcggcgtcctcgcgggcgtcaagcacgccgcgcgcgtcatggcgccgcgccgccgcggcagcatcatctgcgtggcgagcgtcgccggggtgctcggcagcgtgacgccgcacccgtacagcgtgtccaaggccgccgtgctcggcgcggtccgcgccgccgccggcgagatggcgcgctccggcgtgcgcgtgaacgccatctcccccaactacatccccacgccgctggtgatgcgcatcatggcggagtggtaccccggggcgagcgccgacgagcaccgccgcgtcgtggagcgggagatcaacgagatggagggcgcgacgctggagcccgaggacatcgcgagggcggcggtgtacctggcctccgacgaggccaagtacgtgaacggccacaacctcgtcgtcgacggcgggtacaccgtcggcaaggcgcccaacctgccggcgccgccgcaataa

SEQ ID NO: 1464 - protein, 291 aa, Oryza sativa Japonica Group
MEKKKQKRQIKDQDVQSIADRPQGLAGKVAVITGAASGIGKATAAEFVRNGAKVILADVQDDVGRAVASELGADAASYTRCDVTDEAQVAAAVDLAVARHGQLDVMVNNAGIVGSLSRPPLGALDLADFDAVMAVNTRGVLAGVKHAARVMAPRRRGSIICVASVAGVLGSVTPHPYSVSKAAVLGAVRAAAGEMARSGVRVNAISPNYIPTPLVMRIMAEWYPGASADEHRRVVEREINEMEGATLEPEDIARAAVYLASDEAKYVNGHNLVVDGGYTVGKAPNLPAPPQ

SEQ ID NO: 1465 - DNA, 909 bp, Oryza sativa Japonica Group
  CDS (1)..(909)
atgttcacagcgatgcatcgcatcctcagcagggggaggaggacacctgcagcttcgtcttcctccgtcactgccttcgccaccgcctccgattcacagaggttggccgggaaggtcgccgtcatcaccggcggcgccagcggcatcggcagggcgacggcggaggagttcgtcaggaatggcgccaaggtcatcctcgccgatgtgcaggacgacctgggacacgccgtcgccgcggagctcggcgcggacgcggcgtcgtacgcgcgctgcgacgtcaccgacgaggcgcaggtcgcggccgccgtggacctcgccgtggcacggcacgggcgtctcgacgtcgtcttcaacaacgccggcatccccggtgacctcacgccgacccccgtgggcgcgctggacctcgctgacttcgaccgcgtgatggcggtgaacaccagggcggtggtggcgggcgtcaagcacgccgcgcgcgtcatggtgccgcgccgccgcggcagcatcatctgcacggcgagcacggcgggggtgatcggtggcgtggcggtcccgcactacagcgtgtccaaggccgcggtgctcgggctggtgcgcgccgtggcgggcgagatggcgcgctccggcgtgcgcgtgaacgccatctcccccaactacatctggacgcccatggcggcggtcgccttcgcaaggtggtaccccagccggagcgccgacgaccaccgccggatcgtggagaatgacataaacgagatggatggcgtgacactggaggccgaggacgtggcaagggcggcggtgttcctcgcctccgacgaggctaagtacgtgaacgggcacaacctcgttgtcgacggcgggtacaccgtcggcaaggtgcccaacatgccggtcccagatggccattga

SEQ ID NO: 1466 - protein, 302 aa, Oryza sativa Japonica Group
MFTAMHRILSRGRRTPAASSSSVTAFATASDSQRLAGKVAVITGGASGIGRATAEEFVRNGAKVILADVQDDLGHAVAAELGADAASYARCDVTDEAQVAAAVDLAVARHGRLDVVFNNAGIPGDLTPTPVGALDLADFDRVMAVNTRAVVAGVKHAARVMVPRRRGSIICTASTAGVIGGVAVPHYSVSKAAVLGLVRAVAGEMARSGVRVNAISPNYIWTPMAAVAFARWYPSRSADDHRRIVENDINEMDGVTLEAEDVARAAVFLASDEAKYVNGHNLVVDGGYTVGKVPNMPVPDGH

SEQ ID NO: 1467 - DNA, 903 bp, Oryza sativa Japonica Group
  CDS (1)..(903)
atgttcagagctgcgcagctcctcctcagggagacgaacagagctcttggggcagcaacttcgcctgcaggcttcgtcagtggcttctccacggcttccaactctgcgcagaggttggctggcaaggtggctgtcataaccggtggagctagcggcatcggcaaagcgacagccaaggagttcatcgagaatggcgccaaggtcatcatggccgatgtccaggatgacctcggccactccaccgcagcggagctcggcccggacgcctcgtacacgcgctgcgacgtcaccgacgaggcacaggtcgcggcggccgtcgacctcgccgtgaagcggcacggccacctcgacatcctctacaacaacgccggtgtcatgggcgccatgccgcaggacgacatggcgtccgtcgacctcgccaacttcgaccgcatgatggcgatcaacgcccgggcggcgcttgtcggcatcaagcacgccgcgcgcgtcatgtcgccccgccgcagcggcgtcatcctctgcacggccagcgacacgggcgtcatgcccatgcccaacatcgccttgtacgccgtctccaaggcaaccaccatcgccatcgtgcgcgccgcggcggagccgctgtcgcgccacggcctgcgggtgaacgccatctcgccgcacggcaccaggacgccgatggcgatgcacgtgttatctcagatgtaccccggcgtaagcaaagatgatttggagaagatggcggacgccgccatggacgccggagaggtgatggaacctaagtacgtcgctagggcggcgctgtatttggcttcggacgaggctaagtatgtcaacgggcacaacctcgtcgttgacggcggcttcacgtcgcacaaaggatccgacacacgtttgaattag

SEQ ID NO: 1468 - protein, 300 aa, Oryza sativa Japonica Group
MFRAAQLLLRETNRALGAATSPAGFVSGFSTASNSAQRLAGKVAVITGGASGIGKATAKEFIENGAKVIMADVQDDLGHSTAAELGPDASYTRCDVTDEAQVAAAVDLAVKRHGHLDILYNNAGVMGAMPQDDMASVDLANFDRMMAINARAALVGIKHAARVMSPRRSGVILCTASDTGVMPMPNIALYAVSKATTIAIVRAAAEPLSRHGLRVNAISPHGTRTPMAMHVLSQMYPGVSKDDLEKMADAAMDAGEVMEPKYVARAALYLASDEAKYVNGHNLVVDGGFTSHKGSDTRLN

SEQ ID NO: 1469 - DNA, 813 bp, Oryza sativa Japonica Group
  CDS (1)..(813)
atggattccaactccatccagcgtttggctggcaaggtggctatcattaccggtggagccagtggcatcggaaaggttacagcaaaggagttcatcaagaatggtgccaaggtcatcatcgccgatgtccaggacgagctcggccactctgcggcggccaagctcggcccggacgcctcgtacacgcactgcgatgtcaccgacgaggcgcaggtcgaggcggccgtggacctcgctgtgaggctccacggccacctcgacatcctctacaacaacgctggcatcatcggcgccatgccgcaggacgacatggcgtccgtcgacctcgccaacttcgaccgcatgatggcgatcaacgcccgggcggcgctcgtcggcatcaagcacgccgcgcgcgtcatggcgccgcgccgcagcggcgtcatcctctgcacggcgagcgacgcgggcgtcatgcccatcccgaacatcgccatgtactccgtctccaaggcgaccaccatcgccatcgtgcgcgccgcggcggagccgctgtcgcgccacggcctgcgggtgaacgccatctcgccgacgggcaccaggacgccgatgatgatgcatatcatctcccagatgacccccggcgtgggcgaggacgacctggagcggatggcggacgccgccatcagcgccggcgtggccatcgagccggagtacgtcgcgagggcggcggtgtacctcgcctccgacgaggccaagtacgtcaacgggcataacctcgtcgtcgacggcggcttcacaacgcataaaggagacgacaatcgcatgaattaa

SEQ ID NO: 1470 - protein, 270 aa, Oryza sativa Japonica Group
MDSNSIQRLAGKVAIITGGASGIGKVTAKEFIKNGAKVIIADVQDELGHSAAAKLGPDASYTHCDVTDEAQVEAAVDLAVRLHGHLDILYNNAGIIGAMPQDDMASVDLANFDRMMAINARAALVGIKHAARVMAPRRSGVILCTASDAGVMPIPNIAMYSVSKATTIAIVRAAAEPLSRHGLRVNAISPTGTRTPMMMHIISQMTPGVGEDDLERMADAAISAGVAIEPEYVARAAVYLASDEAKYVNGHNLVVDGGFTTHKGDDNRMN

SEQ ID NO: 1471 - DNA, 906 bp, Oryza sativa Japonica Group
  CDS (1)..(906)
atgtgggagacgaagagagtggttggcccaaggatgacgacgatgacgtcgacttcgcctgaaagtctaatcgccggtggattctccacggcggcgagctcccaccagaggttggccggcaaggtggccgtcatcaccggcgccgccagcggcatcggcaaggcgaccgccgcggagttcatcaggaacggcgccaaggtgatcatcaccgacgtcaacgacgacctcggccacgccgcggcggcggagctcggcccggacgccacgtacgcgcgctgcgacgtcgccgacgaggcgcaggtcgccgccgccgtcgacctcgccgtggcgcgccacggccgcctcgacgtcatgcacaacaacgccgccatcccggggaggttcccgcaggacgacatggcgtccgtcgacctcgccgacttcgacgccatgatggcggtgaacgcccgcgcgtcgctcgccggcatcaagcacgccgcgcgcgtcatggcgccccgccgcgccggcgtcatcctctgcacggccagcgccgtcggcgtcctcccgctcccggcggtcgccacgcactccatcaccaaggccaccatcatcgccatcgtgcgcgcagcggcggagcccctggcgcgccacggcctgcgggtgaacgccatctcgccgggcgccgtcaggacgccggtcctgcagggcaaggtgtcggtgatgtcggcgtcgtctcctaccatgagcgacgagctgaagcagatgatcgacgtcgacgcgaacgacatgatgatggggccggaggaggtggccatggcggcggtgtacctcgcctccgacgaggccaggtacgtgaccggccacaacctcgtcgtcgacggcgggtacaccgtgcacaaaggagctgacacaccggcggcgcgttga

SEQ ID NO: 1472 - protein, 301 aa, Oryza sativa Japonica Group
MWETKRVVGPRMTTMTSTSPESLIAGGFSTAASSHQRLAGKVAVITGAASGIGKATAAEFIRNGAKVIITDVNDDLGHAAAAELGPDATYARCDVADEAQVAAAVDLAVARHGRLDVMHNNAAIPGRFPQDDMASVDLADFDAMMAVNARASLAGIKHAARVMAPRRAGVILCTASAVGVLPLPAVATHSITKATIIAIVRAAAEPLARHGLRVNAISPGAVRTPVLQGKVSVMSASSPTMSDELKQMIDVDANDMMMGPEEVAMAAVYLASDEARYVTGHNLVVDGGYTVHKGADTPAAR

SEQ ID NO: 1473 - DNA, 888 bp, Oryza sativa Japonica Group
  CDS (1)..(888)
atgatgcagagaacaatgcagctcgttctcagggtgaagagatcgtcgggtttactacaccaattctccactgcggcgaactcgcagaggttggccgggaaggtggccgtcatcaccggcgccgccagcggcatcggcaaggcgtcggcgaaggagttcatcggcaatggcgccaaggttatactcgccgacgtccaggacgacctcggccgcgccgtcgccgccgagctcggccctggcgcgacgtacacgcggtgcgacgtcacggacgaggcgcaggtcgccgcggcggtggacctcgccgtggcgcgccacggggcgctcgacgtgttctacagcaacgccggcgtcctgggctccatcgcgccggcgccgctcgcctccctggacctgggcgagttcgaccgcgtcatggccgtgaacgcccgcgccgccgtcgccgccgccaagcacgcggcgcgcgccatggtgccgcgccggagcgggtgcgtcctcttcacggggagcgtgtcgggcgtggtgggcggcacggggccgacgtcgtacggcgtgtcgaaggcggccgtgctgggcgtggtgcgcgccgtggccggggagctggcgcgccacggcgtgcgggcgaacgccgtctcgccgtgcggcgtcgcgacgccgctgtccatggtgcaggtccttgaggcctaccccgggatgagcttcgaggagctcaagaacgccatggcggcgtccatggagcagatggaagctggcccgttgatcgaccccgaggacgtggcgagggcggccgtcttcctggcgtccgacgaggccaggtacatcaacggccataacctcgtcgtcgacggcggcttcacggtggggaagctgctcaaaatccccaaggagtag

SEQ ID NO: 1474 - protein, 295 aa, Oryza sativa Japonica Group
MMQRTMQLVLRVKRSSGLLHQFSTAANSQRLAGKVAVITGAASGIGKASAKEFIGNGAKVILADVQDDLGRAVAAELGPGATYTRCDVTDEAQVAAAVDLAVARHGALDVFYSNAGVLGSIAPAPLASLDLGEFDRVMAVNARAAVAAAKHAARAMVPRRSGCVLFTGSVSGVVGGTGPTSYGVSKAAVLGVVRAVAGELARHGVRANAVSPCGVATPLSMVQVLEAYPGMSFEELKNAMAASMEQMEAGPLIDPEDVARAAVFLASDEARYINGHNLVVDGGFTVGKLLKIPKE

SEQ ID NO: 1475 - DNA, 1026 bp, Oryza sativa Japonica Group
  CDS (1)..(1026)
atggccaacgtcgttttctttctcccggcgccatctccgcaaccatgccgagctaccgtgcttctgggcctgattgaacgaggactggagaccggaaaatgggcgctgtcgtcagatgctggaagaaacggcgattctgcgttctacttcgctatgacgggcaagagcagagcagggttgacgatgttgactggattcgtcaaccgcttctcttccgtgtcaagacccgaaaggttggctggaaaggtggccgtgatcaccggcggcgcaagcggcatcggcgaggcgacggccaaggagttcatccgcaatggcgccaaagtcatcatcgccgacgtacaagacgatctcggccacgccgtcgccgccgagctcggcccagatgcggcctacacccgctgcgatgtcaccgacgaggcgcagatcgcggcggccgtggacctcgccgtggcgtgccacggccgcctcgacgtcctgcacaacaacgccggggtcacgtgctcctacgtggggcccctcgcctccctagacctcgccgacttcgaccgcgtcatggcggtgaacgcccgggcggtgctcgccggcatcaagcacgcggcgcgcgtgatggcgccacggcgcgccggctccatcctctgcacggccagcgtggcgggcgtgatcggcagcgatgtcccccacgcgtacagcgtctccaaggcggcagccatcggcgtggtgaggtccgccgccggcgagctggcgcgccacggcgtgcggctgaacgccatctcgccgcacggcatcgcgacgccgctggcgatgcgcgggttcggcgacgtgctggcgtgggcggacgccgagagattgaagcgggtcatcgaggaggacatgaacgagctggagggcgcaaagctggaggcggaggacatcgcgagggcggcggtgtacctcgcctccgacgaggccaagtacatcactgggcataacctcgtcgtcgatggcgggttcaccgtcggcaagcgcctcaacttcgcgcatgcttga

SEQ ID NO: 1476 - protein, 341 aa, Oryza sativa Japonica Group
MANVVFFLPAPSPQPCRATVLLGLIERGLETGKWALSSDAGRNGDSAFYFAMTGKSRAGLTMLTGFVNRFSSVSRPERLAGKVAVITGGASGIGEATAKEFIRNGAKVIIADVQDDLGHAVAAELGPDAAYTRCDVTDEAQIAAAVDLAVACHGRLDVLHNNAGVTCSYVGPLASLDLADFDRVMAVNARAVLAGIKHAARVMAPRRAGSILCTASVAGVIGSDVPHAYSVSKAAAIGVVRSAAGELARHGVRLNAISPHGIATPLAMRGFGDVLAWADAERLKRVIEEDMNELEGAKLEAEDIARAAVYLASDEAKYITGHNLVVDGGFTVGKRLNFAHA

SEQ ID NO: 1477 - DNA, 897 bp, Oryza sativa Japonica Group
  CDS (1)..(897)
atgtacagcgccattcacctcgttcagaggggcaagaacagagcagggttgacgatgttgactggattcgtcaacagtttctcctctgtgtcaagacccgaaaggttggctggaaaggtggccgtgatcaccggtggcgcaagcggcatcggcgaggcgacggccaaggagttcatccgcaatggcgccaaggtcatcatcgccgacgtacaagacgatctcggccacaccgtcgctgccgagctcggcccgggctcggcctacacccgctgcgacgtcaccgacgaggcgcagatcgcggcgaccgtggaccttgccgtggcgcgccacggccaccttgacatcctgtacaacaacgccgggatcacaagctcctctgtggggcaccttgcctccctcgacctcgccgacttcgaccgcgtcatggcggtgaacgcccgggcggtgctcgccggcatcaagcacgccgcgcgcgtgatggcaccacgacgcaccggctccatcctctgcacggccagcgtggcgggcatgatgggcggcgagatgccccacgcgtacaacgtctccaaggcggcggtcataggtgtggtgcggtccgccgccggcgagctggcacgccacggcgtgcggctgaacgcgatctcgccgctcggcatcgcgacgccactggcgatgcgcgggttcggcgacatgctggcgtgggcggacgccgagcgggtgaggcggctcatcgaggaggacatgaacgagctagagggcgcgacgctggaggcggaggacatcgcgagggcggcggtgtacctcgcctccgacgaggccaagtacgtcaccgggcataacctcgtcgtcgacggcgggttcaccgtcgggaagcggctcaacgtggcgcgtgcttga

SEQ ID NO: 1478 - protein, 298 aa, Oryza sativa Japonica Group
MYSAIHLVQRGKNRAGLTMLTGFVNSFSSVSRPERLAGKVAVITGGASGIGEATAKEFIRNGAKVIIADVQDDLGHTVAAELGPGSAYTRCDVTDEAQIAATVDLAVARHGHLDILYNNAGITSSSVGHLASLDLADFDRVMAVNARAVLAGIKHAARVMAPRRTGSILCTASVAGMMGGEMPHAYNVSKAAVIGVVRSAAGELARHGVRLNAISPLGIATPLAMRGFGDMLAWADAERVRRLIEEDMNELEGATLEAEDIARAAVYLASDEAKYVTGHNLVVDGGFTVGKRLNVARA

SEQ ID NO: 1479 - DNA, 924 bp, Oryza sativa Japonica Group
  CDS (1)..(924)
atgatgagcgtagcagccaacaaaattctcagggggaggagcagaggtgttcgtccgatgttctcttccggcttggccgatcgcctcttctcctcgtcggcgtcaagctccaaaaggttggaagggaaagtggccgtgatcaccggcgcggtgggcggcatcggcgaggccacggcgaaggagttcgtcaggaatggcgccaaggtcatcctcgccgatatccaggacgaccttggccgcgccatggccgccgagctcggcgcggacgccgcgtcgtacacgcactgcgacgtcaccgtcgaggcggacgtcgccgcggccgtcgacctcgccgtggcgcgccacggccgcctcgacgtcgtctacagcaacgccggcatcgccggcgccgcggccccgcccacgctctcggcgctcgacctcgacgactacgaccgcgtcatggccgtcaacgcccggtccatggtggcctgcctcaagcacgcggcgcgcgtcatgtccccgcgccgcgccggctgcatcctctgcacggcgagctccacggcgctgatcggcgacctggcggcgccggcgtactgcatctcgaaggcggccgtcgtcggaatggtgcggacggtggcaaggcagctggcgcgcgacggcgtgcgcgtgaacgccatctcgccgcacatcatcccgacggcgctggtgacgcgcgtcatctccgagacgttcccggcggccaccgcggaggaggtgaggaggatggtgacgagggacatgcaggagctggaaggggcgtcgctggaggtggaggacgtggcgagggcggccgtcttcttggcgtccgacgaggccaagttcgtcaccggccacaacctcgtcgtcgatggcggcttcacggtcggcaaggacctcctccggaatccaccgagctttgcttga

SEQ ID NO: 1480 - protein, 307 aa, Oryza sativa Japonica Group
MMSVAANKILRGRSRGVRPMFSSGLADRLFSSSASSSKRLEGKVAVITGAVGGIGEATAKEFVRNGAKVILADIQDDLGRAMAAELGADAASYTHCDVTVEADVAAAVDLAVARHGRLDVVYSNAGIAGAAAPPTLSALDLDDYDRVMAVNARSMVACLKHAARVMSPRRAGCILCTASSTALIGDLAAPAYCISKAAVVGMVRTVARQLARDGVRVNAISPHIIPTALVTRVISETFPAATAEEVRRMVTRDMQELEGASLEVEDVARAAVFLASDEAKFVTGHNLVVDGGFTVGKDLLRNPPSFA

SEQ ID NO: 1481 - DNA, 933 bp, Oryza sativa Japonica Group
  CDS (1)..(933)
atggccaaatgggccgcgcagcctggcacggcctgctcaacggccggggggaagagcatagctgctcaggtgttctccaacggcttggccgatcgcctcttctcctcgtcgtcaagctccagaaagttggatggcaaagtggccgtgatcaccggcgcggcgagcggcatcggcgaggccacggcgaaggagttcgtcaggaacggcgccaaggttatcattgccgatatccaggacgacctcggccgcgccgtggccgccgagctcggcgccgacgccgcgtcgtacacgcactgcgacgtcaccgtcgagaaggatgtcgccgcggccgtcgacctcgccgtggcgcgccacggccgcctcgacgtcgtctacagcaacgccggcgtcataggagcaccggctccggcctcgctcgcggcgctcgacctcgacgagtacgaccgcgtcatggccgtcaacgcccggtcgatgttggcgtgcgtcaagcacgcggcgcgcgtcatggcgccgcgccgcgccggctgcatcctctgcacggccagctcggcggcggtgctcggcggcgtggcgtcgccggtgtactccatgtcgaaggcggccatcgtcggcatggtgcgcgcggtggcgaggcagctggcgcgcgacggcgtgcgggtgaacgccatctcgccgcacgccatcccgacgccgatggcgctaggcatcatcgccgagacgttcccggcggccaccgcggaggaggtgaggaggatggtgacgagggagatgcaggagctggaagggacatcgctggaggtggaagacgtggcgagggcggccgtgttcttggcgtccgacgaggccaagttcgtcaccggccacaacctcgtcgtcgacggcggcttcacggtgggcaaagacctcctccgaaatccaccgagctctacttga

SEQ ID NO: 1482 - protein, 310 aa, Oryza sativa Japonica Group
MAKWAAQPGTACSTAGGKSIAAQVFSNGLADRLFSSSSSSRKLDGKVAVITGAASGIGEATAKEFVRNGAKVIIADIQDDLGRAVAAELGADAASYTHCDVTVEKDVAAAVDLAVARHGRLDVVYSNAGVIGAPAPASLAALDLDEYDRVMAVNARSMLACVKHAARVMAPRRAGCILCTASSAAVLGGVASPVYSMSKAAIVGMVRAVARQLARDGVRVNAISPHAIPTPMALGIIAETFPAATAEEVRRMVTREMQELEGTSLEVEDVARAAVFLASDEAKFVTGHNLVVDGGFTVGKDLLRNPPSST

SEQ ID NO: 1483 - DNA, 795 bp, Oryza sativa Japonica Group
  CDS (1)..(795)
atggcggccgccgcagctcgcagcatcccggaccggtggaccctcgccggcgcgacggcgctcgtcaccggcggcagcaaaggcatcgggcatgcgatagtggaggagctcgccggattcggggcgcgcgtgcacacgtgcgcccggaacgcggcggagctggaggcgagccggcggcggtgggaggagcgggggctccgcgtcaccgccaccgtctgcgacgtctccgcgcgcggcgaccgggagaggctggtcgccgccgcggcgggggagttcggcggcaggctggacatcctcgtcaacaacgtcggccggaccatgttccgggcggcggcggcgtgctccggcgaggacttcgccctgctcgtggccaccaacctcgagtcctgcttccacctctcccagctcgcgcacccgctcctgctcgccgccggcggcggaggcggctgcgtggtgaacatctcctccgtcgccggcaccgtcggcataccggcgctggccgtgtactccatgaccaagggcggcatgaaccagctcacccggagcctcgccgccgagtgggccggcgacggcatacgtgtcaactgcgtcgcgccgggaggcgtcaagactgacatctgccaagacgagacgatagacccggagctgatcaagagcgagatggaccggctgccgatgcggcggctggcggagccggaggaggtggcggcgacggtggcgttcctctgcatgccggcggcctcctacatcaccggccaggtcgtcggcgtcgacggcggacgcaccattacctag

SEQ ID NO: 1484 - protein, 264 aa, Oryza sativa Japonica Group
MAAAAARSIPDRWTLAGATALVTGGSKGIGHAIVEELAGFGARVHTCARNAAELEASRRRWEERGLRVTATVCDVSARGDRERLVAAAAGEFGGRLDILVNNVGRTMFRAAAACSGEDFALLVATNLESCFHLSQLAHPLLLAAGGGGGCVVNISSVAGTVGIPALAVYSMTKGGMNQLTRSLAAEWAGDGIRVNCVAPGGVKTDICQDETIDPELIKSEMDRLPMRRLAEPEEVAATVAFLCMPAASYITGQVVGVDGGRTIT

SEQ ID NO: 1485 - DNA, 807 bp, Oryza sativa Japonica Group
  CDS (1)..(807)
atggcggccgccgcagctcgcagcatcccctaccggtggaccctcgccggcgcgacggcgctcgtcaccggcggcagcaaaggcatcgggcatgcgatagtggaggagctcgccggattcggggcgcgcgtgcacacgtgcgcccggaacgcggcggagctggaggcgagccggcggcggtgggaggagcgggggctccgcgtcaccgccaccgtctgcgacgtctccgcgcgcggcgaccgggagaggctggtcgccgcggcggcggcggagttcggcggcaggctggacatcctcgtcaacaacgtcggccggaccatgttccgggcggcggcggcgtgctccggcgaggacttcgccgtgctcgtggccaccaacctcgagtcctgcttccacctctcccagctcgcgcacccgctcctgctcgccgccggcggcgcccgcggcggcggaggcggctgcgtggtgaacatctcctccgtcgccggcagcgtcggcatgccggcgctggccgtgtactccatgaccaagggcggcatgaaccagctcacgcggagcctcgccgccgagtgggccggcgacggcattcgtgtcaactgcgtcgcgccgggaggcgtcaagactgatatctgccaagacgagacgatagacccggagctgatcaagagcgagatggaccggctgccgatgcggcggctggcggagccggaggaggtggcggccacggtggcgttcctctgcatgccggcggcctcctacatcaccggccaggtcgtcggcgtcgacggcggacgcaccatttcctag

SEQ ID NO: 1486 - protein, 268 aa, Oryza sativa Japonica Group
MAAAAARSIPYRWTLAGATALVTGGSKGIGHAIVEELAGFGARVHTCARNAAELEASRRRWEERGLRVTATVCDVSARGDRERLVAAAAAEFGGRLDILVNNVGRTMFRAAAACSGEDFAVLVATNLESCFHLSQLAHPLLLAAGGARGGGGGCVVNISSVAGSVGMPALAVYSMTKGGMNQLTRSLAAEWAGDGIRVNCVAPGGVKTDICQDETIDPELIKSEMDRLPMRRLAEPEEVAATVAFLCMPAASYITGQVVGVDGGRTIS

SEQ ID NO: 1487 - DNA, 777 bp, Mesorhizobium loti MAFF303099
  CDS (1)..(777): transl_table=11
atgggccgctttgacggagcaaccgtgctgatcacaggtgccgccggggggctcggccggggtgccgcgaaaggctttgccagcgagggcgcgcggctggtgctgtcggacatcgacgaaaaggcgctcgccgatcttgccgcaacgctgccggccgaaacggcgatcctggccggcaacgtagccgacgaaaaactgtccgaggatctggtcaggctggcggtcgaaaaattcggccggctggatgtcaccgtcaacaatgccggcatcgtccagagtttcgtgcgcctgccgcaggttccttcggacgaggcgcgccgcgtgcttgagatcgacctgcttggcgtcttctatgccatgaagcaccagatcccgcagatggagcggcagttcagggctacggccaagggcggcgccatcgtcaacatcgcctcggttgccggactggtcggcgcgccgaaactctcggtttatgccgccgccaagcatggcgtcgtcgggctgaccaaatcggcggccgccgaatatgcaaccaagggtgtgcgcatcaacgccatctgtccggctcacaccaggacggcaatggtggacagtttcgtgcgcgcctccggtgcgccggaggcagaggcgttggccgaactgacacgcggtgtgccgatgaaacgcgtggcggaagtcgacgaaatcaccaccgccatcctgttcgccgccgacccggccaactccttcatgaccggccatgcgctggccgtcgacggcggcgtcggcgccatctga

SEQ ID NO: 1488 - protein, 258 aa, Mesorhizobium loti MAFF303099
MGRFDGATVLITGAAGGLGRGAAKGFASEGARLVLSDIDEKALADLAATLPAETAILAGNVADEKLSEDLVRLAVEKFGRLDVTVNNAGIVQSFVRLPQVPSDEARRVLEIDLLGVFYAMKHQIPQMERQFRATAKGGAIVNIASVAGLVGAPKLSVYAAAKHGVVGLTKSAAAEYATKGVRINAICPAHTRTAMVDSFVRASGAPEAEALAELTRGVPMKRVAEVDEITTAILFAADPANSFMTGHALAVDGGVGAI

SEQ ID NO: 1489 - DNA, 732 bp, Mesorhizobium loti MAFF303099
  CDS (1)..(732): transl_table=11
atggcggatctggcaggcaaggtcgttgtcatcacggcggcggcgcaaggcatcggcaaggcgagcgcgctggccttcgccaagactggagccaccgtccacgccaccgacatcaacgagacgcttctcgccgaactcgccaagacgccagggatcaagacccgcaagctggatgtgctcaacgacgaggccgtcaacaccaccttcgccgagatcggccgcgtcgacgtgctgttcaactgcgccggcttcgtccattccggctcgatcctggagatgaaggatggcgatctcgatttcgccttcaacctcaatgtccgcgccatgatccgcaccatcagggccgtgctgcccggcatgctggaacgaggcgacggatcgatcgtcaacatgtcttccgtcgccggcgccggcaaaggcgtgccgaaccgcttcgcctatggcgtcaccaaggccgccgtcatcggcctgaccaaggcgattgccgccgactatgtcggcaagggcatacgctgcaacgccatctgccccggcacggtcgaaagcccgtcgctgcaggaccgcatgcatgcgcaaggcgactacgaagccgcccgcgccgccttcatcgcccgccagccaatgggccggctcggcacgcctgaggaaatcgccgatctcgcggtctatctggccggcgcgacctacacgtccgggcaggcctataatatcgacggcggctggtcgatctga

SEQ ID NO: 1490 - protein, 243 aa, Mesorhizobium loti MAFF303099
MADLAGKVVVITAAAQGIGKASALAFAKTGATVHATDINETLLAELAKTPGIKTRKLDVLNDEAVNTTFAEIGRVDVLFNCAGFVHSGSILEMKDGDLDFAFNLNVRAMIRTIRAVLPGMLERGDGSIVNMSSVAGAGKGVPNRFAYGVTKAAVIGLTKAIAADYVGKGIRCNAICPGTVESPSLQDRMHAQGDYEAARAAFIARQPMGRLGTPEEIADLAVYLAGATYTSGQAYNIDGGWSI

SEQ ID NO: 1491 - DNA, 777 bp, Mesorhizobium loti MAFF303099
  CDS (1)..(777): transl_table=11
atgacaggcaggcttcaggggaagatcgcaatcgtcaccggcgccggccagggcattggtgcagccactgcccgggcctttgcgatgcagggagcaaagaccgtgattgccgagctcaatgcggcaaccggcaaggcggccgccgacgaattgcgtgccaacggcgccgacgcccttttcgtcgaaaccgatgtcaccgacacagcggcagtggccgacatggtggcgaagacgatcgcggcctatggcggcgtcaacgtgctcgtcaacaatgcaggcgccaacgtcttttacgagcccttgtctatgccggacgcggaatgggaccgttgcctcaggctcgacctccaggccgcgtggtcctgtgccaaggcggtgttgccgacgatgctggcgaacggttcgggatcgatcgtcaacatagccagctgccacgccttcaagatcattccccacacatttccctatccggtcgccaagcatgcgcttgtcggcctgacccgctcgctcggcatcgaatatgcggcgcgcggcatccgcgtgaatgcgatcgcccccggctacatcgagacgccgatcgcggaagcctattggaacacgtttccggacccggccgaggagaagcggcgggcctacgaccttcatccgcccaagcgcattggccggccggacgaagttgcaatgacggcggttttcctcgcttcggacgaagcgccgttcatcaatgccgagacgatcaccatcgatggtggacgctcggttctctaccatgactga

SEQ ID NO: 1492 - protein, 258 aa, Mesorhizobium loti MAFF303099
MTGRLQGKIAIVTGAGQGIGAATARAFAMQGAKTVIAELNAATGKAAADELRANGADALFVETDVTDTAAVADMVAKTIAAYGGVNVLVNNAGANVFYEPLSMPDAEWDRCLRLDLQAAWSCAKAVLPTMLANGSGSIVNIASCHAFKIIPHTFPYPVAKHALVGLTRSLGIEYAARGIRVNAIAPGYIETPIAEAYWNTFPDPAEEKRRAYDLHPPKRIGRPDEVAMTAVFLASDEAPFINAETITIDGGRSVLYHD

SEQ ID NO: 1493 - DNA, 912 bp, Arabidopsis thaliana
  CDS (1)..(912)
atgcctgcccaagtgatcgctgagcagaccacctttcactccgtccacgacaccattatggaggagacgaatacaactttatatcctaagaggttggaaggaaaagtagccatcataaccggaggcgcacatggaataggcaaagcaaccgtcatgttattcgctagacacggtgccacagtggtgattgctgacgtggacaacgtagctggctcttccctggctaagtcactctcatcccacaaaacctccccgatggtggcattcattagctgcgatgtctccgtagaagccgacgtggaaaaccttgtgaacgtaaccgttgcacggtacggtaggcttgacattctattcaacaacgcgggagttctcggagatcagaagaaacacaaaagcatattagacttcgacgcggacgagtttgaccacgtgatgcgtgtgaacgtacgtggcgtaggactcggcatgaaacacggggcacgcgctatgatcaagagaggattcaaaggctgcataatctccacggcgagtgtagccggtgtgatgggtggaatgggaccacacgcttacacagcctcgaaacatgcgatcgttggtttgaccaagaacgcagcgtgtgagctaggcaagtatgggattagggttaattgtatatcaccgtttggagttgccacgtcgatgctggttaacgcgtggcgaaagacgagtggtggtgacgtggaagatgatgacgtggaggagatggaggagtttgtgaggagtttggctaatttgaaaggagagacattgagagcgaatgatatagctgaagcagcgttatatttggcgagtgatgagtctaagtatgtgaacggacataatcttgtcgttgacggtggtgttacgactgcaagaaactgtgttggtttgtga

SEQ ID NO: 1494 - protein, 303 aa, Arabidopsis thaliana
MPAQVIAEQTTFHSVHDTIMEETNTTLYPKRLEGKVAIITGGAHGIGKATVMLFARHGATVVIADVDNVAGSSLAKSLSSHKTSPMVAFISCDVSVEADVENLVNVTVARYGRLDILFNNAGVLGDQKKHKSILDFDADEFDHVMRVNVRGVGLGMKHGARAMIKRGFKGCIISTASVAGVMGGMGPHAYTASKHAIVGLTKNAACELGKYGIRVNCISPFGVATSMLVNAWRKTSGGDVEDDDVEEMEEFVRSLANLKGETLRANDIAEAALYLASDESKYVNGHNLVVDGGVTTARNCVGL

SEQ ID NO: 1495 - DNA, 774 bp, Thermotoga maritima MSB8
  CDS (1)..(774): transl_table=11
atgaatattcttgaaaagcttttctctttgaaaagaaaggtagctctggtgactggtggaggacagggcatcgggaaggccatcgcccaggcgctggcagcggcgggtgcagctgttttgatcatggacataaacgaagaaacagccagaagaacggtcgaagagataaaagagaaaggtggcgaagcagatttctatgttggggatgtgacgaaagaagaagattgttttggagcggtcaaaaaggcgctggataggtgggggaaactcgacataggagtcaacaacgcgggaataggagactggtgtgaagcggagaattatccggttgagaagtggaaaaaggtcatagacgtgaatctggttggggtgtttctttccgcaaaagcggagttccacgctatgaaggaaagaaaatacggaaagatcataaacatcgcgtccatgtccggacacatcgtgaacaaacctcagaagcagacagcttacaacgcttcgaaagcgggtgtgatccatctcaccagatctctggccgccgagtgggccccgtacggaatcagggtgaacagcataagccccggatacatcagaacacctctcatagaatctccaaacgtgaaagatcttgttcccctctggctcgacatgatccctcttggaagactgggagaggtggacgatctgataggagctgctatcttccttgcaagtcccgcctcagattacatgacagggcacgatcttgtgatagacggaggctacaccgtctggtga

SEQ ID NO: 1496 - protein, 257 aa, Thermotoga maritima MSB8
MNILEKLFSLKRKVALVTGGGQGIGKAIAQALAAAGAAVLIMDINEETARRTVEEIKEKGGEADFYVGDVTKEEDCFGAVKKALDRWGKLDIGVNNAGIGDWCEAENYPVEKWKKVIDVNLVGVFLSAKAEFHAMKERKYGKIINIASMSGHIVNKPQKQTAYNASKAGVIHLTRSLAAEWAPYGIRVNSISPGYIRTPLIESPNVKDLVPLWLDMIPLGRLGEVDDLIGAAIFLASPASDYMTGHDLVIDGGYTVW

SEQ ID NO: 1497 - DNA, 741 bp, Bacillus halodurans C-125
  CDS (1)..(741): transl_table=11
atgctacaaggaaaaacagcgattgttacaggggcatctcgcggaattggccgagcaacagcgatggaactggcacgtcatggagcgaatgtcgtggtcaattatgcagggaataaggagaaagcggaaaaagtcgttgctgagattaaagaactcggagtggaggcaattgcgatccaagccgatgtagctgacagtgagtcggtccaagcaatggtcaaagagacgatcgatactttcggtgcagtcgatattctcgtcaacaacgcagggattacaagagacaacctatttatgcgcatgaaagaagaagattgggatgcggtgatcgatacgaatttaaaaggagttttccactgttcgaaagctgttacacgaccgatgatgaagcagcggtttgggcgaatcattaacgtatcgtctgttgttggtgccattgggaatgctggacaagcgaactatgttgcggccaaagcaggtgtcattggcttaacgaaaacacttgcccgtgagcttgctaaccgtaatattacggtaaatgcggtcgctccagggtttatcgaaacagatatgaccggtgaattgccggaagatgtcaaagcacaaatgctagggcaaatcccccttgctcgtctaggacagcctgaggaagtggcaaaagcggttcgtttcttagcgtccgacgatgcttcttacttaacaggacagacgatccatgtaaatggcggaatggtcatgtaa

SEQ ID NO: 1498 - protein, 246 aa, Bacillus halodurans C-125
MLQGKTAIVTGASRGIGRATAMELARHGANVVVNYAGNKEKAEKVVAEIKELGVEAIAIQADVADSESVQAMVKETIDTFGAVDILVNNAGITRDNLFMRMKEEDWDAVIDTNLKGVFHCSKAVTRPMMKQRFGRIINVSSVVGAIGNAGQANYVAAKAGVIGLTKTLARELANRNITVNAVAPGFIETDMTGELPEDVKAQMLGQIPLARLGQPEEVAKAVRFLASDDASYLTGQTIHVNGGMVM

SEQ ID NO: 1499 - DNA, 741 bp, Bacillus halodurans C-125
  CDS (1)..(741): transl_table=11
atgcgacttaacggaaaggtagcaatgattacaggagctggccgagggataggggcagcaacggctaaaaaatttgctagagaaggggcaaaagtgatcgtttgtgatgtgcgggaagaagaggtggcaaagacggtggccgaaattcaagacggaggtggtgaggcgttaggatcggtcgttgatgttacgcaacgcaaggatgtgaaaaacgttataaatcaagtgattgagcgatttgagacgctagatgtggtcgtgaacaatgcgggaatcacagccgatgcccagttaacgaacatgactgatgctcagtgggacgatgtgatcgatgttaacttaaagggggtgtttattgttacacaagaggtgacgaccattatgaaagagcagaaacgaggggtcattttaaacgcctcatccgttgtaggctcttacggaaactttggccagacgaattatgccgcttccaaatggggagtgaatgggatgacgaaaacgtgggcgaaagagctcggccgttataacattcgtgtcaatgctgtggcaccaggattcattctcacaccgatgacagaaaagatgccagaaaaagtattaaaggtgatggaagaaaaagcggtactcaaccgactaggcacagtagaggaagtggcgaacggctatgcctttcttgcatccgatgaagcgtcgtttattacaggaacgattttggccatcgatggcggtgtcgttatatag

SEQ ID NO: 1500 - protein, 246 aa, Bacillus halodurans C-125
MRLNGKVAMITGAGRGIGAATAKKFAREGAKVIVCDVREEEVAKTVAEIQDGGGEALGSVVDVTQRKDVKNVINQVIERFETLDVVVNNAGITADAQLTNMTDAQWDDVIDVNLKGVFIVTQEVTTIMKEQKRGVILNASSVVGSYGNFGQTNYAASKWGVNGMTKTWAKELGRYNIRVNAVAPGFILTPMTEKMPEKVLKVMEEKAVLNRLGTVEEVANGYAFLASDEASFITGTILAIDGGVVI

SEQ ID NO: 1501 - DNA, 783 bp, Pseudomonas aeruginosa PAO1
  CDS (1)..(783): transl_table=11
atgaatgacttttcgaagtggacaggtcaggtcgcgctcatcagcggcgccggcagcgaactcggcatcggtttcgccattgcccggcggctggcccgcgaaggcgtgcgcctgctgatcaccgccagcagcgagcggattaggcaacgagcggaggaactgagcgcatgtggtcacgacgtgcgcgccgcgagcgccgacctgaccgacgaagcccaggtgcagggcctgctggactgggccgaagcccagtggggacgggtcgacatcctggtgaacaatgccggcatggcccagttggacagcgcggagcccttcagcgcagtggaagcgacctcgctgcgggattggcaactgtccctgtcgcgcaacctgaccagcgctttcctgctcacccgcggcctgctgccgggcatgcgcgagcgcggctacgggcggatcgtcaacgtcgcctccaccaccggaacccgcggcagcaacccgggcgaagccgcgtatagcgcggccaaggccggtctggtcggctggagcatgggcctcgcgctggaggtggcgaagagcggcatcacggtgaacagcgtcgcgccgggctggatcgccaccgcctcgagcaccgccgaagaacgccaggccgccctggccagccccagcggacgtgccggccggcccgaagaggtggccgccgcggtggccttcctcgcctcgcccgaagccagcttcgtcaacggcgaactgctggtggtggatggcggcaactgcctgatcgaaaacaaacggagctga

SEQ ID NO: 1502 - protein, 260 aa, Pseudomonas aeruginosa PAO1
MNDFSKWTGQVALISGAGSELGIGFAIARRLAREGVRLLITASSERIRQRAEELSACGHDVRAASADLTDEAQVQGLLDWAEAQWGRVDILVNNAGMAQLDSAEPFSAVEATSLRDWQLSLSRNLTSAFLLTRGLLPGMRERGYGRIVNVASTTGTRGSNPGEAAYSAAKAGLVGWSMGLALEVAKSGITVNSVAPGWIATASSTAEERQAALASPSGRAGRPEEVAAAVAFLASPEASFVNGELLVVDGGNCLIENKRS

SEQ ID NO: 1503 - DNA, 786 bp, Agrobacterium tumefaciens str. C58
  CDS (1)..(786): transl_table=11
atgaggcgctttgaaggtcaatccgtattcgtgaccgggggcaacaagggcatcggttacggcatcgcccgccgttttgccgaagaaggcgcgaaagtcgccatcgcctctgtcgacaaagacacacatgacgccgctaaaaaactggcggacgaaaccggcaccgtcacccatggcgtcatcctcgacgttagggatgcggcggcggtgcgtgacgcctatggcgctgcggaagacgcgatcggcgcgctttccatctccgtccagaacgccggcgtcatcactatctcaaagatcgaggatctgacgcaagaacagtgggatttgaacctcgacgtcaacaccaagggcgcgttcctctgctgccaggaggcaatccgtcgcttccgcgcaagcggcaccaagggccgcctcgtcaacaccgcctccggccaagcgcgtcagggcttcatctacacgccgcattatgctgcgtccaaattcggcgttatcggcctgacgcaaagcctcgccaaggaacttgcacctgagggcatcaccgtcaacgccatctgccccggcatcatccacaccgaaatgtgggattacaacgaccgcgtctggggccagatgctgggcgaatacaagcccggcgagttgatggccgaatgggtgcgcaacatccccatgcgtcgcgccggaacgcccgccgaagtggcggcgctggtggcatttctggcatcagaggatgcggcctatatcacggcccagacgatcaacgtcgatggcgggttgatcatgtcttga

SEQ ID NO: 1504 - protein, 261 aa, Agrobacterium tumefaciens str. C58
MRRFEGQSVFVTGGNKGIGYGIARRFAEEGAKVAIASVDKDTHDAAKKLADETGTVTHGVILDVRDAAAVRDAYGAAEDAIGALSISVQNAGVITISKIEDLTQEQWDLNLDVNTKGAFLCCQEAIRRFRASGTKGRLVNTASGQARQGFIYTPHYAASKFGVIGLTQSLAKELAPEGITVNAICPGIIHTEMWDYNDRVWGQMLGEYKPGELMAEWVRNIPMRRAGTPAEVAALVAFLASEDAAYITAQTINVDGGLIMS

SEQ ID NO: 1505 - DNA, 918 bp, Agrobacterium tumefaciens str. C58
  CDS (1)..(918): transl_table=11
atgggcgcagccggatttaccacaccgccccccttccccgaagtggcgcccgaaatcacgcccgaaatcacgattgccagcccgccccctttgggcataacctgcttaaatatgtgcgaagtaatgcaaaaaggggaaagcatgcatcggacagttatcgtgacaggctccacaagcggcatcggccttggcattgcgcaaagatttgcgcgggagggcgccaatatcgtgctgaacggttttggcgacgacgacgagatcgaaaaactgcgccttctgctggaagccgaaagcggcgggcgggtgctttaccatcccgccgatatgacgaaaccggacgagatcgccgatctcatccagtcctcacacgaaaaactcggctcggtggatgtgctcatcaacaatgccggtattcagcacatcgcgcccatcgaggagttcccgacggaaaaatgggactggatcatcgccatcaatctgaccagttcttttcacaccatgcgtgccgcgataccgctgatgaaaaaggcaggcaaaggccgcatcatcaacatttcctcagcccacggccttgtcgcctcgccgttcaaatcggcctatgtggcggccaaacacggcatcatgggcttgacgaaaacggcagcgctcgaacttgcgcaaacgggcgtcaccgtcaacgccatctgtcccggttacgtgctgacgccgctggtggaaaagcagataccggaaatggccaaggtgcgcggcatcagcgaagcggcggtgaagaacgacgtgatgctggaattgcaggcgaccaaacaattcgtcaccgtcgatgacgtcgccgccgctgcgatatttctggcaagcgacgccgcaagcaacatcaccggcacccatatttccgtagacggcggctggacggcacaataa

SEQ ID NO: 1506 - protein, 305 aa, Agrobacterium tumefaciens str. C58
MGAAGFTTPPPFPEVAPEITPEITIASPPPLGITCLNMCEVMQKGESMHRTVIVTGSTSGIGLGIAQRFAREGANIVLNGFGDDDEIEKLRLLLEAESGGRVLYHPADMTKPDEIADLIQSSHEKLGSVDVLINNAGIQHIAPIEEFPTEKWDWIIAINLTSSFHTMRAAIPLMKKAGKGRIINISSAHGLVASPFKSAYVAAKHGIMGLTKTAALELAQTGVTVNAICPGYVLTPLVEKQIPEMAKVRGISEAAVKNDVMLELQATKQFVTVDDVAAAAIFLASDAASNITGTHISVDGGWTAQ

SEQ ID NO: 1507 - DNA, 816 bp, Agrobacterium tumefaciens str. C58
  CDS (1)..(816): transl_table=11
atggagactgctttgacaggtcgcctgacgggaaaacgcgcgcttgtgtttggcgcaggatcatcggggccgggatttggcaacggcaaggctgcggccgtgcaatttgcccgcgaaggcgcgcgcgtagcctgtgtcgatctctgcgctgacgcagccgaagagacggctgagatcattcgcggagaaggcttggaggcgattgcggctgccgccgatgtcactgaactacagtccgtatcggccaccgttgaccgcacctgcgaggcctttggtggcatcgatattctgcacaataatgtcggcgtgacccatatgggcgggccggttgagctggatgaggaaagctttcgcgcctcggtcgatctcaatatcggctccgtttatcgcacctccaaggctgtgttgccggtgatgttggcgcagggcggcggggccattgtcaatatctcgtcgctcgcctccattcgctggaccggctatccatattttgcctattacgccatgaaggcagctgtaaatcaggcgactgtggcgctggccatgcaatatgcccggcagggcattcgcgccaattgcattcttccgggaatgatcgacaccccactgatctacaagcagatcagcaatcaatatgcgtctgtcgaggaaatggtggcggcgcgcaatgcggctgtcccggtgggtcgcatgggcgatgcctttgatattgcccgcgccgccgtttttctcgcatctgatgaggctaagttcatcaccggcgtctgtttgccggtcgatggcgggcaaagctgtgcggtgggggcgttttcctaa

SEQ ID NO: 1508 - protein, 271 aa, Agrobacterium tumefaciens str. C58
METALTGRLTGKRALVFGAGSSGPGFGNGKAAAVQFAREGARVACVDLCADAAEETAEIIRGEGLEAIAAAADVTELQSVSATVDRTCEAFGGIDILHNNVGVTHMGGPVELDEESFRASVDLNIGSVYRTSKAVLPVMLAQGGGAIVNISSLASIRWTGYPYFAYYAMKAAVNQATVALAMQYARQGIRANCILPGMIDTPLIYKQISNQYASVEEMVAARNAAVPVGRMGDAFDIARAAVFLASDEAKFITGVCLPVDGGQSCAVGAFS

SEQ ID NO: 1509 - DNA, 786 bp, Agrobacterium tumefaciens str. C58
  CDS (1)..(786): transl_table=11
atgacggagatcgacatgagattgaacaacaaggtcgcgctgatcaccggcgccgcccgcggcatcggccttggtttcgcccaggctttcgctgctgagggcgcaaaggtcatcatcgccgacatcgatatcgcccgcgcaactacctcggctgcggccatcggccccgcagccaaggccgtgaagctggatgtgaccgaccttgcccagatcgacgcggtggtaaaggcggtggatgaggaattcggcggcatcgacattctcgtcaacaatgcggcgatcttcgatatggcgccgatcaacggcattaccgaagagagctatgagcgggtgttcgacatcaatctcaaggggccgatgttcatgatgaaggccgtctccaatgtcatgatcgcccgcgcacgcggcggcaagatcatcaatatggctagccaggccggccggcgcggcgaggcgctggtgacgctttattgcgcctccaaggcggcgatcatttccgccacgcaatcggcggcgctggcgctcgtcaagcatggcatcaatgtcaacgccatagcgccgggtgtggtggatggcgagcattgggaagtggtcgatgcgcatttcgccaagtgggaaggtttgaagccgggtgagaaaaaggccgcggtggccaaatccgtgccgatcggccgttttgcgacgccagacgacatcaagggactggcggtgttcctcgcctccgccgacagcgactatattctcgcccagacatataatgtcgacggcggcaactggatgagctga

SEQ ID NO: 1510 - protein, 261 aa, Agrobacterium tumefaciens str. C58
MTEIDMRLNNKVALITGAARGIGLGFAQAFAAEGAKVIIADIDIARATTSAAAIGPAAKAVKLDVTDLAQIDAVVKAVDEEFGGIDILVNNAAIFDMAPINGITEESYERVFDINLKGPMFMMKAVSNVMIARARGGKIINMASQAGRRGEALVTLYCASKAAIISATQSAALALVKHGINVNAIAPGVVDGEHWEVVDAHFAKWEGLKPGEKKAAVAKSVPIGRFATPDDIKGLAVFLASADSDYILAQTYNVDGGNWMS

SEQ ID NO: 1511 - DNA, 735 bp, Sinorhizobium meliloti 1021
  CDS (1)..(735): transl_table=11
atgacagcgaaccttgccggaaaggtcgtcctcgtaacagctgcggcgcagggcataggacgcgcaaccgcacttgccttcgccaaggccggtgccaaggtccatgcgaccgatatcaacgcggacgccgttggtagccttgaaggtgaggcgggcatcagcacccaccggctggacgtcctcgacaccgctgcggtcgaagcgctggtcgcggagatcggggccgtggacgtgcttttcaactgcgccggtttcgtccatgcaggctcggtgctcacgatgaaggacgaggacctcgatttcgccttcgatctgaacgtgaagtcgatgatccgcaccatccgtgcggtgctgcccggcatgatcgcacgcaaggacgggtcgatcgtcaatatggcctcggtggcctccagcattaaaggcgtgccgaaccgcttcgcctatggcgtgaccaaagcagccgtcatcgggctgacgaaagccgttgcggcggattatgtaggagacggcattcgctgcaatgcgatctgcccgggaacggtcgaaagcccgtcgctcgaaagccgcatgcgggcacagggagactacgaaacggcgcgtgcggcctttatctcccgccagccgatgggccgcctcggcacgcccgaagagatcgccgaccttgccgtctatctcgccggcgccacctacacctccggccaggcctacgccatcgacggcggctggaccatttga

SEQ ID NO: 1512 - protein, 244 aa, Sinorhizobium meliloti 1021
MTANLAGKVVLVTAAAQGIGRATALAFAKAGAKVHATDINADAVGSLEGEAGISTHRLDVLDTAAVEALVAEIGAVDVLFNCAGFVHAGSVLTMKDEDLDFAFDLNVKSMIRTIRAVLPGMIARKDGSIVNMASVASSIKGVPNRFAYGVTKAAVIGLTKAVAADYVGDGIRCNAICPGTVESPSLESRMRAQGDYETARAAFISRQPMGRLGTPEEIADLAVYLAGATYTSGQAYAIDGGWTI

SEQ ID NO: 1513 - DNA, 798 bp, Ralstonia solanacearum GMI1000
  CDS (1)..(798): transl_table=11
atgacggcgcccccgacatccttcccgccgcgcctggccggcaaggtcgcgctggtgaccggcgccacgcagggcatcggcgccgccaccgcgcggctgttcgcgcggcacggcgcgcgcgtgatcgtcaatgcgctggtgcgcgacgccgccgccgaggccttcgccgcgtccatcggccacgacggcaacgtgctgctggtgcaggccgacgtgcgctatcgcgaccaggccgatgccatggtcgcggcgggcgtcgcgcgcttcggcggcatcgacgtgctggtcaacaatgccggcatcaatgtcttctccgatccgctcgcgctgtccgaggcggattgggcgcgctgcctgtcggtcgacctggaaggcgcatggcattgcgcgcgcgccgtgctgccgcacatgctggcgcgcggcgccggcagcatcgtcaacatcgcttcggtgcacgggcataagatcatcccgggggcgtttccgtatccggtggccaagcatggcctgatcgggctcacgcgggcgctgggcatcgagtacgcggcgcgcggcatccgtgtcaattcgatctcgccggggctgatcctcacgccgatcgccgaggccggctttgccgccgcgcccgaccccgaggccgaacgccgccgccaggccgacctgctgccgtgcaagcgcatcggcgagccggaggaggtggcctacaccgcgctgttcctcgcctccgacgaggcgcgcttcatcaacgccgccgacatcctgatcgatggcgctcgctcgcagctgtatcacgaatga

SEQ ID NO: 1514 - protein, 265 aa, Ralstonia solanacearum GMI1000
MTAPPTSFPPRLAGKVALVTGATQGIGAATARLFARHGARVIVNALVRDAAAEAFAASIGHDGNVLLVQADVRYRDQADAMVAAGVARFGGIDVLVNNAGINVFSDPLALSEADWARCLSVDLEGAWHCARAVLPHMLARGAGSIVNIASVHGHKIIPGAFPYPVAKHGLIGLTRALGIEYAARGIRVNSISPGLILTPIAEAGFAAAPDPEAERRRQADLLPCKRIGEPEEVAYTALFLASDEARFINAADILIDGARSQLYHE

SEQ ID NO: 1515 - DNA, 921 bp, Arabidopsis thaliana
  CDS (1)..(921)
atggcggccatagtactgatcagatctatcgtcagaaactttaaacggccagccaccgcagcctcagccgcttactcgacaggtggtggtggcggcggttgtacttgtacgagtaaaaagctagaaggcaaagtagctctcataactggtggtgctagcgggctcggtaaggccacggccagcgagtttctccgccatggtgcccgagtcgtgatcgccgacttagacgcggaaaccgggacaaaaaccgctaaagaactaggctcggaggcagagtttgtgcggtgtgatgtcacggtggaggctgatatcgctggagccgtggaaatgacggtggagcggtatgggaagctagacgtgatgtacaataacgctgggattgttggacctatgactccagcgagcatatcgcagcttgatatgacagaattcgagagagtaatgaggattaatgtttttggtgttgtctccggcatcaaacacgccgctaagtttatgattccggctaggtctggatgcattttgtgcacatcaagcgttgcaggcgtgactggagggttggctccacattcatacacaatctcaaagttcacaactcccggaatagtcaagtcggcagcaagcgagctctgcgaacacggcgtgcgtataaactgtatctcaccgggtacggtggctacaccgctcactctcagttaccttcagaaagtgtttccgaaggtatcggaggagaagctacgcgaaacagtgaaaggaatgggtgagttaaaaggagctgagtgtgaagaagctgacgtggctaaggctgctttgtatttggcttccaacgacggtaaatacgttactggccataacttggtcgtggatggtggcatgactgctttcaaaatagctggttttccttttccttcggattcatga

SEQ ID NO: 1516 - protein, 306 aa, Arabidopsis thaliana
MAAIVLIRSIVRNFKRPATAASAAYSTGGGGGGCTCTSKKLEGKVALITGGASGLGKATASEFLRHGARVVIADLDAETGTKTAKELGSEAEFVRCDVTVEADIAGAVEMTVERYGKLDVMYNNAGIVGPMTPASISQLDMTEFERVMRINVFGVVSGIKHAAKFMIPARSGCILCTSSVAGVTGGLAPHSYTISKFTTPGIVKSAASELCEHGVRINCISPGTVATPLTLSYLQKVFPKVSEEKLRETVKGMGELKGAECEEADVAKAALYLASNDGKYVTGHNLVVDGGMTAFKIAGFPFPSDS

SEQ ID NO: 1517 - DNA, 1282 bp, Arabidopsis thaliana
  CDS (71)..(1102)
atgctagtatgcttcaggttcaatcaccgccccattagattctctctccctctctaaagaccacacctttatgttccctctatatctatataagacgcaaacacagggaccattctcttcaaagacgagaaattataagttaggaaacgacaaagaccgatctatatatatatctcggagcaatatagctagcacaaacatgtttcagattggaaaaaacgcattattcaagaatgtgagcaagaacttccttatcaagggaatatcctcatcctcatcatctcattcaacttcaaggaagctagaaggtaaagtagcactcatcactggaggagcaagtgggattggcaaagcaacagccggaaaattcatcagtcatggagccaaagttatcattgccgatatccaaccgcagattgggcgagaaaccgagcaagaactcggtcccagttgtgcttacttcccatgcgatgtgaccaaagaatcagacattgctaacgcagttgacttcgctgtctcgctccatacaaagctcgacattatgtacaacaatgctggtattccctgcaaaacgcctcctagtatcgttgatcttgatctcaatgttttcgacaaggtaatcaacacaaatgtccgtggagtcatggcaggaatcaaacatgctgctcgtgtgatgatcccgcgtaactctggatccatcatttgtgcagggagtgtcacggggatgatgggcggtttagcccaacatacttacagcgtctcaaaatccgctgttatcggaattgtaagatcaacagcttcagaactatgcaagcacaggatccgggtcaactgcatttctccttttgcgatcacaacatcattcgtgatggatgagatgcgacagatttaccccggtgttgatgactcaaggctgatccagatagtgcagagtacaggagtgttaaatggagaggtttgtgaaccaaccgatgtagctaatgcagcggtgtatctcgcttccgatgattcaaagtatgtaaatgggcataatctggtggtagatggaggattcacaactgtaaagacgttagatttccctgcacctgaccaagtgaagtaacaaaactcataatatacaaagaaaactgttcttgaaacttcaagtgaactagactgcactagactagactagactaggccggtttctattctgtcaacaatcaaatttatagctgcattagcggatgtgaaagctccatggaagctttcttggtatgaaatggaagttaaatcttgagcc

SEQ ID NO: 1518 - protein, 343 aa, Arabidopsis thaliana
MFPLYLYKTQTQGPFSSKTRNYKLGNDKDRSIYISRSNIASTNMFQIGKNALFKNVSKNFLIKGISSSSSSHSTSRKLEGKVALITGGASGIGKATAGKFISHGAKVIIADIQPQIGRETEQELGPSCAYFPCDVTKESDIANAVDFAVSLHTKLDIMYNNAGIPCKTPPSIVDLDLNVFDKVINTNVRGVMAGIKHAARVMIPRNSGSIICAGSVTGMMGGLAQHTYSVSKSAVIGIVRSTASELCKHRIRVNCISPFAITTSFVMDEMRQIYPGVDDSRLIQIVQSTGVLNGEVCEPTDVANAAVYLASDDSKYVNGHNLVVDGGFTTVKTLDFPAPDQVK

SEQ ID NO: 1519 - DNA, 756 bp, Drosophila melanogaster
  CDS (1)..(756)
atgagtctcagcaacaaggtggtgatcgtgacgggagctagcagcggaattggtgccgccatcgcccaagttcttgctcgcgaaggtgccactttggcgctggtgggtcgcaatgtggccaatctggaggccacgaagaagagcctgaagggcacgcaggcagaaatcgtggtggccgatgtgaccaaggatgcggacgcgattgtccagcaaacgttggccaagttcggacgcatcgacgtgcttgtcaacaatgccggcattctgggcaagggtggcctcatcgatctggacatcgaggaattcgacgcggtgctcaataccaatctgcgtggtgtcattctgttgaccaaggcggtgctcccgcacctcctgaagaccaagggagccgtggtcaacgtgagcagctgtgccggcattcgtcccttcgccggagcactgagctatggagtttcgaaggccgccctcgatcagttcaccaagattgtggccctcgaaatggcgcctcagggtgtgcgcgtgaactcggtgaatcccggcttcgtggtgaccaacatccatcggaacattggcatcgtcgacgaggagtacaacggaatgctccagcgggccatcaattcgcatcccatgggccgtgtaggcgacgtcaccgaagtggccgaggcagtggcctttttggccagctccaaggcaagtttcaccaccggcgccctcttccccatcgatggtggcaagcacaatctgacgcctcgttaa

SEQ ID NO: 1520 - protein, 251 aa, Drosophila melanogaster
MSLSNKVVIVTGASSGIGAAIAQVLAREGATLALVGRNVANLEATKKSLKGTQAEIVVADVTKDADAIVQQTLAKFGRIDVLVNNAGILGKGGLIDLDIEEFDAVLNTNLRGVILLTKAVLPHLLKTKGAVVNVSSCAGIRPFAGALSYGVSKAALDQFTKIVALEMAPQGVRVNSVNPGFVVTNIHRNIGIVDEEYNGMLQRAINSHPMGRVGDVTEVAEAVAFLASSKASFTTGALFPIDGGKHNLTPR

SEQ ID NO: 1521 - DNA, 750 bp, Drosophila melanogaster
  CDS (1)..(750)
atgtcagtgggagtactagctggaaaagtagccctggtaacaggtgccggatcaggaattggtcgtgccacctgccgccttttggccagagatggtgccaaagtgatcgccgttgaccgcaatctaaaggcggcccaagaaaccgtacaggaattgggctctgagcgatctgccgccctggaggtggacgtttcctctgcccagagtgttcaattctcggtggccgaggccctaaagaaattccagcaggcacccactattgtggtcaattcggctggaataacccgagatggttatctgctcaagatgcccgaacgggactacgatgacgtatacggggtcaatctgaagggcacctttctggttacccaggcctatgccaaggccatgatcgagcagaaactggaaaacggcaccattgtgaacctctcaagcatcgtggccaagatgaacaacgtgggccaggccaactatgcggccaccaaggcgggcgtgatctccttcacggaggtggcctccaaggagttcggaaagtttggcatccgtgtgaactgcatcctgccaggctacatagacacgcccatggtagcggttgtgcccgattctgtaaagcaggaggtggtacaacgatgccccttgggccgattgggtcagccggaggagatcgccgaggtcattgcctttttggcctccccgcaatcgtcatacgtcaatggggctgccatcgaggtcaccgggggccttaaataa

SEQ ID NO: 1522 - protein, 249 aa, Drosophila melanogaster
MSVGVLAGKVALVTGAGSGIGRATCRLLARDGAKVIAVDRNLKAAQETVQELGSERSAALEVDVSSAQSVQFSVAEALKKFQQAPTIVVNSAGITRDGYLLKMPERDYDDVYGVNLKGTFLVTQAYAKAMIEQKLENGTIVNLSSIVAKMNNVGQANYAATKAGVISFTEVASKEFGKFGIRVNCILPGYIDTPMVAVVPDSVKQEVVQRCPLGRLGQPEEIAEVIAFLASPQSSYVNGAAIEVTGGLK

SEQ ID NO: 1523 - DNA, 777 bp, Methanosarcina acetivorans C2A
  CDS (1)..(777): transl_table=11
atgagccaagcatttaaaataatagaaaacgaattcgaaggaaaagttgctattgtaaccggagcaggaacaggcaatggcgagtctattgctgagagactttatgcagggggagcttctgttgcgcttgttagtcgtcatatcgcaccacttgatgacatatgtaatagaattgattcgtcaggaaaacgcacttttcccatagaagttgacgttcgagatccacacagtgttcaaatagcagtgagctccataatcgaaagattcggaaagattgatattgctgtcaacaatgccggaattacaggaccagcaaacactccacttcaagatcttgatatcgaaatatggcgagatgttatagaaaccgatctaactggtgttttctattgcatgaaatacgaaataccagcaatgcttaagaatggctctggcgctattgtgaacatgtcatctgccaatggacttgtcggcttggctggcatggcagcttatacaacagcaaaacatggcgtaatcgggttaacccgttcagcagctttggaattagcagaatccaatattcgagtatgtgcagttgccccgggttatgttgcaactcccagaatcatagattctggaaaggaagctatggattacatggcagctgcacaccccatgaaacgtcttgctacaagagaagaagtagctgacttggtcgcctatttacttagtgagagagctgcattcataacgggcagtgttcattgcatagatggagggtacacagccgaataa

SEQ ID NO: 1524 - protein, 258 aa, Methanosarcina acetivorans C2A
MSQAFKIIENEFEGKVAIVTGAGTGNGESIAERLYAGGASVALVSRHIAPLDDICNRIDSSGKRTFPIEVDVRDPHSVQIAVSSIIERFGKIDIAVNNAGITGPANTPLQDLDIEIWRDVIETDLTGVFYCMKYEIPAMLKNGSGAIVNMSSANGLVGLAGMAAYTTAKHGVIGLTRSAALELAESNIRVCAVAPGYVATPRIIDSGKEAMDYMAAAHPMKRLATREEVADLVAYLLSERAAFITGSVHCIDGGYTAE

SEQ ID NO: 1525 - DNA, 801 bp, Streptomyces coelicolor A3(2); identical to SEQ ID NO: 1016
  CDS (1)..(801): transl_table=11

SEQ ID NO: 1526 - protein, 266 aa, Streptomyces coelicolor A3(2); identical to SEQ ID NO: 1017

SEQ ID NO: 1527 - DNA, 768 bp, Streptomyces coelicolor A3(2)
  CDS (1)..(768): transl_table=11
atgaccacccagcgcttcaccggcaaaaccgccctcgtcaccggcgcgggctccggcatcggacgggccgtcgccctcgccctggccgccgagggcgcgcacgtcgtcgtcgccgggcgcgcgaggggaccgctcgacgagacggcggccctggtcgagcaggcgggcggcaaggcactggccgtcaccgcggacgtcacccggcgcgaagacgtggacgccctggtgtccgccgcggtggagcacttcggctccctcgacgtggcggtgaacaacgcgggcgtcttccgcggcggggtacccgtcgcggacctgtccgaggaggactggcacacgcagctcgacatcaacgtcaccggcgtgttcctcgccctgcgcgccgaggtccggcacatgcgcgcccagccgggcggcggcacgatcgtgaacatcgcctccaccttcggcgcacacaagcgcagccccggcgccacggcctacgcggcgaccaaggcggccgtctcggccctcacccggggcgccgccctggaccacatcggggacggggtccgcatcaacgccgtcagccccggcgccacggcgacctccatgtccctgcgaccgggcgagacggaggccgggcgggccgagcggatgcggcaggagacgccgctcggccgggtctcggcggtggcggaggtcgcggcggccgtgctgtacctggcgtccgacgacgcggcgtcggtggtggggaccgacctcgtggtggacggcggccagacggcctga

SEQ ID NO: 1528 - protein, 255 aa, Streptomyces coelicolor A3(2)
MTTQRFTGKTALVTGAGSGIGRAVALALAAEGAHVVVAGRARGPLDETAALVEQAGGKALAVTADVTRREDVDALVSAAVEHFGSLDVAVNNAGVFRGGVPVADLSEEDWHTQLDINVTGVFLALRAEVRHMRAQPGGGTIVNIASTFGAHKRSPGATAYAATKAAVSALTRGAALDHIGDGVRINAVSPGATATSMSLRPGETEAGRAERMRQETPLGRVSAVAEVAAAVLYLASDDAASVVGTDLVVDGGQTA

SEQ ID NO: 1529 - DNA, 795 bp, Streptomyces coelicolor A3(2)
  CDS (1)..(795): transl_table=11
atgacgcccgcgccccgttccgccgcctccacacacctgctcgacggacggatcgccctggtcaccggcgcgggcggcggcatcggccgggggatcgcactgcgcttcgccgaggagggcgcggcggtggcggtgcactgccgtacgacggtggagtcggcgcgggaggtggcggaacgcatccgcggccggggcggacgcgccaccgtcctgcgcgccgacctcaccgacgaggacgcctgccgtcgcctggtcggggaggccgccgagtggggcggcggacggctcgacgcgctggtcaacaacgcgggcgtgcagccgctgcgggaactgcccggcatgacggcgaccgagtggcgggcggtggtggacaccaacctgaccggcgtcttcgcgtgcacgcaggccgcggccgccgtcatgcgcgcccaggacggcggcggcacggtcacccacatcgcctccatcgaggcccgcgcccccgctcccgcgcacgcgcactacagcgcctcgaaggcggcggtggtgatgcacgcccggtcggcggcgctggagtacggcccgtggggcgtgcgggtgaactccgtctcccccggcctcgtcgaccgcgagggactcgccgaggcctggccggagggcgtacggcggtggcggcgggcggcaccgacgggacggctcggacgcccggaggacgtgggcgacgcgtgcgtgttcctggcctcgcggctggcgtcctgggtgacgggtcacgacctcgtggtggacggcggggtgacggcccgcccgtcgtggtga

SEQ ID NO: 1530 - protein, 264 aa, Streptomyces coelicolor A3(2)
MTPAPRSAASTHLLDGRIALVTGAGGGIGRGIALRFAEEGAAVAVHCRTTVESAREVAERIRGRGGRATVLRADLTDEDACRRLVGEAAEWGGGRLDALVNNAGVQPLRELPGMTATEWRAVVDTNLTGVFACTQAAAAVMRAQDGGGTVTHIASIEARAPAPAHAHYSASKAAVVMHARSAALEYGPWGVRVNSVSPGLVDREGLAEAWPEGVRRWRRAAPTGRLGRPEDVGDACVFLASRLASWVTGHDLVVDGGVTARPSW

SEQ ID NO: 1531 - DNA, 774 bp, Drosophila melanogaster
  CDS (1)..(774)
atgcccagtttcaaggataaagttataatcgtgaccggagccagttcgggaattggagcgggtacttcggtgctcttggctaaactgggaggcctgctcaccatcgtgggcaggaatttggataagctcaacgagaccgcggagcagatagtggcagctggaggagcgccagcactccaggtggcggcggacataaacagcgagtccgacgtccagggcatcgtctccgccacattggccaagcacggtcgcatcgacgtgctggtgaacaacgccggaatcttggagctaggcagcatcgagaacaccagtctggagcagtttgaccgcgttatgaacaccaacgtccggtcgctctaccagctgacccacctggtcacaccggagctaatcaagaccaagggcaacattgtaaacgtgtctagtgtgaacggcatccgttcctttcccggagtcttagcatacaatgtttccaaggctgccgtggatcagttcaccaggtgcgtggctctggagctagctcccaagggtgtgcgtgtgaactccgtgaatcccggcgtaatcatcaccgagctgcagcgtcgtggtggactggaccaggaagcctacgtcaagttcctcgagcacgccaaggtcacccatgccctgggtcgacccggcgaagtcaaggaggtggctgcggccattgcattcctggccagcgacgaggccagcttcagcaccggtatcagcctgcccgtggacggcggtcgccatgccatgtgccccagataa

SEQ ID NO: 1532 - protein, 257 aa, Drosophila melanogaster
MPSFKDKVIIVTGASSGIGAGTSVLLAKLGGLLTIVGRNLDKLNETAEQIVAAGGAPALQVAADINSESDVQGIVSATLAKHGRIDVLVNNAGILELGSIENTSLEQFDRVMNTNVRSLYQLTHLVTPELIKTKGNIVNVSSVNGIRSFPGVLAYNVSKAAVDQFTRCVALELAPKGVRVNSVNPGVIITELQRRGGLDQEAYVKFLEHAKVTHALGRPGEVKEVAAAIAFLASDEASFSTGISLPVDGGRHAMCPR

SEQ ID NO: 1533 - DNA, 741 bp, Yersinia pestis KIM
  CDS (1)..(741): transl_table=11
atgaatctgaaagggaagaaagccttggtcactgctgccgggcaggggatcggcttcaatacagccacgttgtttgcccgcaaaggcgcagaagtgatcgctagcgatatcaatatcgctgcgttgtccaacataccgggtataacggcagtgtcattggatgtgactgacacgttggctatcaatgatgtggcgcaggcaatcggcccgatagacgtgctgtttaactgtgcgggcgtggtacacagcggcgatattctcacctgtagcgagcaggagtggcagttcgcgctagacctcaacgtcaccgctatgttccatatgatccgtgcctttctacctgggatgatcgcgtgccaacagggttctatcatcaatatgtcttcggtggcttcaagtattaaaggggtaccgaatcgttttgcctatagcacttctaaagccgcggtcattggcctgacgcgttctgttgctgcggattatgtcacgcagggcatccgctgtaatgccatctgccccggaacagttgaatctccttctctgcgtcagcggattgccgtacaggcacacgccgaagggcgcagcgaagctgatgtctttcaggcattcgctgcacgtcaaccgattggccgtatcggcaaagcagaagagatagcgcaattggcactgtatctggcctcggatgccagcgcttacaccaccggcacgatacatattatcgacggaggctggagcaattaa

SEQ ID NO: 1534 - protein, 246 aa, Yersinia pestis KIM
MNLKGKKALVTAAGQGIGFNTATLFARKGAEVIASDINIAALSNIPGITAVSLDVTDTLAINDVAQAIGPIDVLFNCAGVVHSGDILTCSEQEWQFALDLNVTAMFHMIRAFLPGMIACQQGSIINMSSVASSIKGVPNRFAYSTSKAAVIGLTRSVAADYVTQGIRCNAICPGTVESPSLRQRIAVQAHAEGRSEADVFQAFAARQPIGRIGKAEEIAQLALYLASDASAYTTGTIHIIDGGWSN

SEQ ID NO: 1535 - DNA, 780 bp, Leptospira interrogans serovar Lai str. 56601
  CDS (1)..(780): transl_table=11
ttgagggaaatcatgtctaaacagttcgaaggaaaagtagcactcgttaccggagcggcgtctcctcgcggtctcggaagagcgatcgcaaatacaatcgctaaagaaggaggcgacatagtactagtcgaccttaacaaagaacagatagaacaagcggcggctgatgtagccaaagaatttggagtaaaaactttaggactttcttgtaacgtcactaaaccggaggactgcgattctgtcattgccggagtaaaagaaaaatttggaaaactagacttcctcgttaacaatgccggagttctcaaggataatctttttatacgtatgtccgaacaagaatttgattttgttttagacgtaaacttgaaaggcgtttttttgatgactaagtatgcttctaaacttcttcttaaagcagagtctggaaggattgtaaacatctcttccgtttccggtcttactggacaaccgggacaagcaaactattcttcctcaaaggcgggagtgattgcattgacaaaagttgcggcgagagaatttgcaggaagaaatgttctagtcaatgcagtttgtcccggttacgttcaaaccgatatgactgcatctttgccagaagaagttcaaaagaaactgaccgatcctgcttttattcctcttagaagaccggggacacaacaagagattgcaaatgccgtgaagtttttcttaagcgatcaatccaattacattaccggaacttatttaagagttgatggtggtgcagcaatcggtatgtaa

SEQ ID NO: 1536 - protein, 259 aa, Leptospira interrogans serovar Lai str. 56601
MREIMSKQFEGKVALVTGAASPRGLGRAIANTIAKEGGDIVLVDLNKEQIEQAAADVAKEFGVKTLGLSCNVTKPEDCDSVIAGVKEKFGKLDFLVNNAGVLKDNLFIRMSEQEFDFVLDVNLKGVFLMTKYASKLLLKAESGRIVNISSVSGLTGQPGQANYSSSKAGVIALTKVAAREFAGRNVLVNAVCPGYVQTDMTASLPEEVQKKLTDPAFIPLRRPGTQQEIANAVKFFLSDQSNYITGTYLRVDGGAAIGM

SEQ ID NO: 1537 - DNA, 948 bp, Escherichia coli CFT073
  CDS (1)..(948): transl_table=11
ttgcgcgctgacgtaacgcttgaggtgctgcataaagcagcgactaaattgagattttccttaattagtgagctgatccgcagcaatattttgtttatcctgtattttcagagggaatggagtgtaacgctctgtattaacaaggagagcattaaaatgggtaaactcacgggcaagacagcactgattacgggcgcattgcagggaattggcgaaggaattgccagaacttttgcgcgtcatggcgcaaacctaatcttgctggatatctcccctgagatcgaaaagctggcggacgaactgtgtggccgtggtcatcgctgtacggcggttgtcgccgatgtgcgtgacccggcgtcggtagccgcagctattaagcgcgctaaggaaaaagaagggcgcattgatattctggtgaataacgcaggcgtttgtcgtctgggcagtttccttgatatgagcgatgaagatcgcgatttccatattgatatcaatataaaaggcgtatggaacgtcacgaaggcggtgctgccggagatgattgcccgcaaagatggccggattgtgatgatgtcttcagtcactggcgatatggtggcagacccgggcgaaacggcgtacgccttaacgaaagcggcgattgttggcctgactaaatcgctggcggtggagtacgcgcagtctggtattcgcgttaacgccatctgccctggatacgttcgcacgccaatggcggaaagcattgcccgccagtcgaacccggaagatccagaatcggtgctgactgaaatggcgaaagcaatcccgatgcgtcgcctcgccgatccgctggaagtcggcgaactggcggccttcctcgcatcggatgaatccagctatttaaccggtacacagaatgtgattgatggcggcagcacactgccggagacggttagcgtcggcatctga

SEQ ID NO: 1538 - protein, 315 aa, Escherichia coli CFT073
MRADVTLEVLHKAATKLRFSLISELIRSNILFILYFQREWSVTLCINKESIKMGKLTGKTALITGALQGIGEGIARTFARHGANLILLDISPEIEKLADELCGRGHRCTAVVADVRDPASVAAAIKRAKEKEGRIDILVNNAGVCRLGSFLDMSDEDRDFHIDINIKGVWNVTKAVLPEMIARKDGRIVMMSSVTGDMVADPGETAYALTKAAIVGLTKSLAVEYAQSGIRVNAICPGYVRTPMAESIARQSNPEDPESVLTEMAKAIPMRRLADPLEVGELAAFLASDESSYLTGTQNVIDGGSTLPETVSVGI

SEQ ID NO: 1539 - DNA, 747 bp, Bradyrhizobium japonicum USDA 110
  CDS (1)..(747): transl_table=11
atggtgctgctcgagggaaaggttgccgtcatcaccggcgccggctccgggattggagccgcgattgcgcgactgtttgccgtcgagggggcgaaagtcttgctcggtgatctcgccgaaggcggagccgcgcttgcggccgggcttgccgccgatggtcacgcggcgggcttccagcatgtcgacgtcaccgatgaggcctcagttgccgagctgatgcaggcagccgtcacgctgttcggccggctcgacatcctcgtcgccaatgccggcattcccgagcgcaagtcgccaatccacgagctcgatctcgtcgactggcgccgcgtgatcgacgtcgatctcaccggggtggcgatctgcaacaagttcgccgcaggcatcatgcgtgcgaccggtggtggcgcgatcgtcaacatggcgtcgatccttgctcacgtcggtcaggagaacagcaacgcctattcggccgcgaaagccgcggtggtcaatctcacgcgctcagttgcgttgacctatgcgctccagggtattcgcgcgaactgcgtttctccgggctatgtcgatacgccgttgctggccaagttgccggaggcgacccgccaggcgatgctggtgcggcagccgatcgggcgcttggcgcggcctggggagattgctgaggttgtggcctttcttgcgagcgacaaggcctcgatcatcacgggcgcgtgtgtcaatgccgacggcggctacacggcaatctaa

SEQ ID NO: 1540 - protein, 248 aa, Bradyrhizobium japonicum USDA 110
MVLLEGKVAVITGAGSGIGAAIARLFAVEGAKVLLGDLAEGGAALAAGLAADGHAAGFQHVDVTDEASVAELMQAAVTLFGRLDILVANAGIPERKSPIHELDLVDWRRVIDVDLTGVAICNKFAAGIMRATGGGAIVNMASILAHVGQENSNAYSAAKAAVVNLTRSVALTYALQGIRANCVSPGYVDTPLLAKLPEATRQAMLVRQPIGRLARPGEIAEVVAFLASDKASIITGACVNADGGYTAI

SEQ ID NO: 1541 - DNA, 810 bp, Bradyrhizobium japonicum USDA 110
  CDS (1)..(810): transl_table=11
atggcccgatggattccgggttcgcgcaaagaggcgcgccccggaatgacgacaaaaaattcaaaggagaacaagaaaatggcagaccgcctcaagggaaagcgcgccgtcatcacggctgcggcagcaggcatcgggcgcgcatgcgccatcgcattcgcgcgtgaaggcgcgaccgtgatcgccaccgacatcaacgagagcggcatcgcgggccttgccaaggaaggcatcgccgaaaccgcaaagctcgacgtgcgcaacaccgccgacgtcaatgcttttgcaaaacgcgtcggcaagatcgacatcctgctcaatgcggccggcttcgtgcaccacggcaccatcctggaatgctcggaagaggatttcgacttttcgttcgacctcaacgtcaagtcgatgcaccggaccatcagggccttcctgccggacatgctcgcgggcggcggtggcagcatcgtcaacatctcgtcctgcgccgcgctgcggccgcccgccaaccgctatgtctatagcgcgtcgaaggctgcggtgtcgctgctgacccgcgcggtcgcgctcgacttcatcaccaagggcatccgctgcaacagcatctgcccgggcaccgttgagacgccctcgatgctcgaccgcgccgccgcgcaaggaccgcagggcaaggagatgttcatctcccgccagaagatgggccggctcggcaccgccgacgagatcgcctccatggcggtctatctcggcagcgacgagagcgcgttcaccaccggcgtcgacctcgtcgtcgacggcggctacatgctctga

SEQ ID NO: 1542 - protein, 269 aa, Bradyrhizobium japonicum USDA 110
MARWIPGSRKEARPGMTTKNSKENKKMADRLKGKRAVITAAAAGIGRACAIAFAREGATVIATDINESGIAGLAKEGIAETAKLDVRNTADVNAFAKRVGKIDILLNAAGFVHHGTILECSEEDFDFSFDLNVKSMHRTIRAFLPDMLAGGGGSIVNISSCAALRPPANRYVYSASKAAVSLLTRAVALDFITKGIRCNSICPGTVETPSMLDRAAAQGPQGKEMFISRQKMGRLGTADEIASMAVYLGSDESAFTTGVDLVVDGGYML

SEQ ID NO: 1543 - DNA, 750 bp, Clostridium tetani E88
  CDS (1)..(750): transl_table=11
atgaagaataaatttttaaatggaaaagtagcattaataacaggagcttctagaggtattggaagaggaattgcaattgaattagcagataagggagcttgtgttattgtaaattatagaaaagatttaaaaggagcagaagaaacaaaaaagacaatagaagaaagaggtggatattgtagaataattaaatgtgatgtaagttcatatgaagatactaaactaatgattgaaaagataattagagattttgggaaaatagacattcttataaataatgctggtatatccaagattggattgtttatagatatggaggaagaggattgggataatataataaatacaaatttaaagggtgtttttaattgttctagaaatgttctaccttatatgattggtgaaaaaaatggagttataataaatatatcttctatgtggggaagcgttggagcttcttgcgaggtaatttattccgcttcaaagggaggagtagattcctttactaaagctttagcaaaagaagtagggccatccaacataagagtaaatgcaatttcaccaggagttataaacacttcaatgaatgagtggatgagttgtgaggaaaaggatagcttaaaagatgaaattccattatgtagatttggtgaatgtgaagatataggtaaggctgtagtatttttatgtagcgataacgcaaagtacataacaggtcaaatcttaacaatagacggtgggatgatataa

SEQ ID NO: 1544 - protein, 249 aa, Clostridium tetani E88
MKNKFLNGKVALITGASRGIGRGIAIELADKGACVIVNYRKDLKGAEETKKTIEERGGYCRIIKCDVSSYEDTKLMIEKIIRDFGKIDILINNAGISKIGLFIDMEEEDWDNIINTNLKGVFNCSRNVLPYMIGEKNGVIINISSMWGSVGASCEVIYSASKGGVDSFTKALAKEVGPSNIRVNAISPGVINTSMNEWMSCEEKDSLKDEIPLCRFGECEDIGKAVVFLCSDNAKYITGQILTIDGGMI

SEQ ID NO: 1545 - DNA, 747 bp, Bacteroides thetaiotaomicron VPI-5482
  CDS (1)..(747): transl_table=11
atgggattattagacggaaaaacagccattgtaaccggtgccgcccgtggtattggcaaggctatcgctctgaagtttgctgccgaaggtgcaaacattgcatttactgacctggtcattgacgaaaatgcagaaaaaacaagggtagaactggaagcaatgggtgtgaaagccaaaggttatgcttctaacgctgctaactttgaagatactgcaaaggtcgtagaagaaatccataaggacttcggacgtatcgatattctggtgaacaatgccggtatcactcgtgacggtctgatgatgcgtatgagcgaacaacaatgggatatggtaatcaatgtgaacctgaagtctgcatttaacttcatccacgcttgtacacctgttatgatgcgtcagaaagctggtagcattatcaacatggcatctgtagtgggtgttcacggtaatgcgggacaggctaactatgctgcttccaaagccggcatgattgcattggccaagtctatcgcacaagaactgggctctcgtggcatccgtgccaacgccattgctccgggattcatcctgacagatatgactgctgctctttctgacgaagtgagagctgaatgggcaaagaaaattcctttgcgtcgtggcggtactcctgaagatgtggcaaacatcgctaccttcctggcatcagatatgtcttcttacgtatcaggtcaggtgattcaggtagatggtggtatgaatatgtaa

SEQ ID NO: 1546 - protein, 248 aa, Bacteroides thetaiotaomicron VPI-5482
MGLLDGKTAIVTGAARGIGKAIALKFAAEGANIAFTDLVIDENAEKTRVELEAMGVKAKGYASNAANFEDTAKVVEEIHKDFGRIDILVNNAGITRDGLMMRMSEQQWDMVINVNLKSAFNFIHACTPVMMRQKAGSIINMASVVGVHGNAGQANYAASKAGMIALAKSIAQELGSRGIRANAIAPGFILTDMTAALSDEVRAEWAKKIPLRRGGTPEDVANIATFLASDMSSYVSGQVIQVDGGMNM

SEQ ID NO: 1547 - DNA, 765 bp, Enterococcus faecalis V583
  CDS (1)..(765): transl_table=11
atgccaaaagaatttgaaacaaaacgggtgcttgtaaccggtgcagcttcagggattggccaagcacaagcaattgcctttgctgagcaaggtgctgaagttattggcatcgacctagacgaaacggggttaaagcagacagccgcactggttgacccagattctgctaagtcgtttacttattttgtcggtgatgtgtcttctccctcatttgtgcaagccacgatgaaacaaattgtgaaaaacaacggccaaattgatattttattaaatacggcaggtattttagatgattatcgcccttctctagaaacttcagaagctttatgggatcaaattttagcaaccaatttaaaaagtgtctttttagtgaccaatgccatattaccttatttcctccaacaaaaaaaaggagtaatcgttaatatggcatctatcgctggcttagtagctgggggcggcggcgcagcgtacactgcctccaaacacgcaatcatcgggtatacaaaacaactttcctacgattatgccaaattaggcattcgagcaaatgcgattgcgccaggtgccatccaaacacccatgaacgcagctgattttgcaggagaaggtgaaatggctgcttgggtagcacgtgaaacacccgcgggccgttgggcacagccacaagaggtagcaaaactttcattatttctagctagtgatgacgctgattatatccatggcacagttatgaccattgatggtggttggaccatgaaataa

SEQ ID NO: 1548 - protein, 254 aa, Enterococcus faecalis V583
MPKEFETKRVLVTGAASGIGQAQAIAFAEQGAEVIGIDLDETGLKQTAALVDPDSAKSFTYFVGDVSSPSFVQATMKQIVKNNGQIDILLNTAGILDDYRPSLETSEALWDQILATNLKSVFLVTNAILPYFLQQKKGVIVNMASIAGLVAGGGGAAYTASKHAIIGYTKQLSYDYAKLGIRANAIAPGAIQTPMNAADFAGEGEMAAWVARETPAGRWAQPQEVAKLSLFLASDDADYIHGTVMTIDGGWTMK

SEQ ID NO: 1549 - DNA, 831 bp, Streptomyces avermitilis MA-4680
  CDS (1)..(831): transl_table=11
atgaccccgcgactgtccggcaagaccgctgtcatcacgggcgccgcccgcggtctgggacgcgccaccgcggtggcgttcgcccgcgagggtgccgacctgatgctgctcgacctggcggcggacctgccgggcgtcccctacccgctgggctccgagagccagctggcccacaccgccgagttgtgccgcgagcaaggcgtcgccgcctcgacggcccggctcgacgtgcgtgacctcgacgcggtggaggccgcgatggccaccacccgcgagcggttcggacggatcgacgtactcgtcaacaacgccgggatcgccgccccttcgggcaaggccgcccatgagatcgacgagcgtgagtggcagctgatgatcgacgtcgacctctccggagcctggcggaccatccgcgcggtaggcggtcacatggccgagcagcgctcgggcagcatcatcaacatcgcctccaccgcgggcctggtgggctaccgccacttcgccggctacgtggccgccaagcacggcctggtcggtctgaccaaggccgtcgcgctcgactacgcaccgctcaaggtgcgggtgaacgccctctgccccggctcggtccgggacgactcgcaggtcgagggccggatgctgtccgaaatcgcgcgttgcctggacgtgccggtggccgagcacgaggagaccttcgtgcaggcccagccgatgaactccctgatcgagcccgaggacatcgcgtcggcagccgtgtggctggcctccgacgagtcccgccaggtcaccggcagcgtcctcgcggtggacggcggcttcaccgcccgttag

SEQ ID NO: 1550 - protein, 276 aa, Streptomyces avermitilis MA-4680
MTPRLSGKTAVITGAARGLGRATAVAFAREGADLMLLDLAADLPGVPYPLGSESQLAHTAELCREQGVAASTARLDVRDLDAVEAAMATTRERFGRIDVLVNNAGIAAPSGKAAHEIDEREWQLMIDVDLSGAWRTIRAVGGHMAEQRSGSIINIASTAGLVGYRHFAGYVAAKHGLVGLTKAVALDYAPLKVRVNALCPGSVRDDSQVEGRMLSEIARCLDVPVAEHEETFVQAQPMNSLIEPEDIASAAVWLASDESRQVTGSVLAVDGGFTAR

SEQ ID NO: 1551 - DNA, 765 bp, Streptomyces rochei
  CDS (1)..(765): transl_table=11
atgggtacgctggcaggcaagacggccctggtcacaggggcgggacggggcataggccggggcatcgcccgtcgcctggcggcggacggcgcgctggtcgccgtccactaccgggccgacgagaccgcggcacgcagcaccgtcgcgatgatcacggacagcggtggtcgcgccgtcatggtgcacgccccgctcggcgtgcccgacgacgcgcggcacctgtacgagcgattcgacgcggcgctgagggagcagggcgcggaaccggccctcgacatcctggtcaacaacgcggggaccaacacacggggctcggtgtccgatgtgacgccgccggacttcgacgagctgatggccctgcacgccaaggcgccgcttttcctcgtccagcacgcgctgggccggctgcgcgacggcggacggatcgtcaacatcagttccgccgcgaccagggtggcccttcccgagtccatcgcctactgcatggcgaaggcggccgtcgaggccatgactcgcgcgctggccaaggacctgggccggcgcggcatcacggtgaacgccgtggcgcccggattcgtgaagacggacatgaacgccggacgctgggccacacccgagggcgaggccgcgcacgcggccctctcggtcttccggcgcatgggagagaccgcggacatcgccgacatcgtcgccttcctcgcctcggacgactcccggtggatcaccggtcagtgcctggacgcctcgggcggcgggggcctgtag

SEQ ID NO: 1552 - protein, 254 aa, Streptomyces rochei
MGTLAGKTALVTGAGRGIGRGIARRLAADGALVAVHYRADETAARSTVAMITDSGGRAVMVHAPLGVPDDARHLYERFDAALREQGAEPALDILVNNAGTNTRGSVSDVTPPDFDELMALHAKAPLFLVQHALGRLRDGGRIVNISSAATRVALPESIAYCMAKAAVEAMTRALAKDLGRRGITVNAVAPGFVKTDMNAGRWATPEGEAAHAALSVFRRMGETADIADIVAFLASDDSRWITGQCLDASGGGGL

SEQ ID NO: 1553 - DNA, 753 bp, Bordetella parapertussis 12822
  CDS (1)..(753): transl_table=11
ttgttcgatttgagcggaaagaccgccctcgtcaccggggcaagccgtggcatcggccagaatgtcgcgctgtgcctggcgcaggcgggcgcgaacgtcgtgctgtggggacgcgaccaggcggaactggaacagacgcgcgtacggatcgacgaatacggcgtccagtccaccatcgacgccttcgacattaccgaggccgaatcggtgcggcgcgccacggcccaggccatcgagcgtttcggccacctggacgtgctggtcgtcaacgccggcgtcaatgtgctgcgccccttcctggactggaccccgcagcaatgggaccacatgatcggcgtgaacctggtcggcgcgatgcacacgctgcaggccgtcggccggcacatgaccgagcgcaagcagggcagcatcatcaccatgtcgtccatctacagccatgtgggcgcgcccgacaacagcttctattgcctcaccaagggcggcttgctgcaactgacgaaaagcctggcgatggaatgggcccgccacaaggtgcgcgtcaacgcgatctgcccgggctggatcgagaccgacctgaccgcgccgtacatgcaggacgcacaggtgcgcgcggccgggctgaaacagattcccttgcgccgcttcggccagcccgccgatatcggtccgatcgccgtctacctggcctcggacgaggcgcaatggacgaccggccagagtttcgtggtcgacggcgggcagatcgcccgctga

SEQ ID NO: 1554 - protein, 250 aa, Bordetella parapertussis 12822
MFDLSGKTALVTGASRGIGQNVALCLAQAGANVVLWGRDQAELEQTRVRIDEYGVQSTIDAFDITEAESVRRATAQAIERFGHLDVLVVNAGVNVLRPFLDWTPQQWDHMIGVNLVGAMHTLQAVGRHMTERKQGSIITMSSIYSHVGAPDNSFYCLTKGGLLQLTKSLAMEWARHKVRVNAICPGWIETDLTAPYMQDAQVRAAGLKQIPLRRFGQPADIGPIAVYLASDEAQWTTGQSFVVDGGQIAR

SEQ ID NO: 1555 - DNA, 789 bp, Bordetella parapertussis 12822
  CDS (1)..(789): transl_table=11
atggcaggccgcaccgattgcgcgccggcggctggcaggctggcggggcgggtcgccctgatcaccggcgcggccggcggcataggcagcgccgccgcgctgcgcttcgcggccgaaggcgccgcgctggcgctgctggatcggcgccccgacgccatcgagcaactggccggccggatctgcggccagggcgggcaggcgatcggcgtggccgccgacgtgaccgacgacgacagcgtgcgccaggccgtacggcgggcagtcgagcatttcggcaggatcgatacgctgttcaactgcgccggcggatcggtggcgggcgatacggcggtggacaaggtggacctggcgctgtggaaccgcaccctgcgcctggacctggacagcaccatgctgtgctgccgccacgccgtgccggcgattgtgcgcgccggcggcggcgcggtcgtcaacatgtcgtccggggccggcctgcgcggcagcttcggcgggcatgcctacacggccgccaagggcgcggtgattgccctgacccgcgcgctggccgccgaatacgcgccgcatggagtgcgggtcaacgccatctgcgcgggccgcatccgcaccgaacgcatactgcgcaacctggacgccggcgcaccggcgcaagccggcgcggcgcaacgctatccgtgccgcgagggcgacccgatcgacattgcccacatcgcgctgttcctggccagccacgagtcgcgcatgatcaccggcgaggccatcgccgccaatggcgggtactcggcgttctga

SEQ ID NO: 1556 - protein, 262 aa, Bordetella parapertussis 12822
MAGRTDCAPAAGRLAGRVALITGAAGGIGSAAALRFAAEGAALALLDRRPDAIEQLAGRICGQGGQAIGVAADVTDDDSVRQAVRRAVEHFGRIDTLFNCAGGSVAGDTAVDKVDLALWNRTLRLDLDSTMLCCRHAVPAIVRAGGGAVVNMSSGAGLRGSFGGHAYTAAKGAVIALTRALAAEYAPHGVRVNAICAGRIRTERILRNLDAGAPAQAGAAQRYPCREGDPIDIAHIALFLASHESRMITGEAIAANGGYSAF

SEQ ID NO: 1557 - DNA, 753 bp, Bordetella bronchiseptica RB50
  CDS (1)..(753): transl_table=11
ttgttcgatttgagcggaaagaccgccctcgtcaccggggcaagccgtggcatcggccagaatgtcgcgctgtgcctggcgcaggcgggcgcgaacgtcgtgctgtggggacgcgaccaggcggaactggaacagactcgcgtacggatcgacgaatacggcgtccagtccaccatcgacgccttcgacattaccgaggccgaatcggtgcggcgcgccacggcccaggccatcgagcgtttcggccacctggacgtgctggtcgtcaacgccggcgtcaatgtgctgcgccccttcctggactggaccccgcagcaatgggaccacatgatcggcgtgaacctggtcggcgcgatgcacacgctgcaggccgtcggccggcacatgaccgagcgcaagcagggcagcatcatcaccatgtcgtccatctacagccatgtgggcgcgcccgacaacagcgtctattgcctcaccaagggcggcttgctgcaactgacgaaaagcctggcgatggaatgggcccgccacaaggtgcgcgtcaacgcgatctgcccgggctggatcgagaccgacctgaccgcgccgtacatgcaggacgaacaggtgcgcgcggccgggctgaaacagattcccttgcgccgcttcggccagcccgccgatatcggtccgatcgccgtctacctggcctcggacgaggcgcaatggacgaccggccagagtttcgtggtcgacggcgggcagatcgcccgctga

SEQ ID NO: 1558 - protein, 250 aa, Bordetella bronchiseptica RB50
MFDLSGKTALVTGASRGIGQNVALCLAQAGANVVLWGRDQAELEQTRVRIDEYGVQSTIDAFDITEAESVRRATAQAIERFGHLDVLVVNAGVNVLRPFLDWTPQQWDHMIGVNLVGAMHTLQAVGRHMTERKQGSIITMSSIYSHVGAPDNSVYCLTKGGLLQLTKSLAMEWARHKVRVNAICPGWIETDLTAPYMQDEQVRAAGLKQIPLRRFGQPADIGPIAVYLASDEAQWTTGQSFVVDGGQIAR

SEQ ID NO: 1559 - DNA, 789 bp, Bordetella bronchiseptica RB50
  CDS (1)..(789): transl_table=11
atggcaggccgcaccgattgcgcgccggcggccggcaggctggcggggcgggtcgccctgatcaccggcgcggccggcggcataggcagcgccgccgcgctgcgcttcgcggccgaaggcgccgcgctggcgctgctggatcggcgccccgacgccatcgagcaactggccggccggatctgcggccagggcgggcaggcgataggcgtggccgccgacgtgaccgacgacgacagcgtgcgccaggccgtacggcgggcagtcgagcatttcggcaggatcgatacgctgttcaactgcgccggcggatcggtggcgggcgatacggcggtggacaaggtggagctggcgctgtggaaccgcaccctgcgcctggacctggacggcaccatgctgtgctgccgccacgccgtgccggcgattgtgcgcgccggcggcggcgcggtcgtcaacatgtcgtccggggccggcctgcgcggcagcttcggcgggcatgcctacacggccgccaagggcgcggtgattgccctgacccgcgcgctggccgccgaatacgcgccgcatggagtgcgggtcaacgccatctgcgcgggccgcatccgcaccgaacgcatactgcgcaacctggacgccggcgcaccggcgcaagccggcgcggcgcaacgctatccatgccgcgagggcgacccgatcgacatcgcccacatcgcgctgttcctggccagccacgagtcgcgcatgatcaccggcgaggccatcgccgccaatggcgggtactcggcgttctga

SEQ ID NO: 1560 - protein, 262 aa, Bordetella bronchiseptica RB50
MAGRTDCAPAAGRLAGRVALITGAAGGIGSAAALRFAAEGAALALLDRRPDAIEQLAGRICGQGGQAIGVAADVTDDDSVRQAVRRAVEHFGRIDTLFNCAGGSVAGDTAVDKVELALWNRTLRLDLDGTMLCCRHAVPAIVRAGGGAVVNMSSGAGLRGSFGGHAYTAAKGAVIALTRALAAEYAPHGVRVNAICAGRIRTERILRNLDAGAPAQAGAAQRYPCREGDPIDIAHIALFLASHESRMITGEAIAANGGYSAF

SEQ ID NO: 1561 - DNA, 738 bp, Bordetella bronchiseptica RB50
  CDS (1)..(738): transl_table=11
atgagcggaaaattggcatatgtgacgggcggcatgggcggtatcggtaccgcgatctgccagcggttggccaaggacggcttccgggtggtggcggggtgcggccccagccgcaactatcagcagtggctcgacgagcaggcggcccagggctatacgttctacgcatcggtgggcaacgtgtccgactgggagtccaccgtcaaggctttcgagcgcgtcacggccgacctgggccaggtcgacgtgctggtcaacaacgccggcatcacgcgtgacggcctgttccgcaagatgtcggtggacgactggcgcgcggtgatcgacaccaacctgaacagcctgttcaacgtgaccaagcaggtgctcgacgggatggtggagcgccaatgggggcgcatcgtcaacatcagctcggtcaacggccagaaagggcagttcggccagaccaactactcgaccgccaaggcgggcatccatggtttcaccatggccctggcccaggaggtcgccagcaagggcattaccgtcaacaccatttcgccgggctacatcgggaccgacatggtgcgggccatccgtcccgacgtgctggagaaaatcgtcgcgacgattccggtgcgccggctgggtacgcccgaggaaatcgcgtccatgacgtcctggctggcgtcggacgagtcgggttttgccacgggcgcggatttctcgctcaatggcggcctgcacatgggttga

SEQ ID NO: 1562 - protein, 245 aa, Bordetella bronchiseptica RB50
MSGKLAYVTGGMGGIGTAICQRLAKDGFRVVAGCGPSRNYQQWLDEQAAQGYTFYASVGNVSDWESTVKAFERVTADLGQVDVLVNNAGITRDGLFRKMSVDDWRAVIDTNLNSLFNVTKQVLDGMVERQWGRIVNISSVNGQKGQFGQTNYSTAKAGIHGFTMALAQEVASKGITVNTISPGYIGTDMVRAIRPDVLEKIVATIPVRRLGTPEEIASMTSWLASDESGFATGADFSLNGGLHMG

SEQ ID NO: 1563 - DNA, 741 bp, Chromobacterium violaceum ATCC 12472
  CDS (1)..(741): transl_table=11
atgcgtttgaaagggaaagtatccatcatcaccggctcggccagcggcatcggcaaggcgacggcggagaagttcgtcaaggagggcgccatcgtcgcggtgtgcgacctgaacccggacgcggtcaaaaccgtcgtcgacgaactgaaagccctgggcggagaagcttacggctacaaggtggatgtgactgacaagggccagatcgccgagatggtggccgacctgaagaaccgttgcggccgcatcgacgtgctggtcaacaacgccggcatcgtccaggatgcccagctgatcaagatgagcgaagaccagttcgacaaggtgatcgacatcaacctgaagggcgtttacaactgtgcccgcgccgtggtggatactatggtggagcagggcggcggcgtgatcctcaacgcctcgtcggtggtgggcgtttacggcaatttcggccagaccaactacgcggcggccaagttcggcgtgatcggcttcgtcaagacctgggccaaggaattgggcaagaagggcatccgcgccaacgcggtgtgtccgggcttcgtcgccacccccatcctgaaggccatgccggaaaaagtgctgcaggcgatggaagacaaggtgccgatgcgccggatggccgatccggccgagatcgccaacgtctacgccttcctggcgtcggacgaggccagctacatcaacggcgccgccatcgaggtgaccggcggtttgacgctgtaa

SEQ ID NO: 1564 - protein, 246 aa, Chromobacterium violaceum ATCC 12472
MRLKGKVSIITGSASGIGKATAEKFVKEGAIVAVCDLNPDAVKTVVDELKALGGEAYGYKVDVTDKGQIAEMVADLKNRCGRIDVLVNNAGIVQDAQLIKMSEDQFDKVIDINLKGVYNCARAVVDTMVEQGGGVILNASSVVGVYGNFGQTNYAAAKFGVIGFVKTWAKELGKKGIRANAVCPGFVATPILKAMPEKVLQAMEDKVPMRRMADPAEIANVYAFLASDEASYINGAAIEVTGGLTL

SEQ ID NO: 1565 - DNA, 735 bp, Rhodopseudomonas palustris CGA009
  CDS (1)..(735): transl_table=11
atgtccgaccggctgacaggcaagcgcgcgttcgtcaccgcggcagcggcggggatcgggcgggcatcggcgatcgcttttgctcgcgagggcgccgaagtattcgccaccgatatcgatgaggccgggcttgcctcgctcgccgagcacggcattgcgcggaccgccaagctcgacgtccgcgacaccgccgcggtcgaagcgatcgcccgcgaggccggcaccgtcgacatcctgctcaacgctgccggcttcgtgcatcatggcacggtgctcgactgctcggatacggattgggacttttcgttcgacctcaacgtcaagtcgatgcaccgcaccatccgcgcgtttcttcctgcaatgctggaagccggccgcggctcgatcgtcaacatctcgtcggccgccggcgtgttcaaggcggcaccgaaccgctacgtctatggcgccaccaaagccgcagtggcggcgctgacccgcgcggtcgcggtggacttcatcactcgcggcatccgctgcaacgcgatctgcccggggacgatcgaaaccccgtcgatgctcggccgtgccgccgcgctcgggccgcagggccgcgagatgttcgtgtcacgccagccgatgggccgtctcggcaacgccgaggagatcgccgcgctggcggtgtacctcgcctccgacgaaagcgccttcaccaccggcgtcgcgcacatcatcgacggcggctggacgttgtaa

SEQ ID NO: 1566 - protein, 244 aa, Rhodopseudomonas palustris CGA009
MSDRLTGKRAFVTAAAAGIGRASAIAFAREGAEVFATDIDEAGLASLAEHGIARTAKLDVRDTAAVEAIAREAGTVDILLNAAGFVHHGTVLDCSDTDWDFSFDLNVKSMHRTIRAFLPAMLEAGRGSIVNISSAAGVFKAAPNRYVYGATKAAVAALTRAVAVDFITRGIRCNAICPGTIETPSMLGRAAALGPQGREMFVSRQPMGRLGNAEEIAALAVYLASDESAFTTGVAHIIDGGWTL

SEQ ID NO: 1567 - DNA, 750 bp, Mycobacterium avium subsp. paratuberculosis K-10
  CDS (1)..(750): transl_table=11
atggtacaggtgtccttgctcagtggtcagaccgcggtcatcacaggtggcgcacaaggtttggggttcgcgatcgccgaacggttcgtcgccgaaggggcgcgggtcgtcctcggcgacgtcaatctggaggcgacgcaaaccgcggccaaacagctgggcggtgaccaggtggcgctggccgtgcgctgcgacgtcaccaagtcgtccgaggtcgaaacgctgatccagaccgccgtcgagcggttcggcggcctggacatcatggtcaacaacgccgggatcacccgggacgccaccatgcgcaagatgaccgaggagcagttcgatcaggtcatcgccgtgcacttgaagggcacctggaacggcacccgattggcggcggcgatcatgcgggaaaacaagcgcggcgccatcatcaacatgtcgtcggtgtcgggcaaggtcggcatggtcggccagaccaactactcggcggccaaggccggcatcgtgggcatgaccaaggcggccgccaaggagctggcctacctgggtgtgcgggtgaacgcgatcgcccccggtttgatccgctcggcgatgacagaggccatgccgcaacgcatttgggactccaaggtggccgaggtgtcgatgggccgggccggcgagcccagcgaggtcgccagcgtggcgctgtttttggcctccgacatgtcgtcgtacatgaccggcaccgtcatggagatcacgggcggccggcacctgtga

SEQ ID NO: 1568 - protein, 249 aa, Mycobacterium avium subsp. paratuberculosis K-10
MVQVSLLSGQTAVITGGAQGLGFAIAERFVAEGARVVLGDVNLEATQTAAKQLGGDQVALAVRCDVTKSSEVETLIQTAVERFGGLDIMVNNAGITRDATMRKMTEEQFDQVIAVHLKGTWNGTRLAAAIMRENKRGAIINMSSVSGKVGMVGQTNYSAAKAGIVGMTKAAAKELAYLGVRVNAIAPGLIRSAMTEAMPQRIWDSKVAEVSMGRAGEPSEVASVALFLASDMSSYMTGTVMEITGGRHL

SEQ ID NO: 1569 - DNA, 795 bp, Bacillus cereus ATCC 10987
  CDS (1)..(795): transl_table=11
atggggaaattagatggtaaggttgcttttgttacaggagctgcgatggggaacggagctggaattgctcatgtatttgcagagctaggggcgaaagtattacttgttgatatttcagagacagttcatgagacagccaaaaatattgtaagtaaagggttagatgctgcaagttatgtagtcgatgtagctgatatggatgctgttaaagaagtagcgaaagatgcatatgagaagtacggaaagattgatgtgttagtaaataacgccggtgttattcgacttgcaaattttttagatatgtcagatgaaatgcgtgattttcaatttcaagtaaatattaatggggtatggaatttttctaaagcggtattgccatatatggttgagaaaaattacggaaagattgtgaatatgtcttctgtaacaggaacattggttgctgatgaaggtgaaactgcatatgcaacgacgaaagcagcaatttggggatttacaaaagcgttagcacgagaagttgcaaaacatcatattaccgtaaatgcaatttgtccaggttacattatgacaccaatggcagagcaaatagcaaatgaatctgatccaaatgagccgagtaatgtaatcgatggaattgcttcaggtgttcctttaggacgtttagggaaaattgaagaagtaggtcagttagcaggttttttagcatccgatgaatcaagctacataacaggtacacacattgtcattgatggtggtagtacattgccagaaacggtttcagtgggtgtaaagtaa

SEQ ID NO: 1570 - protein, 264 aa, Bacillus cereus ATCC 10987
MGKLDGKVAFVTGAAMGNGAGIAHVFAELGAKVLLVDISETVHETAKNIVSKGLDAASYVVDVADMDAVKEVAKDAYEKYGKIDVLVNNAGVIRLANFLDMSDEMRDFQFQVNINGVWNFSKAVLPYMVEKNYGKIVNMSSVTGTLVADEGETAYATTKAAIWGFTKALAREVAKHHITVNAICPGYIMTPMAEQIANESDPNEPSNVIDGIASGVPLGRLGKIEEVGQLAGFLASDESSYITGTHIVIDGGSTLPETVSVGVK

SEQ ID NO: 1571 - DNA, 871 bp, Strongylocentrotus purpuratus
  CDS (119)..(871)
atgaatatcaaacaggtatacactaagtgcatgataattcgctttgagtgtatgaggatacaattcgggatcctacaaaaataggtgactttgcacaaaagaaaggagtatcataataatggaaggaaaagttgctctcattacaggatccagttcgggtataggtgctggtatcgcagagcgtttcgctgagattggttgccgccttgctctcactggaagagacgcagaaaaactgaaagatgtcgggaaatcatgctgtgaacgtgggctcagcgaaaaagagatcttagttattgctgccgatttgactgaagatgaagacttggaaaggatattttcaaagacaatagaaaagtttggacgcctcgatatccttataaataacgcaggtcgtccagctaaaggaagattccatgacctgcagatgacattctttgatgacgtcatgaggctgaatctgaggtcagctatttacctttccaagctggccatcccatatttgaaagaatcaaaaggctgcgtcgtgaacatgtcgagtgttgcttccaaaactacatgcgattacaaccctacatattcaatatcgaaggtcgctcttgatcagttcacaaaaagccttgcagttgaactgggaccgtacggcgtaagagttaattctctcaatcctggcgtcatcttgactcctctctatcgaaacctcgggaagagcgacgctcaagtgatcacgtggtccaagtcaatgcatcccattggtcgccacgggaccgtggatgaggttgtcaaggcaaccgaatatttggtgtcggatgcttcaagatgtgtgactggtacgctgctttctattgatggaggacgctttctaatgtga

SEQ ID NO: 1572 - protein, 250 aa, Strongylocentrotus purpuratus
MEGKVALITGSSSGIGAGIAERFAEIGCRLALTGRDAEKLKDVGKSCCERGLSEKEILVIAADLTEDEDLERIFSKTIEKFGRLDILINNAGRPAKGRFHDLQMTFFDDVMRLNLRSAIYLSKLAIPYLKESKGCVVNMSSVASKTTCDYNPTYSISKVALDQFTKSLAVELGPYGVRVNSLNPGVILTPLYRNLGKSDAQVITWSKSMHPIGRHGTVDEVVKATEYLVSDASRCVTGTLLSIDGGRFLM

SEQ ID NO: 1573 - DNA, 833 bp, Strongylocentrotus purpuratus
  CDS (81)..(833)
aggtatacactaagtgcataatttgctttgagtgtaaaaataggtgactttgcacaaaagaaaggagtatcatattcataatggaaggaaaagttgctctcattacaggatccagttcgggtataggtgctggtatcgcagagcgtttcgctgagcttggctgccgtcttgctctcaccggaagggacgcagaaaaactgaaagatgtcgggaaatcatgctgtgaacgtgggctcagcgaaaaagagattttacttattgctgccgatttgactgaagatgaagacttagaaaggatattttcaaagacaatagaaaagtttggacgccttgatatccttataaataacgcaggtcgtccagctaaaggaagatttcatgacctgcagatgaccttctttgatgacgtcatgaggctgaatctgagatcagctatttacctttccaagctggccatcccatatttgaaagaatcaaaaggctgcgtcgtgaacatgtcgagtgttgcttccaaaactacatgcgactacaaccctacatattcaatatcgaaggtcgctcttgatcagttcacaaaaagccttgcagttgaactgggaccctacggcgtcagagttaattctctcaatcctggcgtcatcttaactcctctctaccgaaacctcgggaagagcgacgcccaagtgatcacatggtccaagtcaatgcatcccattggtcgccacgggactgtggatgaggtcgtcaaggcaaccgaatatttggtgtcggatacttcaagatgtgtgactggtacgctgctttctattgacggaggacgctttctaatgtga

SEQ ID NO: 1574 - protein, 250 aa, Strongylocentrotus purpuratus
MEGKVALITGSSSGIGAGIAERFAELGCRLALTGRDAEKLKDVGKSCCERGLSEKEILLIAADLTEDEDLERIFSKTIEKFGRLDILINNAGRPAKGRFHDLQMTFFDDVMRLNLRSAIYLSKLAIPYLKESKGCVVNMSSVASKTTCDYNPTYSISKVALDQFTKSLAVELGPYGVRVNSLNPGVILTPLYRNLGKSDAQVITWSKSMHPIGRHGTVDEVVKATEYLVSDTSRCVTGTLLSIDGGRFLM

SEQ ID NO: 1575 - DNA, 768 bp, Drosophila pseudoobscura
  CDS (1)..(768)
atgagtctcagcgaaaaggtggtgatcgtgacgggcgcaagcagcggtattggtgcagccattgcccaggttttggcccgcgagggagcccttctggcgctggtgggtcgcaacgtagctaacctggaggccacccggaagaccctacagcagcaggtgaagggcattcgggcggagatcatagccgcggacgtgaccaaggatgcagcggccattgtccagcagacgatcactcagttcggccgcatcgatgtgctggtaaacaacgccggaatcctgggcaagggcggcctcattgacctggacatcgaggaattcgactcggtgctaaacacgaacctgcgcggcgtcgtcctcctcaccaaggcggtgctgccacatctcctgcagaccaagggagccgtggtcaatgtgagcagctgtgccggtctgcgaccctttgcgggcgctctcagctacggtgtatccaaggcggccctcgaccagttcacccggatcgtggccctcgagatggccccacagggagtgcgcgtcaactcggtgaatcccggctttgtggtgaccaacatccaccagcgcattggcatcgtcgatgaggaatacaacggcatgctgcagcgggctatcgcctcccatcccatgggccgtgttggggacgtgttcgaggtggccgaggccgtagccttcctggccagctccaaggccagcttcaccaccggcgctctcttccccatcgacggcggcaagcacaatctgacgcctcgttaa

SEQ ID NO: 1576 - protein, 255 aa, Drosophila pseudoobscura
MSLSEKVVIVTGASSGIGAAIAQVLAREGALLALVGRNVANLEATRKTLQQQVKGIRAEIIAADVTKDAAAIVQQTITQFGRIDVLVNNAGILGKGGLIDLDIEEFDSVLNTNLRGVVLLTKAVLPHLLQTKGAVVNVSSCAGLRPFAGALSYGVSKAALDQFTRIVALEMAPQGVRVNSVNPGFVVTNIHQRIGIVDEEYNGMLQRAIASHPMGRVGDVFEVAEAVAFLASSKASFTTGALFPIDGGKHNLTPR

SEQ ID NO: 1577 - DNA, 819 bp, Magnaporthe grisea 70-15; identical to SEQ ID NO: 1046
  CDS (1)..(819)

SEQ ID NO: 1578 - protein, 272 aa, Magnaporthe grisea 70-15; identical to SEQ ID NO: 1047

SEQ ID NO: 1579 - DNA, 1119 bp, Nasonia vitripennis
  CDS (234)..(968)
cgcgactcgggcagaatccttggctttattgttataatagtcttatcttgcggtagaaaaataatttatctcgcttacaagtgatgctagtcacatatttgcaaatgcgctggggatcagaatttacagcagcttagaacgctacatttgctgcgagataattgttcaattgaagtcgtagagacttgaagacgacttgttcattacctgttctgcaagcacacggcgcagtcatgaacatcacttttgaaggaaagcggattctcgttaccggtgctggtcaaggcatcggtagagaaacagctctgcgtctatccaaatttggcggcacagttatagccctctcgaaaaccaaagccaatctcgactccctggtaaaggaagatccgaaaatccaaactgtctgcgctgacctgcaggactggaataaagcgcgagcagctgttaagagcgttttgcccatagatttgcttgtcaataatgccgggattgcgatactggatccttttctctctctcaaacccgaggactttgatcaagtcttcaatgtaaatttaaaatcgatcatcaacgtctctcaagttgtggcggagaatatgatccaaagaaaagttgctggaagcatcgtcaatctatcgtcggtggccagtttggtagctgtcaaagatcacgctatttattgctcggcgaaagcagctttggacatgctgacaaaggtcatggctttggaactgggaccacataacattcgcgtcaacaccgtcaacccgacccttgtcatgacggccatgggcaaggccaattggagcgacccggcaaaggcggccacgttgcgagaaaaaattccactggaccgttttgcagagcctcaagaagtggtggattccatttgcttccttcttagtgacaagagcgcaatgaccaccggtgttgggcttacgatcgacggaggatacaccactcattaaaaatacttgtatacgtatttcaagctttacaaaatataagcttactctgcctttgtatattataatcacgcaaacagaatgaataaaaaaagctttttaataattgtacagctagtgattcgaataaaattattgaatccaccgacagcta

SEQ ID NO: 1580 - protein, 244 aa, Nasonia vitripennis
MNITFEGKRILVTGAGQGIGRETALRLSKFGGTVIALSKTKANLDSLVKEDPKIQTVCADLQDWNKARAAVKSVLPIDLLVNNAGIAILDPFLSLKPEDFDQVFNVNLKSIINVSQVVAENMIQRKVAGSIVNLSSVASLVAVKDHAIYCSAKAALDMLTKVMALELGPHNIRVNTVNPTLVMTAMGKANWSDPAKAATLREKIPLDRFAEPQEVVDSICFLLSDKSAMTTGVGLTIDGGYTTH

SEQ ID NO: 1581 - DNA, 815 bp, Nasonia vitripennis
  CDS (1)..(753)
atgacgccgggtcttttagctggaaaactcgctatcgtaacgggcgcgggcagtggcatcggcagggcagtctgcagactgttcgcgcgcgaaggtgccaaggtcatagccgctgatcaaaatgtcaaggccgccgaggaaacagccgacacactcgaaggatcggaacacgtgccggtggaaatcgacgtgaagagcccggagagcatcgagaatgccttcacccacgcgaaaaagcacttcttggtaccgccgaccatcgtcgtcaactcggctggtatcaccagagacaactttttgctgaagctcagcgaggaggacttcgatgctgtactcaatgtcaatctcaaagggacgttcctcataacgcagtatgctgccaaggtaatgataaactccggaatatcggagggcggctcggtgatcaacgtagcttcgatcattggaaaaactggaaacatcggccagagtaactatgcggcgtccaaggctggtgtcgaggctttcacgaaaactgcggcgatggagtttggacagtttggcattcgagtgaacgctgtgctacctggcttcatagaaacaccaatgactgacatggttcctgacaaagtgaagcaaatgtttgttgagaggatcccattgagacgtatgggaaaaccaatcgaagtggcagaattgattctgtttttggcctcggtaaagagctcctacatcaatggggcttccatcgatgtcactggtggtttgcactaagcgaatacttttttcatttttgtacttacgaacttttaataaacaaatttcttacgttactt

SEQ ID NO: 1582 - protein, 250 aa, Nasonia vitripennis
MTPGLLAGKLAIVTGAGSGIGRAVCRLFAREGAKVIAADQNVKAAEETADTLEGSEHVPVEIDVKSPESIENAFTHAKKHFLVPPTIVVNSAGITRDNFLLKLSEEDFDAVLNVNLKGTFLITQYAAKVMINSGISEGGSVINVASIIGKTGNIGQSNYAASKAGVEAFTKTAAMEFGQFGIRVNAVLPGFIETPMTDMVPDKVKQMFVERIPLRRMGKPIEVAELILFLASVKSSYINGASIDVTGGLH

SEQ ID NO: 1583 - DNA, 1152 bp, Aedes aegypti
  CDS (59)..(787)
gttgaggattaaaacaaaaatctcggtataagtagttagtaccttggtagcttttaacatggaattgtgtctcgcggataaaaagattgtagttactggtgcaggccagggtatcggcaatgagttgtgcaaaacgttggtcaaattgggcgctaaggtgattgcggtttcccgatcaccaggtccactggaaacgctgaagacggaatgtccctccgtgcaaattattcaagtggatttgagtgattggagtgccactagaactgcactggagaagatcgaccgcgttgatggccttgttaataatgctggaatcgctatcatcaaaccgtatgacgaactgaccgagaaggactttgatgacacattcaatatcaatatcaaagctgcgttcaacgtgtgtcaaatcctgatcccgaagatgggcccgggtgcaagcattgttaacttgtcctccttggcgggattgaagtccttccaagggcatagcgtatattcgatgacgaaagctgccatcgactccatgacgaaaagcttagctctggaattgggcgagcggcgaattcgagtgaacagcgtcaacccaacggtcatcctaacccggatggggcgcgacaactggagcgatccggctaaggccggtccactgatagcgaaaataccggctggacgtttcggcgaggtcaacgaagtggtggagccgattatattcctactgagtgacaagtctgcgtacatcaatggccactgcatgccactggagggtggttatttggcaggaaattgatgggcattgcatatggacaatagaagcgttgtgttcggatgagcatctatttttttccaaagaagtataaagctcgtagctattgagtgtcttgaaaaaaggaactttgggacctcacaggaaccagaaagagattaaataggtaccaaactatcaggaatcaaaataaaagatatttattccctaaaaaatcgtgccagacatttctataacaatatttttaggccttttttcgagaattatattcgtatttctgtttgcattttgtcattattttctttaagtattaattcagatatttcctttagatgtaactccaaggatttcttcaaaagttcatttagcaattttttacggacttccta

SEQ ID NO: 1584 - protein, 242 aa, Aedes aegypti
MELCLADKKIVVTGAGQGIGNELCKTLVKLGAKVIAVSRSPGPLETLKTECPSVQIIQVDLSDWSATRTALEKIDRVDGLVNNAGIAIIKPYDELTEKDFDDTFNINIKAAFNVCQILIPKMGPGASIVNLSSLAGLKSFQGHSVYSMTKAAIDSMTKSLALELGERRIRVNSVNPTVILTRMGRDNWSDPAKAGPLIAKIPAGRFGEVNEVVEPIIFLLSDKSAYINGHCMPLEGGYLAGN

SEQ ID NO: 1585 - DNA, 1014 bp, Aedes aegypti
  CDS (112)..(951)
aacaaaaatcgcactgtaataccttgtaggcacctaatcggcacttggtgcacacataaccggctaaaaagttgatttaattttgaaaatttgcatctgcgacggcggagaatgttccttcgtgcactagctcggcaatcgaacactgtcgttgggatgtccggtcagagaaatttgtgcagccagattagttcctcccgactgcaggggaaagtcgcagtggtcacagcatccaccgatggcatcggttatgccatcgcggaacgtctgggccaggacggagccaaagtggtcatcagcagtcgcaaagaacagaacgtagccaaggcggtgagtcaactgaccaagagtggcctggacgtcgttggagtcaagtgtcacgtggccaatgccgatgatcggaaggcactgttcgaaaaggctgtggaaaagtacggcggaatcgacattctggtctcgaacgcggcggtcaatcctgaggttggtggcgtgctggacgccagcgaagcagcttgggataaaattttcgaggtgaacgtcaaatgttcgttcctgctggccaaggaagttctaccgtacattcgtcagagaaagaatggaagtattgtatttgtgtcttcgatcgccggattccaaccgttttcattgttgggagcttactcggtgagcaagacggcgcttttcggattgaccaaagccgccagtcaagatttggccgctgaaggcattcgggtgaattgtatcgcaccaggcatcgtgcgaaccaagtttgctgctgcccttcatgaatcggaatcggctcgggacaccgctctggctcaaatacccatgggacgatttgctcagcctccggagattgcaggtgtttgtgccttcctggtatccgacgatgccagctatattacgggagaaactattgtggcatccggtggaatgccttcccgtctctgaacttcttttatttttgtgtatgggacatggaattacgaaataaagttattggtttgttagata

SEQ ID NO: 1586 - protein, 279 aa, Aedes aegypti
MFLRALARQSNTVVGMSGQRNLCSQISSSRLQGKVAVVTASTDGIGYAIAERLGQDGAKVVISSRKEQNVAKAVSQLTKSGLDVVGVKCHVANADDRKALFEKAVEKYGGIDILVSNAAVNPEVGGVLDASEAAWDKIFEVNVKCSFLLAKEVLPYIRQRKNGSIVFVSSIAGFQPFSLLGAYSVSKTALFGLTKAASQDLAAEGIRVNCIAPGIVRTKFAAALHESESARDTALAQIPMGRFAQPPEIAGVCAFLVSDDASYITGETIVASGGMPSRL

SEQ ID NO: 1587 - DNA, 787 bp, Aedes aegypti
  CDS (59)..(787)
gttgaggattaaaacaaaaatctcggtataagtagttagtaccttggtagcttttaacatggaattgtgtctcgcggataaaaagattgtagttactggtgcaggccagggtattggcaatgagttgtgcaaaacgctggtcaaattgggcgctaaggtgattgcggtctcccgatcaccaggtccacttgaagcgctgaagacggaatgtccctccgtgcaaattattcaagtggatttgagtgattggggcgccaccagaactgcactggagaagatcgatcgcgttgatgggcttgtgaataatgccggaatcgctattatcaaaccgtatgatgaactgaccgagaaggacttcgatgacacattcaacatcaatatcaaggctgcgttcaacgtgtgtcaaatcctgatcccgaagatgggcccaggtgcaagcattgttaacttgtcctccttggcagggttgaagtccttccaagggcatagcgtatattcgatgacgaaagctgccatcgactccatgacgaaaagcttagctctggaattgggcgagcggcaaattcgagtgaacagcgtcaacccaacggtcatcctaacgcggatggggcgcgacaactggagcgatccagctaaggccggtccactgatagcgaaaataccggctggacgtttcggcgaggtcaacgaagtggtggagcctattatattcctactgagtgacaagtctgcgtacatcaatggccactgcatgccactggagggtggttatttggcaggaaattga

SEQ ID NO: 1588 - protein, 242 aa, Aedes aegypti
MELCLADKKIVVTGAGQGIGNELCKTLVKLGAKVIAVSRSPGPLEALKTECPSVQIIQVDLSDWGATRTALEKIDRVDGLVNNAGIAIIKPYDELTEKDFDDTFNINIKAAFNVCQILIPKMGPGASIVNLSSLAGLKSFQGHSVYSMTKAAIDSMTKSLALELGERQIRVNSVNPTVILTRMGRDNWSDPAKAGPLIAKIPAGRFGEVNEVVEPIIFLLSDKSAYINGHCMPLEGGYLAGN

SEQ ID NO: 1589 - DNA, 849 bp, Anopheles gambiae str. PEST
  CDS (1)..(849)
atgttccgctcaattgccggcagcgctacactcacgcaaacaatccgcaagacgatggagcgcaatctttgcagcggttccgccattgcagccaagcgtctgacgggcaaagtggccgtcgtaaccgcctctacagagggtatcggttacgccatcgcggaacggttgggccaggaaggagccaaagtggttgtcagcagccgaaagcagcaaaatgttgaccgcgccgtgaacgacctgcgaaccgccgggctcgaggtgtccgggatcaagtgtcacgttgccaacgccaccgaccggaaggcgctgttcgagcatgcggcccaaaagttcggtggcatcgacattctcgtgtcgaacgcggccgtcaatccggaggtgggcggtgtgctggaatgtagtgaatcggcctgggataagattttcgacgtgaacgtaaagtgttcgtatctgctggccaaggaagtgttgccgttcatacgggagcgcaagggtggcagcattgtgttcatttcgtccattgccggctttcaaccgttctcgctgttgggcgcatactccgtcagcaagacggcactgttcggattgacgaaggcagccagccaagagttggcggcggagaacatccgcgtgaactgcattgctccgggtgtggtgcagacgaaatttgccggagcgctacaagaatccgatgccgccaaagaggaaacactgtcccgaattccgatgggacggattgcacaaccgaaggaaatttccggcgtgtgtgcgttcctcgtttcggacgacgcgagctacattaccggtgaaacgattgtagcttccggaggcatggcttcccggttataa

SEQ ID NO: 1590 - protein, 282 aa, Anopheles gambiae str. PEST
MFRSIAGSATLTQTIRKTMERNLCSGSAIAAKRLTGKVAVVTASTEGIGYAIAERLGQEGAKVVVSSRKQQNVDRAVNDLRTAGLEVSGIKCHVANATDRKALFEHAAQKFGGIDILVSNAAVNPEVGGVLECSESAWDKIFDVNVKCSYLLAKEVLPFIRERKGGSIVFISSIAGFQPFSLLGAYSVSKTALFGLTKAASQELAAENIRVNCIAPGVVQTKFAGALQESDAAKEETLSRIPMGRIAQPKEISGVCAFLVSDDASYITGETIVASGGMASRL

SEQ ID NO: 1591 - DNA, 825 bp, Magnaporthe grisea 70-15; identical to SEQ ID NO: 1056
  CDS (1)..(825)

SEQ ID NO: 1592 - protein, 274 aa, Magnaporthe grisea 70-15; identical to SEQ ID NO: 1057

SEQ ID NO: 1593 - DNA, 816 bp, Magnaporthe grisea 70-15
  CDS (1)..(816)
atgcctccaacaaacctcctcgcaggcaagacggccatcatcaccggcggcacaacaggcatcggccgctccatcgccctcgagttcctccggcagggctgcagcgtcgccgtgaaccacctggggctggagagcgaccgcgcacacctcgagtccctcgtcgccgaggccgaggccatctcgtcctcctccgccacggccgggcgcctaacgcacctgccgggcgacgtgcgcgagcccgcgaccggcacggcgctggtgtcgcacgcgctgacggccttgagctcgtcgcggctcgacatatgcgtcagcaacgcgggcatctgcacgtttgccgagttcctggacctggacgcggcgctgtacgacaagacggcgcgcaccaacctcgacgggtgcttctacgtggtgcaggcggcggcgcggcagatggcgaggggccagacgccgccgggagggtccatcatcggcgtctcgtccatctcggccctcgtcggcggcgggctgcagacccactacacgcccaccaaggccggcgtgctgtcgctgatgcagtccaccgccgtcgcgctgggcaggtacggcatcaggtgcaactccctgctgccgggcaccgtgcggacgcagctcaacgaggaggacctgcgcgacgacaagaagagggagtacatggagggcaggataccgctcgggaggaccggggagccaaaggacctggcgggcccggcggtgtttttggcttgtgaagagctcagtggctacgtcacgggcgcgcagctgcttgtcgatggagggttgtttgtgaatcttcaatga

SEQ ID NO: 1594 - protein, 271 aa, Magnaporthe grisea 70-15
MPPTNLLAGKTAIITGGTTGIGRSIALEFLRQGCSVAVNHLGLESDRAHLESLVAEAEAISSSSATAGRLTHLPGDVREPATGTALVSHALTALSSSRLDICVSNAGICTFAEFLDLDAALYDKTARTNLDGCFYVVQAAARQMARGQTPPGGSIIGVSSISALVGGGLQTHYTPTKAGVLSLMQSTAVALGRYGIRCNSLLPGTVRTQLNEEDLRDDKKREYMEGRIPLGRTGEPKDLAGPAVFLACEELSGYVTGAQLLVDGGLFVNLQ

SEQ ID NO: 1595 - DNA, 837 bp, Magnaporthe grisea 70-15
  CDS (1)..(837)
atgacatccactaacggagatccctcagagggtcccaaaaccatctcgacactgcccggacctgaccatgactataagatcacgctcaaggacaaggtcatcgccatctctggcgcaaaccaaggtatcggcctaggcatcgccgaggtctgcctagcgaatgatgccgcttgcatatactccctcgacatttcagaacctggccctgcctttgccgagttatccaaaaagtaccccggccgtttcgcctttcaccactgcgacgtgacggcgtacgaatccgtcgacaaggccctggacgccatcatcgaggccaggggccggctcgacggcatggtggcaaacgcgggcgccaccaaacacaaagcagcgctcgattttacccccgaggagtttgactttttgttcaagctcaacgtagtcggcggctggaactgcgcgacggcggcggctagaaagtttatcaagctgggctgcaagggcagcatcgtctttaccgccagcatgacgtcgtacaggccgaaccgcgccgcccccagcgcgccgtacggtgccaccaaggccgccatccgcaattatacccacacgttggccatggagtggtcgcagtacggcatccgcgtcaacagcatcagccctgggtttgtcaagacggcgctgacgtactatgtcgagacgagcccggattgggacaccaagatgaagtactatgggggcatgccgaggttggcgctgccgcaagagctgggtggcgcatatgtgtacctgttgagtgagcaggcgacgtacacgacaggtattgatatccctattgcgggtattgttggtgcttggtag

SEQ ID NO: 1596 - protein, 278 aa, Magnaporthe grisea 70-15
MTSTNGDPSEGPKTISTLPGPDHDYKITLKDKVIAISGANQGIGLGIAEVCLANDAACIYSLDISEPGPAFAELSKKYPGRFAFHHCDVTAYESVDKALDAIIEARGRLDGMVANAGATKHKAALDFTPEEFDFLFKLNVVGGWNCATAAARKFIKLGCKGSIVFTASMTSYRPNRAAPSAPYGATKAAIRNYTHTLAMEWSQYGIRVNSISPGFVKTALTYYVETSPDWDTKMKYYGGMPRLALPQELGGAYVYLLSEQATYTTGIDIPIAGIVGAW

SEQ ID NO: 1597 - DNA, 861 bp, Magnaporthe grisea 70-15
  CDS (1)..(861)
atgtcctccgatatcccagaccaaccgccctcccgctccctacgcggtcgcgtcgccatcgtcacgggagccggatgtgcaggttccggaatcggcaacggacgagccatctctattctcctagccgacgacggctgcaatgtcgtgtgcctcgacatgaacctcgactgggcgaacaagaccgtggacatggtcaacgccaagcccggtcgcggcacagccatcgccatgcagggagacgtcacgaagcaggccgactgcgacgccgccgtgcagctcgccctggacaagttcggccggctggacgtcctggtcaacaacgtcggcgtgggcggcgcgccgggcacggcggtcgaggtggacttggaaaagtttgcgcagagcctcgaggtcaacgtgtcgagcatggtgcgcatggccaaggctgccatccctgccatggtgcgcgacaaggacggcgtggagatcaagggcagcatagtcaacatgggctcggtcgcgggcatgctcgggggcactccgcaccttttgtaccctaccagcaaaggtgccgtcgtcaacatgacgagggctatggcggctcatcatgccaaggatggtattcgcgtgaactgcgtgtgtccagggatgctatatactccgatgatgtacgctggtgggatgagtgaggaggtcagagaggcccgcaagggcaggagtctgctgggtactgagggtagcggttgggatgcagcatgcgcagtcgtgtttcttgcttcggatcattccagatggatcacgggtgccattttgcctgtggacgcagggaccaccgctgcgacttctataacgctgcccaaaggagcgagcgtcaatggttga

SEQ ID NO: 1598 - protein, 286 aa, Magnaporthe grisea 70-15
MSSDIPDQPPSRSLRGRVAIVTGAGCAGSGIGNGRAISILLADDGCNVVCLDMNLDWANKTVDMVNAKPGRGTAIAMQGDVTKQADCDAAVQLALDKFGRLDVLVNNVGVGGAPGTAVEVDLEKFAQSLEVNVSSMVRMAKAAIPAMVRDKDGVEIKGSIVNMGSVAGMLGGTPHLLYPTSKGAVVNMTRAMAAHHAKDGIRVNCVCPGMLYTPMMYAGGMSEEVREARKGRSLLGTEGSGWDAACAVVFLASDHSRWITGAILPVDAGTTAATSITLPKGASVNG

SEQ ID NO: 1599 - DNA, 1110 bp, Magnaporthe grisea 70-15
  CDS (1)..(1110)
atggttgctgcacgctccgtcatgcgcctggcaggtattccctgccgtgctgccgcctcgatgcccatgccagcagctcgcttcgctcccgttgccaagagagctttcagcaactcgatgcaacagcccaagaagtcggaggtcatcaaggagaccgaggtgcccgtctcggtgtatacacctgactctaagggagttgcttctggcaactcggaccacttcagcattcccgtcaagggcagcagcagagccgctgttgctcaaccaccgaccccggaggaggatgagccggtcgtccctctatcctccaaggtgtactcgcaaatgcctggcaccatgcagaagatgtcggtttacggcaagaccatcatcattaccggaggcgcacgaggactgggcaactacatggctcgtgcctgtgctgaggccggcgccaaagccattatcatcttcgatgccaaccaggagcttggagacgagtctgctgctgagctgcatcagaagaccggtcttcctgtcaccttcttcaaggtcgatgtgcgtgacggagcagccatcaacgccgccgtagatcgggtcgttgagctgttcggcgctcctgacgtcttggtcaactcggccggtattgccgactcgaacatcaaggccgagacctacgatcccgccatgttccgtcgcctgatcgacatcaacctcacaggctcattcctgatgtcccaggctgtcggccgcgccatgatggcagctggcaagcctggttccatcgtcctggtggcttccatgtcgggcagcatcgtcaactacccgcaggagcagtcatgctacaacgcatccaaggctggcgtcatccagctcggcaagtctctcgccgctgagtgggccaagtacgacattcgtgtcaactgcatctcccctgggtacatggacaccgccctcaacaaggttcccgcgctcgacgctcagaagaagatctggaagtcgctcactccccaacagcgactgggcaacgtcgatgacctcaatggtctctgcatcttcctcgcttcggactcaagcggtttcatgaccggctccaacgtcatcattgacggtggctacacatgctactaa

SEQ ID NO: 1600 - protein, 369 aa, Magnaporthe grisea 70-15
MVAARSVMRLAGIPCRAAASMPMPAARFAPVAKRAFSNSMQQPKKSEVIKETEVPVSVYTPDSKGVASGNSDHFSIPVKGSSRAAVAQPPTPEEDEPVVPLSSKVYSQMPGTMQKMSVYGKTIIITGGARGLGNYMARACAEAGAKAIIIFDANQELGDESAAELHQKTGLPVTFFKVDVRDGAAINAAVDRVVELFGAPDVLVNSAGIADSNIKAETYDPAMFRRLIDINLTGSFLMSQAVGRAMMAAGKPGSIVLVASMSGSIVNYPQEQSCYNASKAGVIQLGKSLAAEWAKYDIRVNCISPGYMDTALNKVPALDAQKKIWKSLTPQQRLGNVDDLNGLCIFLASDSSGFMTGSNVIIDGGYTCY

SEQ ID NO: 1601 - DNA, 816 bp, Magnaporthe grisea 70-15
  CDS (1)..(816)
atgtcgtccacgtccagattcagcctcgccggcaaaaccgtcgccatcacaggtggcggacgaggcctgggtatcacacttgcgctcgccgtggtcgaagccggcggccacgtcgcctgtctcgacatcctcccagagcccgccgcagacgagtgggaggccctccagaagacggcagcctccgcacggggcgggccgctcggctgctcataccaccggtgcgacgtgacatccgaggccgagatggaaaagatgatcgactccatcgcggaggaggcggcaggccggggcgccgagctggcggggtgcgtggcctgcgcggggatacaacaaaagacgccggcgctcgactacccggccgccgactttgagcggatcctccgggtcaacgtgacgggggtgttcatcacggccaagtacgcggcgcgggtcatggtccggcgaggggtcaagggtagcatcgtgctgatcggcagcatgagcggcgagattgccaatcgcgggctcacgtgcaccgcctacaacagcagcaaggcggcggtccagcagatgtgcagatctctggctcaagaatggggaaagcatggcatcagggttaacacgttatctcccgggtacatccgaaccgccatgacggacgaactgttggcagcagaaccctcgttggaggagacatggatggcgggcgcccttctgggaaggttaggaacgcccgaggatttcatgagccccgccgtgtttttgctggcggacggcagctctttcatgacgggtagcgacctgcgcgttgatggagggcattgcgcgtcggcttag

SEQ ID NO: 1602 - protein, 271 aa, Magnaporthe grisea 70-15
MSSTSRFSLAGKTVAITGGGRGLGITLALAVVEAGGHVACLDILPEPAADEWEALQKTAASARGGPLGCSYHRCDVTSEAEMEKMIDSIAEEAAGRGAELAGCVACAGIQQKTPALDYPAADFERILRVNVTGVFITAKYAARVMVRRGVKGSIVLIGSMSGEIANRGLTCTAYNSSKAAVQQMCRSLAQEWGKHGIRVNTLSPGYIRTAMTDELLAAEPSLEETWMAGALLGRLGTPEDFMSPAVFLLADGSSFMTGSDLRVDGGHCASA

SEQ ID NO: 1603 - DNA, 852 bp, Gibberella zeae PH-1
  CDS (1)..(852)
atgtctgctcctcgtggtcgtctcgctggcaaaaacgccgtcatcaccggcgctggtggtggcattggtcttgagacctccatcctcttcgcaaaggagggcgcttcaatcctcatgtccgacatctcccagcctgctctcgaaaaggccgccgcaaaggtcaagcagctcgtccccgatgcaccccgcgttgagatcctgaaagtcgacgtctccaaggaatcagaggtccaggccatgatcgagtcactcgactcttggggcggcatcgacgtcctcttcaacaacgccggtatcatgcacgcccaggatgacgacgccgtcaacacccccgagaacatctgggatctcacccaaaacatcaacgtcaagggtgtgtggttcggctgcaagcacgccgttctttctctgcgccgcaacaaaaagtcaaaggcttccatcatcaacaccgcttccgtcgtcgctcttgtcggagctgccacaccccagcttgcctacactgcctccaagggtgctgtcctcgctctcacccgtgagctcgccatggttcacgccagagagggcttccgcttcaacaacctctgccctgcgccgctcaacacacctcttctgcaggactggcttggtgatgaccaggctaagcgacaccgacgtgaggtccacttccccatgggacgattcggcgaggctattgagcaggctcacgccgttgtcttcctggctagtgatgagtctagctttgtcaacggtcatgactttgccgtcgacggtggtatgaccaagggttacgttactgccgagggagctgcgcctcctcctccccagaacaacgccagcaaggattcattgtaa

SEQ ID NO: 1604 - protein, 283 aa, Gibberella zeae PH-1
MSAPRGRLAGKNAVITGAGGGIGLETSILFAKEGASILMSDISQPALEKAAAKVKQLVPDAPRVEILKVDVSKESEVQAMIESLDSWGGIDVLFNNAGIMHAQDDDAVNTPENIWDLTQNINVKGVWFGCKHAVLSLRRNKKSKASIINTASVVALVGAATPQLAYTASKGAVLALTRELAMVHAREGFRFNNLCPAPLNTPLLQDWLGDDQAKRHRREVHFPMGRFGEAIEQAHAVVFLASDESSFVNGHDFAVDGGMTKGYVTAEGAAPPPPQNNASKDSL

SEQ ID NO: 1605 - DNA, 936 bp, Gibberella zeae PH-1
  CDS (1)..(936)
atgcctgctggattccctcctaagcgatcgtattctcgcaccgatgctgccgtccgcgtcgagtaccccgagcatcatgaacttcccgctagcaagcccttaattggtcaaggtggacagttctccaagcccactctagcttccctttcactcgaaggcaagacaattgtcatcactgggggtgcaagaggtcttggtcttgtcatgggtcagggagtagtctattcgggtgctgatctagccatcgtcgatttgaacaaggacgaagcacagtctcaagtaggccaattgacagatgctttcaagagagagaacccaaacagcgagaaaatcccgagagttactgctcactatgcagatgtctctgatccagactcggtaacgaattgtatcaccgagattctcaagattcatcataagatcgatggtttagttacatcggctggattcacagagaatttcgaggcaatcaactatcctatcgatcgtatgcgaaagttatggggcgtcaatgttgacggcacttatctctttgcagttgctgtagccaagcatctcatggagcgtcaggtgcccggtagtattgtggttattggaagcatgtctggtgccattgtcaatgtcccacagccacaagccccatataacgcggcaaaagcagctgttcgacacctggctgcttcccttgcagtggagtgggctcacgctggaatccgtgtcaactgcatctctcctggctatatgttgactgctttgacacagaagatcctcgacgacaaccctgatttagagagaacctggacatccctcattcctcagggtcgcatgggactgcctcaagatttgatgggacccgtaacctttctgctatcagatgcgtcatcttatatgactggggcagatgttcgagttgatggaggatacactgtgacctag

SEQ ID NO: 1606 - protein, 311 aa, Gibberella zeae PH-1
MPAGFPPKRSYSRTDAAVRVEYPEHHELPASKPLIGQGGQFSKPTLASLSLEGKTIVITGGARGLGLVMGQGVVYSGADLAIVDLNKDEAQSQVGQLTDAFKRENPNSEKIPRVTAHYADVSDPDSVTNCITEILKIHHKIDGLVTSAGFTENFEAINYPIDRMRKLWGVNVDGTYLFAVAVAKHLMERQVPGSIVVIGSMSGAIVNVPQPQAPYNAAKAAVRHLAASLAVEWAHAGIRVNCISPGYMLTALTQKILDDNPDLERTWTSLIPQGRMGLPQDLMGPVTFLLSDASSYMTGADVRVDGGYTVT

SEQ ID NO: 1607 - DNA, 882 bp, Gibberella zeae PH-1
  CDS (1)..(882)
atggctcccgctatcgtctcagacatcgagctcccggctaatgtgcccgagtcccaagagacacccgcctcaaaagcatcaacctacaagctcttctcactcgagaacaagaccatcgccatcacaggaggagcccgtggtctgggtattaccctagccctcgccgttgttgaagctggtggcagcgtagcctgtctagacattctcgaagagccatcgcaagcagagtgggcacagctcaacaagatcgccacagccaacaaagtgtccgtgtcttaccggaaatgcgatgtcacagaagagcaatctgtcgagacagcgatgaaggagattgcagccgaagccgataagtttgaagcgccgttctgggggaccattgcttgcgccggtatccagcagcaaattgcagcgcttgactatcctgctgccgactttgaccgaattctacgagtcaatgtgactggtgtctttaatacttgcaagtatgctgcgagagtactacgagaaaacaacagccctggtagcattgtgattattggcagcatgtcgggcaacattgccaatcgaggcctttcatgcacggcatacaactccagtaaagctgcagtccagcaaatgtgccgatcggtcgctcaggaatggggtcaatacggtatccgagtcaacacattgtctcccggctacattcgaactgccatgacagaccagttgctccaagagaaccccgaggtcgagaagacgtggatggctggtgctctgctgggacgtttgggcgcccccgaggacttcaaagcaccagctgtgttcttactatctgagggtgcttcttttgtgacaggaaccgacctgcgggtagatggaggtcactgcgcatctgcatag

SEQ ID NO: 1608 - protein, 293 aa, Gibberella zeae PH-1
MAPAIVSDIELPANVPESQETPASKASTYKLFSLENKTIAITGGARGLGITLALAVVEAGGSVACLDILEEPSQAEWAQLNKIATANKVSVSYRKCDVTEEQSVETAMKEIAAEADKFEAPFWGTIACAGIQQQIAALDYPAADFDRILRVNVTGVFNTCKYAARVLRENNSPGSIVIIGSMSGNIANRGLSCTAYNSSKAAVQQMCRSVAQEWGQYGIRVNTLSPGYIRTAMTDQLLQENPEVEKTWMAGALLGRLGAPEDFKAPAVFLLSEGASFVTGTDLRVDGGHCASA

SEQ ID NO: 1609 - DNA, 807 bp, Gibberella zeae PH-1
  CDS (1)..(807)
atgctcaacctcaagaacaaagtagctctcgtcatcggcctcggtcaaacaaacaccgaaggttggggtatcggtgcagcaagcgccgtaacccttgcacgacaaggagccatcatctttggcggcaacagaacaatcgcttcaactacaaagacaaaagaaaccatccaacaacaaggcggccaatgtgatgtcgtcgccacaaacgctacagactctgcatccgtcaaggctgtcgtcgacgcttgcatggaaaaacatggaaggattgatatcctgttaacaagcgttggtcaatctcaaccaggggatcctgcatccatgacagaagacgtatgggattcgcagatggatattaatctcaaaagtgtgtatcttgcatgtcaccatgttcttcccattatggagtcccaaggaagtggttcaattatttgcatctccagcatcgccggtcttcggtacattggcaagccgcagatagcgtacaacacgagcaaagcggcgatactccagttcgtcaaagctacggcagttatatacgcgccaaagggtatacggctcaacactgttgttccgggactcatggatacgccttacacaaagagtctggcgcagagatttgctacgccagggggttatgatgagttttgtagcatgagggagggacaggttcctatggggaggatgggagatgcgtgggatgttgctaatacggttgtgtttttggcggcggatgagacgaggtatatcacgggacaaaagattgttgttgatggggggatcacttcatctacggggcggacttga

SEQ ID NO: 1610 - protein, 268 aa, Gibberella zeae PH-1
MLNLKNKVALVIGLGQTNTEGWGIGAASAVTLARQGAIIFGGNRTIASTTKTKETIQQQGGQCDVVATNATDSASVKAVVDACMEKHGRIDILLTSVGQSQPGDPASMTEDVWDSQMDINLKSVYLACHHVLPIMESQGSGSIICISSIAGLRYIGKPQIAYNTSKAAILQFVKATAVIYAPKGIRLNTVVPGLMDTPYTKSLAQRFATPGGYDEFCSMREGQVPMGRMGDAWDVANTVVFLAADETRYITGQKIVVDGGITSSTGRT

SEQ ID NO: 1611 - DNA, 1038 bp, Gibberella zeae PH-1
  CDS (1)..(1038)
atgtcttttgcaccttctttgcgtctctgtgtgcggcgtgttgctgcttcacctgctattcgcccctgtttcacttttactgctgcgcgaaagcttcacaatgtccctccccgacaggacaaaccaggaaaatatgcccagaccgatccccagatcgaggttgagtacccagaagatcatgagctccctagcagtgagcctgtctctggcgctggtggccagtatgtgaagccaactctgcccacctttacactcgacggtcatgttggcatcgtcaccggtggtgcacgtgggttgggtcttgttatgggtcaaggaatggtattctctggatccaaccttgctcttgttgatatgaataaggaagaagcagagaagcagactagcttgatcattgaagagttcaaaaaggagaaccctcgagcccgacgaatcccaaaggtcactgcccattatgctgatgtatctgatcctgaatctgtcgaggcttgtgtagccgaggttgttaaggagcacggaaagatcgacaacctggtcacctcagctggcttcacggagaacttcgaagccgttaactaccccatcgaccgtctccgtaagctttgggctgttaacgttgacggtacatatctctttgcaacatcagtcgccaggcacttgatgcaaagaaaggctcctggtagcatcgtcatgattggtagcatgtccggatccattgtcaacgttcctcagcctcaggctccctataatgccgccaaagccggtgtgcgccatctcgctgcttccttggccgtcgaatgggctcaggcaaacatccgagtcaactgcatctctcccggttacatgttgactgcactcactcagaagattcttgacgacaacccggatctcaaggccaagtggacttcccttatcccccagggcaaaatgggacaaccacaggacctcatggggcccgtggcattcctcctatcagatgcttcttcgtatgtgactggtgccgacatccgagtcgatggcggctacaccgttacctag

SEQ ID NO: 1612 - protein, 345 aa, Gibberella zeae PH-1
MSFAPSLRLCVRRVAASPAIRPCFTFTAARKLHNVPPRQDKPGKYAQTDPQIEVEYPEDHELPSSEPVSGAGGQYVKPTLPTFTLDGHVGIVTGGARGLGLVMGQGMVFSGSNLALVDMNKEEAEKQTSLIIEEFKKENPRARRIPKVTAHYADVSDPESVEACVAEVVKEHGKIDNLVTSAGFTENFEAVNYPIDRLRKLWAVNVDGTYLFATSVARHLMQRKAPGSIVMIGSMSGSIVNVPQPQAPYNAAKAGVRHLAASLAVEWAQANIRVNCISPGYMLTALTQKILDDNPDLKAKWTSLIPQGKMGQPQDLMGPVAFLLSDASSYVTGADIRVDGGYTVT

SEQ ID NO: 1613 - DNA, 1086 bp, Gibberella zeae PH-1
  CDS (1)..(1086)
atgtctttcgcagctcgcaatgccctccgtctgactcgggctgccgcccctgctctccccagaaacgctgctcgatgcttctcagccactcgtattcagcgtgtcaatgacacaaacatgaagaagaacgtggttcgtgagaaggagattcctgtcactgtctacgctgcaggtcagggtaccggcgataagcacacagtcaacgtatccgaggctgctgctcgcattcccagtgagactcctgttcctactcctgacagcgatgtggttcagcccctcacccgcaagaccttcgagcaactccctcagactatgcgcaacatgagtgtctacggcaagactatcttactcactggtgctgcccgtggtctcggaaactacatggctcgcgcctgtgctgaggccggtgccaagaacatcgtcctctttgatgccaaccaggagcttggtgaccaagcagctgctgagcttcatgacaagactggcctacccgtctcattcttcaaggtcgacgtccgtgacggtgctgcaatcaacgctgctgtcgacgaggttgttgagcactatggcgcccctgatgttcttgtcaactcggccggtatcgccgattcaaacatcaaggctgagacatacgaccctgccatgtttcgccgtctcattgacattaacctcacgggatctttcctcatgtcccaggccgtcggtcgtgctatgatggccgctggaaagcctggcagcatcatcctggttgcttctatgtctggctcagttgtcaacttccctcaggagcagagctgctacaacgcctccaaggcgggtgtcatccaactcggcaagtccctcgctgctgagtgggctaagttcgacatccgagtcaactgtatctcccctggatatatggacactgctctcaaccgtgtacccgctctcgacgcacagaagaagatctggaagtctcttactccccagaatcgccttggtaacgttgacgagctcaacggtctctgcatcttccttgcctccgactcttccaagttcatgactggttccaactgcatcatcgacggtggctacacatgctactaa

SEQ ID NO: 1614 - protein, 361 aa, Gibberella zeae PH-1
MSFAARNALRLTRAAAPALPRNAARCFSATRIQRVNDTNMKKNVVREKEIPVTVYAAGQGTGDKHTVNVSEAAARIPSETPVPTPDSDVVQPLTRKTFEQLPQTMRNMSVYGKTILLTGAARGLGNYMARACAEAGAKNIVLFDANQELGDQAAAELHDKTGLPVSFFKVDVRDGAAINAAVDEVVEHYGAPDVLVNSAGIADSNIKAETYDPAMFRRLIDINLTGSFLMSQAVGRAMMAAGKPGSIILVASMSGSVVNFPQEQSCYNASKAGVIQLGKSLAAEWAKFDIRVNCISPGYMDTALNRVPALDAQKKIWKSLTPQNRLGNVDELNGLCIFLASDSSKFMTGSNCIIDGGYTCY

SEQ ID NO: 1615 - DNA, 819 bp, Gibberella zeae PH-1
  CDS (1)..(819)
atgttgatgccagcaggtcttctcgccaacaagactgccatcattaccggcggcacgacgggtattggtcgtgctatctgcctcgagtttctacggcaaggcgccaatgtcgtggtaaaccacttgggccttgaaaaagaccagactcacctcgactcactcatcgtcgaggccgacgaaatccgaaaagcatcacccactgctgggcacctcgatcaccaagcgggcgacgttcgtgacccagcgacagcgacagaattagtcaaaaaggccgtcgagcactcccccaagaagcgccttgacatctgcgtgtctaatgccggtatctgcacattcgctgatttcctcacgctcgagccggatttgcttcactcaacggtgcgaacaaacctggatggtgccttctacgtgactcaggctgctgcacgacaaatggctcttcaccaagagcccaagggaggaagtatcatcggcgtctcgtccatctcagcccttgtcggtggtggccaacagacacactatacacccaccaaggcaggcgtcttgagcttgatgcagagcacagcgtgcgccctgggagaacacggtatccggtgcaatgcgcttctcccaggcacgatccgcacgcagcttaacgacgcagacctggctgatgatacaaagagagcttatatggaaggtcgcatccctttaggacgtactggttcgccctccgatatggctggcccggccgtctttctggcgtgtccagagctgagcggatacgtgacgggtgcgcagcttctcgtcgatggtggtctgttcgtcaatcttcagtga

SEQ ID NO: 1616 - protein, 272 aa, Gibberella zeae PH-1
MLMPAGLLANKTAIITGGTTGIGRAICLEFLRQGANVVVNHLGLEKDQTHLDSLIVEADEIRKASPTAGHLDHQAGDVRDPATATELVKKAVEHSPKKRLDICVSNAGICTFADFLTLEPDLLHSTVRTNLDGAFYVTQAAARQMALHQEPKGGSIIGVSSISALVGGGQQTHYTPTKAGVLSLMQSTACALGEHGIRCNALLPGTIRTQLNDADLADDTKRAYMEGRIPLGRTGSPSDMAGPAVFLACPELSGYVTGAQLLVDGGLFVNLQ

SEQ ID NO: 1617 - DNA, 885 bp, Gibberella zeae PH-1
  CDS (1)..(885)
atgtctgatcttcaccctctcaacagaggtaacttcgtccacgataacaaccgcttagtcgatggcggttctatcctcaagcgtttctctctctcaggcaagaccgcaattatcactggcgctgctgccggtattggcttctctattgctgaagcatatgccgagactggtgccaatattgctatttggtaccgtaccagcaacaaggctcaggagcgtgccgaagagctctccaacaagtacaatgtcactgtcaaggcgtatcaggttgatatgcgagacgccgaagccgttgaacaggccgtcgaccaatcagtcaaagacctcaacggtcggctagatatctttgttgccaatgctggtattccctggaccaaaggccctatggtagatggccccattgaccactatcgcgatgttgtccagaccaacctagatggcacctactactgtgcaaagtccgcagcgaagcactggcgtcgtcagaagcttgagggtactgacctcaacggccaacctctaagcaactacacatcaggcagtttcattgccaccgcttccatgagcggaggtatcgtgaatattccacaacttcaggctgcttataatgccgccaaggcaggagttattcatctcatcaagagtttggctgttgaatgggctcggtttgctcgagccaacgccatctctcctggttacatcatcactgagatctccaactttgtcaaccaggagaccaaagacatgtggaaggataagattcccgtaggtcgcgaaggcgagcctcatgagcttcaaggtgcatatctattcctggcatcagacgcttccacgtatgccactggtgccaattttgttatcgatggtggttacagcgctccttag

SEQ ID NO: 1618 - protein, 294 aa, Gibberella zeae PH-1
MSDLHPLNRGNFVHDNNRLVDGGSILKRFSLSGKTAIITGAAAGIGFSIAEAYAETGANIAIWYRTSNKAQERAEELSNKYNVTVKAYQVDMRDAEAVEQAVDQSVKDLNGRLDIFVANAGIPWTKGPMVDGPIDHYRDVVQTNLDGTYYCAKSAAKHWRRQKLEGTDLNGQPLSNYTSGSFIATASMSGGIVNIPQLQAAYNAAKAGVIHLIKSLAVEWARFARANAISPGYIITEISNFVNQETKDMWKDKIPVGREGEPHELQGAYLFLASDASTYATGANFVIDGGYSAP

SEQ ID NO: 1619 - DNA, 813 bp, Gibberella zeae PH-1
  CDS (1)..(813)
atggacgtcccaggctttgctttgattacaggaggcgcctctggaatcggccgtgcgtgtgctagggctttcgcaagagacgggtctgctggtatcgccctcatagatctcaatctcgaagcgctacaagctgtcaagtccgagatagaacaagagaagctatcaccaaacaacaattttcggattgagctttaccctgcagatgttacagacgagaccagaatcaatgaaatcgtcaacgacatggtgcagaaatttggtcgcatagactacgtcgtcaatgcagctggcatcgccatcaaacatcaaggtggagcagcattcgctcaaacagctgactggaaccgtgtcctcaacattaacctcaacggaactttcttcgttcttagagctgctgcaagagtcatgctcaagcaagacccaatcaagtcatcaatcaacggaagggatctacagcgtggctccatcatcaacttttcttccatccagggtgttgtcggtatcccattatccacgtcgtacactgctgcaaagcacgccatcatcggtctcacacgttctgcctcggaggattatgcaaaggacggtctgcgcatcaatgccatctgtcctgggtatacggaaacgccaatgacaacgaagaatccggacgtactcaaggcgatgcaagagaggatatctacggcggttcctatgcataggatgggacagcctgaggagattgcagatggtgtgttgtatttggctggaggaagaagctcgtttgtcactgggtcagccttggctgttgatggaggctacactcagaggtga

SEQ ID NO: 1620 - protein, 270 aa, Gibberella zeae PH-1
MDVPGFALITGGASGIGRACARAFARDGSAGIALIDLNLEALQAVKSEIEQEKLSPNNNFRIELYPADVTDETRINEIVNDMVQKFGRIDYVVNAAGIAIKHQGGAAFAQTADWNRVLNINLNGTFFVLRAAARVMLKQDPIKSSINGRDLQRGSIINFSSIQGVVGIPLSTSYTAAKHAIIGLTRSASEDYAKDGLRINAICPGYTETPMTTKNPDVLKAMQERISTAVPMHRMGQPEEIADGVLYLAGGRSSFVTGSALAVDGGYTQR

SEQ ID NO: 1621 - DNA, 729 bp, Gibberella zeae PH-1
  CDS (1)..(729)
atgacttctttcgacggcaaagtgattgccgtgactggcgctgcatccggcatgggtctagccactgcccaactcctcgcgtcgagaggagcaataatctctctcgcagatatcaacgaagaagtcctaaagtccgtcctcgattcgcttccaggtaatgggcatatttatcaggtagtcgacgtcagtcaaagtgaatcagtgaatgcatggatcaaacagaccatcgacaagtttggcaagctagatggtgctgttaatatggctggtatcatagctgaaccgacaccactcactgagtacaccgatgaagtctgggataggatgtttgcagttaatacacggggagtattcaattgtttacgcgcagagttgaagaccataacggctggtggaagtattgtatctgctgcaagcgtctttggtcagttcggagcacccggccacgtcgcttactgtgccagcaaagcagccgttattggactgtccaggacggctgctaaggagaatgaacatattcgagtgaactgtgtctcgccaggctctgtgagcaccgctatgaatcaacacgatgaccccgagcatgtgaagcgtagtcttgcagggactgtgcaaaaaaggagggcggaaccaattgaagtcgctcgtgttatcgctttccttcttagcgatgaggcatctttcgtgacaggtgctgtgtacaacgtggatggcggttgggtatgctaa

SEQ ID NO: 1622 - protein, 242 aa, Gibberella zeae PH-1
MTSFDGKVIAVTGAASGMGLATAQLLASRGAIISLADINEEVLKSVLDSLPGNGHIYQVVDVSQSESVNAWIKQTIDKFGKLDGAVNMAGIIAEPTPLTEYTDEVWDRMFAVNTRGVFNCLRAELKTITAGGSIVSAASVFGQFGAPGHVAYCASKAAVIGLSRTAAKENEHIRVNCVSPGSVSTAMNQHDDPEHVKRSLAGTVQKRRAEPIEVARVIAFLLSDEASFVTGAVYNVDGGWVC

SEQ ID NO: 1623 - DNA, 771 bp, Kluyveromyces lactis NRRL Y-1140
  CDS (1)..(771)
atgtcagaatattcgtttgctggaaaaatagccttggttacaggagcctccacaggggttggagagggcattgctcgtgcactttttgtaagaggagctactgtggtcattacttcgagacacttatccgaagtgcaagagacagcgggcaatattgatcccagtgggagcagagtgattgggaaagaagtggatgtaactgttgcaaaagcggtggaagacttaatccaagagataagagaagaatttggagcattacactatttagtaaataatgcaggaattacaggtcctcatcagacaggaattgaagattacgatattgattcctggaggcaagtcattgatacgaacattaatggtaccttctacacactaaaatatgcgctaccattgatggaaagctcttcgagtccagactctgaggcagcggtggtgaatctctctgcagttaatggtcttgttggtattcccggtatttccccgtatacagcaacgaagcatgcagtaatagggataactcagagtgttgcattagaatacgcagaaagaaatgttagagtgaacgcagttgcgccaggatatgtttccacacccaagattcaagctttgccaaaggaaacgcaacaatggatgtcgagtcagcacccgatgaagcgtatggcaacaatgacagaagtttcgaacactgtcttattcttactttccccactgaccggtttcactacaggttcagtgtatccaatcgatggtggatttttggctcagtga

SEQ ID NO: 1624 - protein, 256 aa, Kluyveromyces lactis NRRL Y-1140
MSEYSFAGKIALVTGASTGVGEGIARALFVRGATVVITSRHLSEVQETAGNIDPSGSRVIGKEVDVTVAKAVEDLIQEIREEFGALHYLVNNAGITGPHQTGIEDYDIDSWRQVIDTNINGTFYTLKYALPLMESSSSPDSEAAVVNLSAVNGLVGIPGISPYTATKHAVIGITQSVALEYAERNVRVNAVAPGYVSTPKIQALPKETQQWMSSQHPMKRMATMTEVSNTVLFLLSPLTGFTTGSVYPIDGGFLAQ

SEQ ID NO: 1625 - DNA, 870 bp, Debaryomyces hansenii CBS767
  CDS (1)..(870)
atgacactccccgataagagagaaacagacattactgtggtttcatacatttccaacgaattcacggatgagctccctagagcatcgccaccaaaaagacacataatggacttgttgtctttaaaaggtaaagtagcagttgtcaccggtgctgcgagaggtattggccttgcgattgcggaaacgtttgctgaagcaggtgctgctgtcgcccttgtagattacaccgactgctcagagcaagctctcaagttagcaaccaggctcaaggtgtgtaccaaggcattccaatgtgacgttgccgatttaaaacgagtcgaaggaacagttcaggccatcgaaaaggaatttggtaccattgatgtttttgtcgctaatgctggtatagtatggaaaactggtaacatcatagacgaagtcaaccgagatggtaagacttggcaaactattatggatgttaacttgaacggtgcttactactgtgcccaggcggttggcagaatatttaagaaaaatggtaaaggctctttcattgttacttcctccatgtctgcttctattgtcaatattcctatgaacttgaccccatataacgtcagcaaagctggtgttaaacatcttgccaaatccttagctatcgaatgggctggttttgctagagcaaactccatttctccaggttattgcgacactggtcttaacgatcatttaccaagagaatcccgtggtaagatgtgggctctaatcccagctggcagagaagctttaccatacgaaatcgccagtgcttatttatacttggcttctgacgctgcttcttatattaccggttctgacatagccattgatggtggctacacatccatctaa

SEQ ID NO: 1626 - protein, 289 aa, Debaryomyces hansenii CBS767
MTLPDKRETDITVVSYISNEFTDELPRASPPKRHIMDLLSLKGKVAVVTGAARGIGLAIAETFAEAGAAVALVDYTDCSEQALKLATRLKVCTKAFQCDVADLKRVEGTVQAIEKEFGTIDVFVANAGIVWKTGNIIDEVNRDGKTWQTIMDVNLNGAYYCAQAVGRIFKKNGKGSFIVTSSMSASIVNIPMNLTPYNVSKAGVKHLAKSLAIEWAGFARANSISPGYCDTGLNDHLPRESRGKMWALIPAGREALPYEIASAYLYLASDAASYITGSDIAIDGGYTSI

SEQ ID NO: 1627 - DNA, 825 bp, Yarrowia lipolytica CLIB122
  CDS (1)..(825)
atgttcttgagaccgctacagaactcccagagagtgataaacccactcgttcgaaagtactcaatatccgcgtcttctctctctggaaaaaccgctctggtgaccggcggttcgggaggaatcgggctagtcattgctaagaagctggcagcaaacggagctcgagtgatcctgcttgctagagatgaaaccaagttgaatggagctctggaggagctgacacacactcttaaggatgagcagacacaaagggatatcacacagaccgcccacagcacgatatcttacgacattgctaaagcaacgacaccaccagaaatcgacttcaagatggtagatctgctcgtcaactgtgccggagtcacgcaaacatcgctgcttatgaccaccaaaaacattgaccagatcatcggcacaaatctcgccggagccattaaaatgagccagtatgccatgcgtccgtggatgaaacgaaagtcgggctgtattgtcaacatctcctcggttttgggattacgtggccttacaggcgggtctacggtctacagtgcagccaaggctggtcttgtgggcttcacgaaggctctcgcggtcgaagtgggcgctagaggtatccgtgtcaattgcgtgtgtcctggactggtcgagacggaaatgacacagaacgtgactgtccagaatgggtttgcgacacctcttcagggcatgggaaaggataattacgtatctgctgactcggtggccgacgctgtcctctaccttgctgctagtgaggagcagaccggaagcattctcaccatagacaagggcttgtctgcggtatag

SEQ ID NO: 1628 - protein, 274 aa, Yarrowia lipolytica CLIB122
MFLRPLQNSQRVINPLVRKYSISASSLSGKTALVTGGSGGIGLVIAKKLAANGARVILLARDETKLNGALEELTHTLKDEQTQRDITQTAHSTISYDIAKATTPPEIDFKMVDLLVNCAGVTQTSLLMTTKNIDQIIGTNLAGAIKMSQYAMRPWMKRKSGCIVNISSVLGLRGLTGGSTVYSAAKAGLVGFTKALAVEVGARGIRVNCVCPGLVETEMTQNVTVQNGFATPLQGMGKDNYVSADSVADAVLYLAASEEQTGSILTIDKGLSAV

SEQ ID NO: 1629 - DNA, 876 bp, Yarrowia lipolytica CLIB122
  CDS (1)..(876)
atgtccaactccgccaaagccgctgtcgtgccccccgcccccaccgccgaagatatcgcccgagccaacgccggatccaaggaagagcccgttttccaggctaagaactttctgtccaagttccgactcgatggcaaggtagccattgtgactggtggagctcgaggactcggattctccatggccgagggtctgtgttcggtcggcctcaagggcattgccattctggatgtgcagcaggacctgggtctggatgccattgagaagctgcacaaggcctacggagtgcaggcccagttctacaaggccgacgtccgagacgaggagtccgtcaacgagatcatcgaccgagttgtgcacgatctcgggtccgtcgacgttgtggtcaactccgccggtgttgctgaccttgttcacgcagctgagtaccccgcagacaagttccgacgagtcatcgacatcaaccttaacggatccttcttggtgacccaggccgccgcccgacacatgatcaagcagggcaccggcggaaccgtggtgttcatcgcctccatgtccggatccattgtcaactggccccagcctcagagcgcttacaacgcctccaaggctgccgtcaagcacctgtctaagtcgctggccgccgagtgggccgtccacaacatccgatgcaactccatctcgcctggatacatggataccgctcttaaccgagcctacaacactctgtttgaggagtggaaggaccgaacccccctcggccgactcggagaccccgacgagctcaccggcgcctgcatctacctggcttccgatgcctcttcgtacgtgaccggatccgacattatcattgatggtggttacactattatttaa

SEQ ID NO: 1630 - protein, 291 aa, Yarrowia lipolytica CLIB122
MSNSAKAAVVPPAPTAEDIARANAGSKEEPVFQAKNFLSKFRLDGKVAIVTGGARGLGFSMAEGLCSVGLKGIAILDVQQDLGLDAIEKLHKAYGVQAQFYKADVRDEESVNEIIDRVVHDLGSVDVVVNSAGVADLVHAAEYPADKFRRVIDINLNGSFLVTQAAARHMIKQGTGGTVVFIASMSGSIVNWPQPQSAYNASKAAVKHLSKSLAAEWAVHNIRCNSISPGYMDTALNRAYNTLFEEWKDRTPLGRLGDPDELTGACIYLASDASSYVTGSDIIIDGGYTII

SEQ ID NO: 1631 - DNA, 942 bp, Yarrowia lipolytica CLIB122
  CDS (1)..(942)
atggtttcttcagccgctacttctgctctgcccatctcggcaccctacaccttctaccctcaggctcgagttcctgcccccaagaagctcgttggactcaatgctgctctggaggcccagaagaaccccgagttcgaggtgaagcccgagatctttaaggagttctctctgcccgacggtgttgccattgtcaccggtggaaactccggtattggtcttgagtactcagtctgcctcgccgagctcggtgccactgtctactgtcttgacatgcccgagactccctctgaggagttcctggcttgccagtcctacgttaagcgaatgcccggcaacgcctctctggtcttcaagcgagccgacgtcactgacgaggagactatgaactccctcttccagaacattgccgagacccacggcaagattgacgttgtcatcgctaacgccggtgtgcttggacctcgagcctcttgcaacgagtaccccgctgactggttccgaaaggtcatggacgtcaacgtcaccggtgtctttatcaccgcccaggccgcctctcgacagatgattgccaccaagacttctggttctatcattgtcaccgcctccatgtccggctccattgtcaaccgagacatgccctggtgcgcctacaacgcctccaaggccgctgctgctcatcttgtcaagtccatggctgctgagctcggccagtttgagattcgagtcaactccatctcccccggtcacatccagactgctatgactgacgtctgtcttgacgctgagcccggtcttggtaaccagtgggccttccagaaccccatgggccgacttggaggtgtctccgagcttcgaggagtctgcgcctaccttgcatcttccgcctcctcctacaccaccggctctgacattcttgtctgcggtggccaccacgtctggtaa

SEQ ID NO: 1632 - protein, 313 aa, Yarrowia lipolytica CLIB122
MVSSAATSALPISAPYTFYPQARVPAPKKLVGLNAALEAQKNPEFEVKPEIFKEFSLPDGVAIVTGGNSGIGLEYSVCLAELGATVYCLDMPETPSEEFLACQSYVKRMPGNASLVFKRADVTDEETMNSLFQNIAETHGKIDVVIANAGVLGPRASCNEYPADWFRKVMDVNVTGVFITAQAASRQMIATKTSGSIIVTASMSGSIVNRDMPWCAYNASKAAAAHLVKSMAAELGQFEIRVNSISPGHIQTAMTDVCLDAEPGLGNQWAFQNPMGRLGGVSELRGVCAYLASSASSYTTGSDILVCGGHHVW

SEQ ID NO: 1633 - DNA, 864 bp, Aspergillus nidulans FGSC A4
  CDS (1)..(864)
atgtctgtctctattgaaaccacttcgactcccgtcgtgcctctcaagcaggaggcacccgcagttgctaccaccaatagactgcccgagttcagtctggccggaaaggtcgtttgcgtttccggtggtgctcgtggccttggattgacccaggcagaggctctgcttgaagccggtgcccgcgtctacgctcttgaccgtctcgaggagccttctcccgatttctacactattcagaagcgtgccagagaggaactcggcactgagctccagtaccgccgcatcgatgttcgtgacacagagctcttgcacagcactatcgaagcaatcgccaacgccgagggtcgcatggatggcttggtggctgctgctggaattcagcaggagacccctgccctggagtacacagcccaagacgccaacaggatgttcgaagtcaatatcaccggtgtcatgatgaccgcgcaagcggttgctaaacagatgattcgctttggaaacggaggaagcattgcactgattgccagtatgagcggcactattgccaatcgcggtctcatctgctctgcctacaacgctagcaaagcggccgtcatccaactcgcccgcaaccttgcctccgagtggggccagtacaacatccgtgtcaacactatctctcccggttatatcgtcaccgctatggttgagcagctcttcgtccagtaccccgagcgccgcgacgagtggcccaagcacaacatgcttggacgtctgtcctctccgcaggagtaccgcggagcagctgtcttccttctcagcgatgctagcagtttcatgaccggaagcgacctgcgcatcgatggaggccacgccgcgtggtag

SEQ ID NO: 1634 - protein, 287 aa, Aspergillus nidulans FGSC A4
MSVSIETTSTPVVPLKQEAPAVATTNRLPEFSLAGKVVCVSGGARGLGLTQAEALLEAGARVYALDRLEEPSPDFYTIQKRAREELGTELQYRRIDVRDTELLHSTIEAIANAEGRMDGLVAAAGIQQETPALEYTAQDANRMFEVNITGVMMTAQAVAKQMIRFGNGGSIALIASMSGTIANRGLICSAYNASKAAVIQLARNLASEWGQYNIRVNTISPGYIVTAMVEQLFVQYPERRDEWPKHNMLGRLSSPQEYRGAAVFLLSDASSFMTGSDLRIDGGHAAW

SEQ ID NO: 1635 - DNA, 837 bp, Aspergillus nidulans FGSC A4
  CDS (1)..(837)
atggccaccaacgggtcctcatcgtcagaagcgacgcccgtcgtcagcacgcttcccggtcctgaccataactggcaggttacgcttgctggaaaggtcattgccatcaccggtgcaaaccaaggcattgggctcgggatcgcagaagtcattctggccaactctgcagcgcacgtctactctctcgacatctccacgcccggcgacccctttaacgagctcgcgcagaagaacccgaagcgcttctccttcatccagacagacgtgacctctgaagaatccgtccaggctgctctcgaccagatcgtctctgaacaaggccggttggacgggatgattgccaatgccggcgcaacaaagcaccagcccgcgttggacttcaccatggatcaggtcaagcgcctcttcgagctcaacgtcttcggtgcctggaactgcgcaactgcggcggcgaagacattcatcaaactcggcatcaagggctcaattgtctttactgctagcatgacatcttacagaccgaaccgcgcggcgccgagcgcgccatatggaggcacgaaagcggcggtacggaacatgacgcataccttggcgatggagtgggcgaagcatggaatccgggtgaacagtatctcgcccgggtttgtgaagactgcattgacgtattatgttgagacaagtcccgactgggataccaagatgaagtactatggggggatgccgagactggcgattccgcaggagttgggtggcgcgtatgtttacctgcttagtgacactgcgacgtatacgacgggaatcgatattccaattgcggggatcgtgggggcttggtag

SEQ ID NO: 1636 - protein, 278 aa, Aspergillus nidulans FGSC A4
MATNGSSSSEATPVVSTLPGPDHNWQVTLAGKVIAITGANQGIGLGIAEVILANSAAHVYSLDISTPGDPFNELAQKNPKRFSFIQTDVTSEESVQAALDQIVSEQGRLDGMIANAGATKHQPALDFTMDQVKRLFELNVFGAWNCATAAAKTFIKLGIKGSIVFTASMTSYRPNRAAPSAPYGGTKAAVRNMTHTLAMEWAKHGIRVNSISPGFVKTALTYYVETSPDWDTKMKYYGGMPRLAIPQELGGAYVYLLSDTATYTTGIDIPIAGIVGAW

SEQ ID NO: 1637 - DNA, 885 bp, Aspergillus nidulans FGSC A4
  CDS (1)..(885)
atggcttcccgtctctcccaactaaacgctcacctcaactacccgcgcggcctcctagccgaccaagtcgccatcatcaccggcgcaggccaaggcattggtgcagaagcagcgcgcctattcgcaaacgagggcgcaaaggtcgtgattgctgatatcgacggcgaaaaggccaacgctgtcgccaacgccatcaactccgcctcacctaatcgcgctattgccgtcgttggcgacatccttaacgacaagtacatcacgactcttgttgaaaaggccgccgaattcgggaacggcaagatccacattatcgtcaataatgcgggttttacgtgggatggagttattcacaagatcacagataaacaatgggacaccatgattgcggtgcacaacacagcgccgttcaaactcattcgcgcggcagcaaagtacttccgcgtcaaggacggggagccacgtgtgattatcaacatctcgagtacgagcgggattcacgggaatgccgggcaagcaaactacgcccttgccaaagcgggcgttgtgggcctgacacgtacaatcgcaaaggaatggggtccgcaattcggcgtccgctcgaataccattgcgttcgggttcgtgcagacacgtctgaccgctgcgaaggagaagggggcgttcattaccacgcccgacggaacgaaggttgcccttggtatacccgggcagcagcttggggcgaaggagggcgcgaaggatgggaagccggcgtatccggatattccgttaggcaggccggcgagtcctgaggaggcggcgaggagtgtgcttgctgtggccagtccgttgtttagttatgttaacggagagacaattcgggttactggaggccggaatatgtag

SEQ ID NO: 1638 - protein, 294 aa, Aspergillus nidulans FGSC A4
MASRLSQLNAHLNYPRGLLADQVAIITGAGQGIGAEAARLFANEGAKVVIADIDGEKANAVANAINSASPNRAIAVVGDILNDKYITTLVEKAAEFGNGKIHIIVNNAGFTWDGVIHKITDKQWDTMIAVHNTAPFKLIRAAAKYFRVKDGEPRVIINISSTSGIHGNAGQANYALAKAGVVGLTRTIAKEWGPQFGVRSNTIAFGFVQTRLTAAKEKGAFITTPDGTKVALGIPGQQLGAKEGAKDGKPAYPDIPLGRPASPEEAARSVLAVASPLFSYVNGETIRVTGGRNM

SEQ ID NO: 1639 - DNA, 993 bp, Aspergillus nidulans FGSC A4
  CDS (1)..(993)
atgctgtcgcgacgttttggagtttccctgctgcagtcatccgtgccgaagctggcgcggtccagctgcagggcgcaatacaacagagttggttttatcaagccgccgacgccggtcgtctgggcggccaggacgatggctggtccagcgaatctgaaagagaaactgcccgagaaggatgggaatcagcgattccgggagttcatgctggaggggaaagttttcgcagtgactggaggggcacggggactgggcttgacgatggcggaggctctggttgaagctggaggagaggtgtactgcctcgacagactacccgaaccagacgacgagttttacgccgcacaaaagcgcgcgaatcctgacttcgggggcgccctccactaccgccgcatggacgtcactgacgacgctaacaccgaagctatcttggatgatattgcgagcaagaaggaccgcctcgatggactgatcgcagccgcgggcgtcaaccacgtcaaagatgcattcgacctgacgcctgagatggtcgataagctcatccacatcaactataccggcgtcttcaggagcgcggtagcagccgcgcgcgcaatgacggctcgaaaatgccccggctcaatcctccttgtggctagcatgagcggtctgatcgcgaacaagggaatggcgtcggcgatctacaactcctccaaggcagcagttgtccaattgagccgcagccttgcaatggaatggtcagaatctcgcaaggacggaacgggagggatccgcgtgaacgctctgtgtccgggacatattgagacgtcgatggcgcagatggtgatggagaaggatccggagacgagggtcatctgggaaagcgagaatatgatgaagaggctggcaaggccagaggagtttagggggattacgctgctactgatgagtgatgcgagcagcttcatgactggcagtacggttgttgtggatggagggcatacagcttggtag

SEQ ID NO: 1640 - protein, 330 aa, Aspergillus nidulans FGSC A4
MLSRRFGVSLLQSSVPKLARSSCRAQYNRVGFIKPPTPVVWAARTMAGPANLKEKLPEKDGNQRFREFMLEGKVFAVTGGARGLGLTMAEALVEAGGEVYCLDRLPEPDDEFYAAQKRANPDFGGALHYRRMDVTDDANTEAILDDIASKKDRLDGLIAAAGVNHVKDAFDLTPEMVDKLIHINYTGVFRSAVAAARAMTARKCPGSILLVASMSGLIANKGMASAIYNSSKAAVVQLSRSLAMEWSESRKDGTGGIRVNALCPGHIETSMAQMVMEKDPETRVIWESENMMKRLARPEEFRGITLLLMSDASSFMTGSTVVVDGGHTAW

SEQ ID NO: 1641 - DNA, 840 bp, Aspergillus nidulans FGSC A4
  CDS (1)..(840)
atggctaccccccgaggccgtctccaaggcaagaatgccatcatcaccggtgccgcaggcggtattggactcgaaactagcatcttattcgcccgcgaaggcgccaatgtcctgatggcagacatctccgcgtcggctctcgaaaaagccctcgcgaaggtcagagagctcgtccctgacgcgccccgtgttgagaccatcaagtgcgacgtctccaaggaatccgaggttcaggctatggtcgagtcccaggactcctggggcggcacagatgtgatcttcaacaatgccggaatcatgcacgcggacgacgccgatgccatcgacactcctgagaaaatttgggacttgacgcagaacatcaacgtcaagggcgtgtggtttggatgtaaacatgcggtactgagcatgcggagacacaagaagagcaagggcagtatcatcaacacggcgagtgttgttgcgctggtcgggagtgccacgccgcagctggcgtacacggcgtccaagggtgctgtgctggcgctgacgagggagctggcgatcgtgcatgctcgggagggaatccggttcaatgcactgtgcccggcaccattgaacactccactcttgcaagactggctgggtgacgaccaggccaagcgtcaccgccgcgaagtgcatttccccatgggacggttcggagaggccattgagcaggctcatgcggtggtcttcctggccagtgacgagagcagctttgtcaatggagccgactttgttgttgacggtggcatgagcaaggcgtacgttacccctgagggaccggctcctccggctcctaagaaccaggctcaatag

SEQ ID NO: 1642 - protein, 279 aa, Aspergillus nidulans FGSC A4
MATPRGRLQGKNAIITGAAGGIGLETSILFAREGANVLMADISASALEKALAKVRELVPDAPRVETIKCDVSKESEVQAMVESQDSWGGTDVIFNNAGIMHADDADAIDTPEKIWDLTQNINVKGVWFGCKHAVLSMRRHKKSKGSIINTASVVALVGSATPQLAYTASKGAVLALTRELAIVHAREGIRFNALCPAPLNTPLLQDWLGDDQAKRHRREVHFPMGRFGEAIEQAHAVVFLASDESSFVNGADFVVDGGMSKAYVTPEGPAPPAPKNQAQ

SEQ ID NO: 1643 - DNA, 801 bp, Aspergillus nidulans FGSC A4
  CDS (1)..(801)
atgccgcagcaagtccccaccgcctcccacctctccgacctcttcagcctaaagggcaaagtcgtcgtaattaccggcgcttccggcccccgaggcatgggcatcgaagcagcgcgcgggtgcgctgagatgggcgccaatgtcgcaattacctacgcctcacgcccagaaggaggcgagaagaacgccgccgagctagcgcgcgactacggcgtcaaagccaaggcttataagtgcgacgtcggcgacttcaagagcgttgagaagctagtacaggacgtgattgccgagttcgggcaaatcgatgctttcattgcaaatgccggccggactgcgtccgcgggcgttcttgatggttctgttaaggactgggaggaggtcgtgcagacggatttgaacgggacattccactgcgcgaaggcggtaggaccgcactttaagcagcgtgggaaggggtcccttgttatcactgctagtatgagcgggcacattgccaactacccgcaagagcagactagctacaatgttgcgaaggcgggctgcattcatatggcgcggtcgctggcgaacgagtggagggactttgcgcgcgtcaactctatttcgcccggttatattgataccggtctgagtgactttgtcgacaaaaagacgcaggatctgtggctgagtatgattcctatggggcgccatggtgatgcgaaggagcttaagggagcgtatgtttacctggtcagcgatgcgagtacgtacaccactggtgcggatctggttattgatggcggttacacctgccgataa

SEQ ID NO: 1644 - protein, 266 aa, Aspergillus nidulans FGSC A4
MPQQVPTASHLSDLFSLKGKVVVITGASGPRGMGIEAARGCAEMGANVAITYASRPEGGEKNAAELARDYGVKAKAYKCDVGDFKSVEKLVQDVIAEFGQIDAFIANAGRTASAGVLDGSVKDWEEVVQTDLNGTFHCAKAVGPHFKQRGKGSLVITASMSGHIANYPQEQTSYNVAKAGCIHMARSLANEWRDFARVNSISPGYIDTGLSDFVDKKTQDLWLSMIPMGRHGDAKELKGAYVYLVSDASTYTTGADLVIDGGYTCR

SEQ ID NO: 1645 - DNA, 897 bp, Aspergillus nidulans FGSC A4
  CDS (1)..(897)
atgcagcacttgactcaaggtaatcaagataacaatggcagcctcatcaaaccctcccagccaagttactggcaccgcttttatcactggcggtgcctctggtattacattttcctcccctcgtcagtcgaggccacgttgacatatccaggaatcggcaggtcaatcgcccacacctacgcccagaacgggatatccgcccttgctctagcagatatcagtctccccgctctagaagcaacccaggcagagcttctccagagccacccacaccttgctgaccggattgcgatctatacagtcaatgtgacgaaggaagaagagatctcagcagcagtacagtgcgcggctcacaggttcggccgcatcgatatctccatccatggcgcggggattactggtactggcgcgcacacgcacgagctggacctgaaggaatggcagagagtcatcgatgtcaaccagacaggtgttatgctttgtgataaatggatggtcaagcaaatgctcagccaggagttgattacagggtatcgcggccgcgggattattgtgaatatctcgtccatttatggggttgtcgcgccagacgggagactaggggctgcggcatacgcggcgtcgaagcacgctgttattggattaacgaagctcgacgcaaaaaactacgccaaagacggtgtccgcatcaacgccgtctgtccgggcttcgtcgacacgccccttacccaccgcaacctcgaagaaggcgtgctttcacccgagattgaaaacacggtgctgaagcgcccggcgaggccagaggagattgcagacgcggtgctgttcctgacctcgcggatgggcagttatatgtgtgcggcagctttagtcgttgacgggggttatactgcttga

SEQ ID NO: 1646 - protein, 298 aa, Aspergillus nidulans FGSC A4
MQHLTQGNQDNNGSLIKPSQPSYWHRFYHWRCLWYYIFLPSSVEATLTYPGIGRSIAHTYAQNGISALALADISLPALEATQAELLQSHPHLADRIAIYTVNVTKEEEISAAVQCAAHRFGRIDISIHGAGITGTGAHTHELDLKEWQRVIDVNQTGVMLCDKWMVKQMLSQELITGYRGRGIIVNISSIYGVVAPDGRLGAAAYAASKHAVIGLTKLDAKNYAKDGVRINAVCPGFVDTPLTHRNLEEGVLSPEIENTVLKRPARPEEIADAVLFLTSRMGSYMCAAALVVDGGYTA

SEQ ID NO: 1647 - DNA, 891 bp, Aspergillus nidulans FGSC A4
  CDS (1)..(891)
atgtcgcgcatggcaaaagacaataccttccaggcccctgagagtgcccagacacaaaatacaccgggcctggaaagcaaaatgcaacccgccagcgaagcaaccaagctcgagacttccgacggaattaaagattacaagggctccggtaagctgcagggcaagaaggcactcattaccggcggagactccggcattggccgctccgtcgcagccctgtacgccaaagaaggcgctgacataacaatcgtctacctccctgttgaagaagaagacgcgcaagagacaaaaagactcgttgaggccgaaggacgccaatgcctgctgctgagcggggacctccgcgaccgggggttctgcaagcaggccgtcgattcgcacgtacagaaatatggacacatcaacatcctagttaacaatgcctcgcagcaattcagctgtcccgacctggcgcagataaacctcgacaccgtcactgatgtctttcagacaaatatcatccagatgtttgcgatgacgaagttttccctcccgcatatgagcaaaggagatagtatcatcaataatacttcggtcacagcgttcagagggacaggtagcatggtggattatgcatcgaccaagggggcgattgtaggtttcacgcggtctgctgctctccaacttattcccaagggaattagggtcaacgcggttgctcctggctcaacttatacgcctatccaagtcgatacgcgcgatgcagagcagatgcaggggtgggcgagttcgaagccgctgggccggccagggcagccaagcgaggtggcgaccagctttgtctttttggccagttcggatgcgtccctgttctacggacagatcctgcatccgtatccgctgggtgagtga

SEQ ID NO: 1648 - protein, 296 aa, Aspergillus nidulans FGSC A4
MSRMAKDNTFQAPESAQTQNTPGLESKMQPASEATKLETSDGIKDYKGSGKLQGKKALITGGDSGIGRSVAALYAKEGADITIVYLPVEEEDAQETKRLVEAEGRQCLLLSGDLRDRGFCKQAVDSHVQKYGHINILVNNASQQFSCPDLAQINLDTVTDVFQTNIIQMFAMTKFSLPHMSKGDSIINNTSVTAFRGTGSMVDYASTKGAIVGFTRSAALQLIPKGIRVNAVAPGSTYTPIQVDTRDAEQMQGWASSKPLGRPGQPSEVATSFVFLASSDASLFYGQILHPYPLGE

SEQ ID NO: 1649 - DNA, 1122 bp, Ustilago maydis 521
  CDS (1)..(1122)
atgctgaacgctacagtaagcgcttcaagggctgcaaggtcgatcgtgagcgttgcccaggtggcgcgcccggcattgtacggctctgcgcgaccctcgaacaccctagcccatacctctcccagctcatctcgagctttgagcaaaacccataactttggcaaggccaagaagatcaaaacgcctccatttgcttccaccgacgacgatgtagtcgttccgtacccggaagatagctcacgtcacccgcgcgacgatgttggacacaacactacaggcggccgcgtcggacgtcacacacaacgaactctcgcaagcttctcgatggaaggcaaggtctgcgtcgttactggtgctgctcgtggtatcggcaacttgatcgcacgtacctttgttgagtctggtgcgaatcatgttgctattgtcgatcttgatgaaggcgaaagccagcatgctgctaaagaggttgatgagtggttcaccaaccatggtggtgttaagccaggcgagctcgacattcagggctatggctgtgacatatcggacgaggttcaggtgcaagacgtgatcaatcgcatccatcagcgcttcggcaagatcaatgtggctgtcaactctgccggaatcgtggaaaacttcccggctaccgaataccccaccgccaagctcaaaaagctttttgacatcaacatcaacggctcgtactttgtcgctcgcgaagtggccaagcgcatgatgcaagacaaggtgcaaggctcgattgtcatgattgcttccatgtctgcatcggttgtcaacgtaccgcaagctcaggccccgtacaatgcatccaaggcagccgtcaagcatcttgccaagtcgatggcggtggagtgggccaaggccggcatccgagtcaactcactctcgcccggatacatgctcacgtcgctcagccgtgccgtgttggagaacagcccgaacggtaaagagctccgcaccaattgggagaatatgaccccgatgggtcgtctaggcaatcctgaggatctcaagggcgctgtcgtgtacctctctagtgacgcttccgcctttaccactggcgccgatcttatagtcgacggcggctacacgtctgtgtaa

SEQ ID NO: 1650 - protein, 373 aa, Ustilago maydis 521
MLNATVSASRAARSIVSVAQVARPALYGSARPSNTLAHTSPSSSRALSKTHNFGKAKKIKTPPFASTDDDVVVPYPEDSSRHPRDDVGHNTTGGRVGRHTQRTLASFSMEGKVCVVTGAARGIGNLIARTFVESGANHVAIVDLDEGESQHAAKEVDEWFTNHGGVKPGELDIQGYGCDISDEVQVQDVINRIHQRFGKINVAVNSAGIVENFPATEYPTAKLKKLFDININGSYFVAREVAKRMMQDKVQGSIVMIASMSASVVNVPQAQAPYNASKAAVKHLAKSMAVEWAKAGIRVNSLSPGYMLTSLSRAVLENSPNGKELRTNWENMTPMGRLGNPEDLKGAVVYLSSDASAFTTGADLIVDGGYTSV

SEQ ID NO: 1651 - DNA, 879 bp, Ustilago maydis 521
  CDS (1)..(879)
atgcccaaggacgcagctcccgaagtgatgcctgagcttggtgctcagcgcctcttctcgcttgatggaaagatcgcccttgtcaccggtggtggcacgggtattggcaagatgatcgccgccacctatatccgcaacggtgccaaggtctacattgccagtcgcaagctctctgatctgcagaacgtggccaagcagctcagtaagctcgctcccagcgatcccgagggtaaaaaaggtctctgtgtagcgcttcaggccgatgtgggcagcaaggcaggttgtgatgcgctcgctgaccaggtcaaaaaggccgagtccagactcgacatcctggtcaacaactcgggtctcacttggggcgcacccatggacaatttcccagaggacaagggttggaataaggtattcgacctcaacgtcaagagtcagttctacctcacagtggcgctgctgccgttgctcgaaaagggcaagagcaataccgagcatgccaccgtgctcaacattgcctctaccgctgctatcgttcctctcgccgaagctggtctgtctgcccccgggcacggtacctactcctaccaaccgtcaaaggccgcatcgctgcaccttaccaaagtgctcgccaactcgctcgctgacaaattcatcatggtcaacgccatctgccccggcgtcttcccttcgcgcatgactgcatacggtctcgaggagaaccgcgacctgctcgaaggtgtccaacccaccggccgtattggtacgcccgaggacattggtggtgtcgccatgttcttcgcttctcgtgcaggtgctcactgcaccggtaccggcatcgttgtcgatggtggccagagcatccagttccagcctcgtctgtaa

SEQ ID NO: 1652 - protein, 292 aa, Ustilago maydis 521
MPKDAAPEVMPELGAQRLFSLDGKIALVTGGGTGIGKMIAATYIRNGAKVYIASRKLSDLQNVAKQLSKLAPSDPEGKKGLCVALQADVGSKAGCDALADQVKKAESRLDILVNNSGLTWGAPMDNFPEDKGWNKVFDLNVKSQFYLTVALLPLLEKGKSNTEHATVLNIASTAAIVPLAEAGLSAPGHGTYSYQPSKAASLHLTKVLANSLADKFIMVNAICPGVFPSRMTAYGLEENRDLLEGVQPTGRIGTPEDIGGVAMFFASRAGAHCTGTGIVVDGGQSIQFQPRL

SEQ ID NO: 1653 - DNA, 837 bp, Ustilago maydis 521
  CDS (1)..(837)
atggcgaccacagacgcagcttgcgaaaagacaccttcgacgtcgtcgttgggattgttcaacctctctggtaaaacggctctgctcactggtggcactcgcggcatcggccaagcatgtgctgtggctcttgtcgaggcaggggcttcggtgattctcgcggttcgccctggcaccgccacttctggcgctcatccagctcttgcgcctctcactgcggttgccaaccaatcttgctcgcaaaaacactctaccgtcgatgctgatctttccgacctctcccaagtcaagacgctcttcgaccgagctctctcgcagtcgcctacttctgcgattgacattttggtcaactgcggcggaattcaacgtcgacacccatcggtcgactttcccgagtccgactgggacgaagtgctcaacgtcaacctgaaagctgtttggcttgtctcgcaagcagcgggtcgccacatggtcgcacgtcgttccggaaaaatcatcaactttggctctctgcttaccttccaaggtgggcttacagtgcctgcgtacgcttcggcaaagggagcagtgggacagctgaccaaagcactcagcaacgagtgggcaaaacataacgtccaggtcaacggtattgctcctggttacattgctacggatatgaacgaaaagctgctcgccgacccgaccaggctgaggcagatcagcgaaaggattcccgcgggcagatggggtgatccggccgacttcaaagggccattgctgttcttggccagccaggcaagccagtacgtgagcggtgagatgttggttgttgatggtggttggatgggtcgttga

SEQ ID NO: 1654 - protein, 278 aa, Ustilago maydis 521
MATTDAACEKTPSTSSLGLFNLSGKTALLTGGTRGIGQACAVALVEAGASVILAVRPGTATSGAHPALAPLTAVANQSCSQKHSTVDADLSDLSQVKTLFDRALSQSPTSAIDILVNCGGIQRRHPSVDFPESDWDEVLNVNLKAVWLVSQAAGRHMVARRSGKIINFGSLLTFQGGLTVPAYASAKGAVGQLTKALSNEWAKHNVQVNGIAPGYIATDMNEKLLADPTRLRQISERIPAGRWGDPADFKGPLLFLASQASQYVSGEMLVVDGGWMGR

SEQ ID NO: 1655 - DNA, 1068 bp, Cryptococcus neoformans var. neoformans B-3501A
  CDS (1)..(1068)
atgtccttcatccgctctagccttttcaaggccactgccaatcccatcaggcgatctgcctttgctaccactccacttcgagccttcaccaggtccgctcttgtcagcaacaacaagaaggacgatggttacgaggagcatcgagtcgagattgagcccaagatcgctgctgtcgacgagagtttcacgtttgaacaccctgagaaatgggtagacaagcatcctggtcatgatatgcagcgaggtgattttggtcgacacaccaagcgaactcttgcatctttctctatggacggcaaggtctgccttgtcactggtgcagctcgaggtcttggtaacatgatggccaggacttttgttgaatccggcgcgaacgccattgtccttgtcgatctcaagaaggaggatgccgagcgtgcagccaaggagctcgttgactggtttgtcgagaacggtcaagccgagaagggtgaaattgaggctattggtctcggttgcgacgtttccgacgaggcctctgtcaagcaggtctttagcaccgtcaaggagagattcggccggcttgacgctgtcgtcactgctgccggtattgtcgaaaactttgtcgctcacgagtaccccatcgataagatcaagaagctgttggacatcaacattatgggtacttggtattgcgcacttgaggctgccaagcttatgcctgaaggtggttccattaccctcgtcgcatctatgagcggtagcattgtcaacgttcctcaacctcaaaccccttacaacttttccaaggctgctgtgcgacacatggctcgatccctcgccgtcgaatgggctctcaagggtatccgtgtcaacgctcttagtccgggttacgtcctcaccaacttgactaaggtcattctcgacgccaaccccgttctccgtgacgagtggctcaaccgtatccccatgggtcgaatggccgacccttctgatctcaagggtgccgtcatttaccttgcttctgacagctccaagtacaccactggtgctgagatcatgattgacggcggttacacttgcttgtaa

SEQ ID NO: 1656 - protein, 355 aa, Cryptococcus neoformans var. neoformans B-3501A
MSFIRSSLFKATANPIRRSAFATTPLRAFTRSALVSNNKKDDGYEEHRVEIEPKIAAVDESFTFEHPEKWVDKHPGHDMQRGDFGRHTKRTLASFSMDGKVCLVTGAARGLGNMMARTFVESGANAIVLVDLKKEDAERAAKELVDWFVENGQAEKGEIEAIGLGCDVSDEASVKQVFSTVKERFGRLDAVVTAAGIVENFVAHEYPIDKIKKLLDINIMGTWYCALEAAKLMPEGGSITLVASMSGSIVNVPQPQTPYNFSKAAVRHMARSLAVEWALKGIRVNALSPGYVLTNLTKVILDANPVLRDEWLNRIPMGRMADPSDLKGAVIYLASDSSKYTTGAEIMIDGGYTCL

SEQ ID NO: 1657 - DNA, 879 bp, Cryptococcus neoformans var. neoformans B-3501A
  CDS (1)..(879)
atgcccgctgccagactccgactcgaacacaaggttgccatcatcactggtgccggctccggtatcggtcttgagaccgccctccaatttgccgctgagggcgcccgactcgtcatttctgacatcaacctccgcaatgtcgaggctgctgcccagctcatcaacactcatttcccagaatgcggtgctgtcgccatcaagtgtgatgtgagcaaggaggaggaggtgaaggccatggtcgataaggccgtggaggtgtttggaaggttggatgtgctcttcaacaacgccggtatcatgcaccccgctgatgacaatgccatcactaccgaggagaaggtctgggaccttactcagaatattaacgtcaagggtgtctggtttggatgcaagtatggtatcttggccatgaagaaaaacaagcccgatccttccaagggcctcggcattggtggttctatcatcaacgtcgcttccttcgtcgccatcttgggtgctgccacccctcaacttgcttacaccgcctccaagggtgctgtcctcgccatgactcgcgaacttgcaatggtccacgcccgtgaaggtatccgatttaactctctctgtcccggtcctatccgaacccctctcttgatggatttcctcaacacccctgaaaagttgaacaggcgaatggtgcatgtacccatgggcaggttcggtgaggctgtagagcaggccaaggctgttgtcttcttggcttccgatgactcttccttcattaacggtaccgacttcttggtagatggtggtcttcacaagtgttatgttactcccgaaggcgagcctgcccagcccggccctaccggattgctcgccaccctgtccaaaactgcttaa

SEQ ID NO: 1658 - protein, 292 aa, Cryptococcus neoformans var. neoformans B-3501A
MPAARLRLEHKVAIITGAGSGIGLETALQFAAEGARLVISDINLRNVEAAAQLINTHFPECGAVAIKCDVSKEEEVKAMVDKAVEVFGRLDVLFNNAGIMHPADDNAITTEEKVWDLTQNINVKGVWFGCKYGILAMKKNKPDPSKGLGIGGSIINVASFVAILGAATPQLAYTASKGAVLAMTRELAMVHAREGIRFNSLCPGPIRTPLLMDFLNTPEKLNRRMVHVPMGRFGEAVEQAKAVVFLASDDSSFINGTDFLVDGGLHKCYVTPEGEPAQPGPTGLLATLSKTA

SEQ ID NO: 1659 - DNA, 837 bp, Cryptococcus neoformans var. neoformans B-3501A
  CDS (1)..(837)
atgtcctacttacaaaacctctttggccttacaggaaaaactgctttgatcactggcgccacccggggtattggggctcgaatggcccttgctctcgccaaagccggtgccgacatcatccttgtccagcgtaacaccagcaacaccgcgacccgagacgatattattgctgcggggggcaaggctgacattgttgtttgcgacctcggtgatgcggcctctgttgccaagctcattccccacgttaccaaggagcttggacgaactcttgacattgtcgtcaactgtgggggtatccagcgtcgacaccccgttgagaacttccctgagaatgattggaacgacgttctccaggtcaacttgaacactgtcttcactatcactcgagatgctggtaggcacatgctcgaatctcgaggtggtgtcgctggtgagcccgtccccgaaggcggcgctgctggcaaccccagaggcttcggcaagatcatcaacatctccagcctagtggcctaccagggtggtttgaacgttgtggcttacgccgctgccaagcacggtgtccaaggcattgtcaagtccttctctaacggttgggcttctaaaggcgtctgtgtcaatgccattgcccccggttacatcgctaccgacatgaacgaagctctcatagcagacaaggaccgagctcgtcaaatcctcgaacgtattcctgccggccgatggggatctcctgaagactttgagggtgccattgtcttccttgcttctcgagcgagtgactacgtcaccggtgaatgtctggttgttgacggcggatggatggctcgtgagtgtgtttaa

SEQ ID NO: 1660 - protein, 278 aa, Cryptococcus neoformans var. neoformans B-3501A
MSYLQNLFGLTGKTALITGATRGIGARMALALAKAGADIILVQRNTSNTATRDDIIAAGGKADIVVCDLGDAASVAKLIPHVTKELGRTLDIVVNCGGIQRRHPVENFPENDWNDVLQVNLNTVFTITRDAGRHMLESRGGVAGEPVPEGGAAGNPRGFGKIINISSLVAYQGGLNVVAYAAAKHGVQGIVKSFSNGWASKGVCVNAIAPGYIATDMNEALIADKDRARQILERIPAGRWGSPEDFEGAIVFLASRASDYVTGECLVVDGGWMARECV

SEQ ID NO: 1661 - DNA, 819 bp, Strongylocentrotus purpuratus
  CDS (1)..(819)
atggcgtcatcagctccagcattgctcgggggttcgttgaagggaaaagttgccctcatcacaggagccagctcaggaataggagccgagactgctcgtcattttgcttcccttggatgccgattggcgttgacaggacgtaacatggaaacgcttgaggaagtaaccaatgaatgtattaggagagggctcgacaaagacaagattttaatgatccaagcagactttgagctggaagctgatgtgaagagaactgcagaagaaaccatacagaaattcaaccagattgatgtgctagtcaataatgcaggaatgtatgcaacaaacacagtcgagaccgttactttagaatgttttgataaaatctttgcagtgaatgtgagagcgcccctccagctcacccagctcctagcgccacatctgatcaaaactaaagggactgtggtaaatgtatcaagtgtggtgggcaaggtatcgatgactgacaacttagcctatagtatgtctaagacagcgttggatcatatgacaaggtctatagctgaagaactagcgccccatggagttcgggttaacgcagtgaaccctggtattattacgactcctctcttcaagaggtcattcggggtgactgatgaggcagtagctcagtttttagaggaaatgaagaagcatcatgccatgcgaaggaccggtaccgtagatgaagtatcccggacgatagcattcctcgcatccaacgactcgtctttcaccacgggagaaaccgttgggactgaaggagggttgcatcttttggttacaaaagttcagatttag

SEQ ID NO: 1662 - protein, 272 aa, Strongylocentrotus purpuratus
MASSAPALLGGSLKGKVALITGASSGIGAETARHFASLGCRLALTGRNMETLEEVTNECIRRGLDKDKILMIQADFELEADVKRTAEETIQKFNQIDVLVNNAGMYATNTVETVTLECFDKIFAVNVRAPLQLTQLLAPHLIKTKGTVVNVSSVVGKVSMTDNLAYSMSKTALDHMTRSIAEELAPHGVRVNAVNPGIITTPLFKRSFGVTDEAVAQFLEEMKKHHAMRRTGTVDEVSRTIAFLASNDSSFTTGETVGTEGGLHLLVTKVQI

SEQ ID NO: 1663 - DNA, 801 bp, Tribolium castaneum
  CDS (1)..(801)
atgcccccaacaaaaatcctcacacttttcaggacaatgagttcggcttcctcacagcgtctttgtggcagaacagcaatagttacggcatcgaccgaaggaatcggttttgcgattgcccaacgttttgcacaagaaggagcaaaggtgataatcagcagccgcaaggaaaagaatgtcgaagcggcggtttctaaattaaaatcggaaggtttggacgtttgtgggctcgtatgtcatgtctccaattcagaacaccgtaaaaaattgttcgaaaaggcaacagggggtttagatattttggtctccaatgctgctgtaaacccctcggcaacggcggtcttggactgtgacgaaaaagcgtgggacaaaattttcgatgtaaacgtgaaagctgctttcatgttagcgaaagaagctttaccgttacttcgcaaaagtagctgcggtcgaattattttcatctcgtccattggtggtttccagcctttggatttgattggggcttactgtgtgagcaagtgtgcactctttggactcactaaaacagcagcagcccagttagctaaagaaaatatcaccgttaattgcatagccccgggtttaataaaaaccaagttttcgcactttctggtcgagaaagaggaagacaaaaagaaagttttatcaatgattccgatgggaagaatgggaatgccacatgaaatagctggcgcagctgcatttttagcatcagacgacgccagttacatgactggggaaacaattgtagtagcaggtggcatgctatcaagattataa

SEQ ID NO: 1664 - protein, 266 aa, Tribolium castaneum
MPPTKILTLFRTMSSASSQRLCGRTAIVTASTEGIGFAIAQRFAQEGAKVIISSRKEKNVEAAVSKLKSEGLDVCGLVCHVSNSEHRKKLFEKATGGLDILVSNAAVNPSATAVLDCDEKAWDKIFDVNVKAAFMLAKEALPLLRKSSCGRIIFISSIGGFQPLDLIGAYCVSKCALFGLTKTAAAQLAKENITVNCIAPGLIKTKFSHFLVEKEEDKKKVLSMIPMGRMGMPHEIAGAAAFLASDDASYMTGETIVVAGGMLSRL

SEQ ID NO: 1665 - DNA, 753 bp, Prochlorococcus marinus str. NATL1A
  CDS (1)..(753): transl_table=11
atgacattatcaaaattacttgaaggacagactgcaattgtaactggcgcaagcagaggtattggtaaagctattgcaatttttctagcgaaggaaggagcagaagtaatcatcaattattcttcatctttggaaaatgcaaataaagtcgtatcagaaataaactcctttggagggaaggcataccctcttcaagctgatatttctaatgaaaactcggtaaatgacttaataaaaacagtattggagaaaaataataaaattgatgttctcgtcaataacgctgggataactaaagatggccttttaatgagaatgaaaacggacgattggcagaaagttttagatcttaacttgagtggtgttttttattgcacaagagcggtatctaggcagatgttgaagcaaaaaaaaggaagaattatcaacataacttctgtagttgggttgatgggcaacccagggcaagcaaattattctgcggccaaggcaggagtagtaggtctcacacaaagcgctgcaaaagaatttgccagcagaggaattactgtaaatgcagttgctcctggttttatttcaactgatatgaccaaagatctggatagtgaatcaatcctttctgctatcccgcttggacgattcggcaaccctgaagatgttgcaggggcagtgaggtttttagcagcggatccttcggcgtcttacataacaggtcaggtaattcaagttgatggtgggatggttatgagttaa

SEQ ID NO: 1666 - protein, 250 aa, Prochlorococcus marinus str. NATL1A
MTLSKLLEGQTAIVTGASRGIGKAIAIFLAKEGAEVIINYSSSLENANKVVSEINSFGGKAYPLQADISNENSVNDLIKTVLEKNNKIDVLVNNAGITKDGLLMRMKTDDWQKVLDLNLSGVFYCTRAVSRQMLKQKKGRIINITSVVGLMGNPGQANYSAAKAGVVGLTQSAAKEFASRGITVNAVAPGFISTDMTKDLDSESILSAIPLGRFGNPEDVAGAVRFLAADPSASYITGQVIQVDGGMVMS

SEQ ID NO: 1667 - DNA, 774 bp, Mycobacterium sp. JLS
  CDS (1)..(774): transl_table=11
atgacccgggaacatgggcgcctccacggcaagtccgcggtgatcaccggggcggcgttcggcatcggccgggccaccgccgtgctcttcgcacgagagggcgcgcggctggtcgtgaccgatattcagagcgagccgctgctggcgcttgccgatgaactgcggcacgccggagcggacgtcgagcccgtcgtcggcgacgtctcggtggagtatgacgcggggcggatgatcggggcggcggtcgaccgcttcggacggctcgatgtgctggtcgccaacgcaggcatcatcccgctcggcgacgcgctggaaatgaccgccgccggctgggacgaagtgatggccatcgacgggcgcggcatgttcctgtgctgcaaattcgcgatcgaggcgatgttgccgaccgggggtggcgccatcgtctgcctctcctcgatctccggactggcggggcagaagcggcaggcggcctacggtcccgccaagttcatcgccaccggcttgaccaagcacctggcagtcgagtgggccgaccggggtatcagagtcaacgccgtcgcccccgggacgattcgaaccgagcgggtcaagcggttcccggaggagccgggtggctcggagtacctggcggcggtcgagcgtatgcacccgatgggccgcatcggcgaaccagccgaagtcgccagcgccatcgtctttctcgcctccgacgacgcctccttcatcaccggcgccgtgctgccggtcgacgggggatatctagcgcagtag

SEQ ID NO: 1668 - protein, 257 aa, Mycobacterium sp. JLS
MTREHGRLHGKSAVITGAAFGIGRATAVLFAREGARLVVTDIQSEPLLALADELRHAGADVEPVVGDVSVEYDAGRMIGAAVDRFGRLDVLVANAGIIPLGDALEMTAAGWDEVMAIDGRGMFLCCKFAIEAMLPTGGGAIVCLSSISGLAGQKRQAAYGPAKFIATGLTKHLAVEWADRGIRVNAVAPGTIRTERVKRFPEEPGGSEYLAAVERMHPMGRIGEPAEVASAIVFLASDDASFITGAVLPVDGGYLAQ

SEQ ID NO: 1669 - DNA, 750 bp, Clostridium difficile 630
  CDS (1)..(750): transl_table=11
atgataaatcttacaggacaagtagcagttgttactggtggctctaggggtataggaaaagaaatagcaaaaaaactagcatcttttggggctgatgtagtaatcaattatacttctaaagaagatgaagcactaaaaactaaaaatgaaatagaaagtatgggggtaaagtgtacctctataaaatgtgatgtgtctaaatttgatgaagtgaatcaaatgatagattctgttgtaagcgaatttggaaaaattgatatattggttaataatgcaggcataactaaagatggtctgcttatgagaatgaaagaagaagattttgatagagttatagatataaacttaaaaggtgtctttaattgtacaaaagcagttactaaacctatgatgaaaaagaagtatggaagaataataaatatgacttcagtagttggaattatgggtaatgcagggcaaactaattattgtgcatcaaaagcaggtgtaattggatttacaaaagcttctgcaagagagttagcatcaagaaacataaatataaatgcagtagcacctggatttatagaaacagatatgactaaagtactaagtgatgatgtaaaagaatcaacactagcaaacataccaaagaaatcttatggtaaaccagaagatgtagccaatgccgtagcatttttagttagtgacatgtcaagttatataacaggacaagtaataaatgtagatggtggaatggtaatgcaataa

SEQ ID NO: 1670 - protein, 249 aa, Clostridium difficile 630
MINLTGQVAVVTGGSRGIGKEIAKKLASFGADVVINYTSKEDEALKTKNEIESMGVKCTSIKCDVSKFDEVNQMIDSVVSEFGKIDILVNNAGITKDGLLMRMKEEDFDRVIDINLKGVFNCTKAVTKPMMKKKYGRIINMTSVVGIMGNAGQTNYCASKAGVIGFTKASARELASRNININAVAPGFIETDMTKVLSDDVKESTLANIPKKSYGKPEDVANAVAFLVSDMSSYITGQVINVDGGMVMQ

SEQ ID NO: 1671 - DNA, 765 bp, Burkholderia vietnamiensis G4
  CDS (1)..(765): transl_table=11
atgagattgcagggcaagcgtgcgctggtgacggcggctggacagggcatcggccgcgcgaccgcgctgcggttcgcaagcgagggcgccgacgtgctggcgaccgacatcaacgacaccgcgctcgagcagctcgcagccgatgcgcaacgtgcgggcggccggctgtccacgcgccggctcgacgtgaccgctgcggccgacgtggcggcgctggcagcgcgggaacgcgcgttcgacgtgctgttcaactgcgcgggcttcgtgcatcacggctcgatcctcgactgcgacgagcgcgcgtgggcgttttcgttcgatctgaacgtcacgtcgatgtaccggctgatccgcgcgctgctgccggcgatgctggaggcgggcggcgcgtcgatcgtcaacatggcgtccgccgcgtcgagcgtgaagggcgtgccgaaccgtttcgtctacggcacgaccaaggcggccgtgatcggcctcaccaagtcggtcgccgccgatttcgtcgaacggcgcattcgctgcaacgcgatctgtcccggcacgatcgcgtcgccgtcgctcgaacagcgcatcgccgagcaggcgcgcgcacgcgaggtgtcgaccgacagcgtgcgcgcggccttcgtcgcgcgccagccgatgggccgcatcggcaccgccgacgaagtggccgcgctcgccgcgtatctcgcgtccgacgaagcgtcgttcaccaccggcacgattcacgtgatcgacggcggctggtcgaactga

SEQ ID NO: 1672 - protein, 254 aa, Burkholderia vietnamiensis G4
MRLQGKRALVTAAGQGIGRATALRFASEGADVLATDINDTALEQLAADAQRAGGRLSTRRLDVTAAADVAALAARERAFDVLFNCAGFVHHGSILDCDERAWAFSFDLNVTSMYRLIRALLPAMLEAGGASIVNMASAASSVKGVPNRFVYGTTKAAVIGLTKSVAADFVERRIRCNAICPGTIASPSLEQRIAEQARAREVSTDSVRAAFVARQPMGRIGTADEVAALAAYLASDEASFTTGTIHVIDGGWSN

SEQ ID NO: 1673 - DNA, 780 bp, Burkholderia vietnamiensis G4
  CDS (1)..(780): transl_table=11
atggcgcggctggccggcaaggtcgccgcggtgacgggcgcggcacgcggcatcggcgcggcgatcgcgcatgcgttcgcgcgcgagggcgcgtgcgtcgcgctgctcgacgtcgacgtcgagcacgcgcagcgcaccgccgccgcgatcgccgccgaggtcgacggcgcgcgcgtgctcgcactgcatgcggacgtcacgcgccaggactcggtgcgcgctgcgctggcgcggaccgaagccgaattcggcccgctcgacgtgctggtgaacaacgcgggcatcaacgtgttcgccgatccgctgacgatgagcgacgacgactggcgccgctgcttcgcggtcgacctcgacggcgtgtggcacggctgccgcgcggcgctgccgggcatggtcgaacgtggccgcggctgcatcgtgaacatcgcgtcgacgcatgcgttcagcatcattccgggctgctttccgtacccggtcgcgaaacacggcgtgctcgggctcacgcgtgcgctcggcatcgaatacgcggcgcacaacgtgcgggtgaacgcgatcgcgcccggctacatcgacacgcagctcacccgcgactggtgggaggcgcaggacgacccggcggcggcacgcgcgcagacgctcgcgctgcagccgatgaagcgcatcggccagccggacgaagtcgcgatgacggccgtgttcctcgcgtccgacgaggcgccgttcatcaatgccacgtgcatcaccgtcgacggcgggcgcgcggcgctgtaccacgactga

SEQ ID NO: 1674 - protein, 259 aa, Burkholderia vietnamiensis G4
MARLAGKVAAVTGAARGIGAAIAHAFAREGACVALLDVDVEHAQRTAAAIAAEVDGARVLALHADVTRQDSVRAALARTEAEFGPLDVLVNNAGINVFADPLTMSDDDWRRCFAVDLDGVWHGCRAALPGMVERGRGCIVNIASTHAFSIIPGCFPYPVAKHGVLGLTRALGIEYAAHNVRVNAIAPGYIDTQLTRDWWEAQDDPAAARAQTLALQPMKRIGQPDEVAMTAVFLASDEAPFINATCITVDGGRAALYHD

SEQ ID NO: 1675 - DNA, 780 bp, Streptococcus pyogenes str. Manfredo
  CDS (1)..(780)
atgacacatactaaagaagttgcatttatcactggtgctgcaagcggaattggaaaacaaatcggggaaaccttcttaaaagaaggtaaaacggttgtcttctcagatattaataaagaaaagctagatgaggttgttgctgactatactaaagaaggctatgacgcttttagtgttgtgtgcgatgtcaccaaagaagaagccatcaatgctgctattgatacggttgttgaaaaatatggtcgtattgatattttggttaacaacgcaggccttcaacatgttgccatgattgaagattttccaactgaaaaatttgaattcatgattaaaatcatgttgacagcaccatttattgccattaaacgtgcttttcctacaatgaaagctcaaaaacacggtcgtattattaatatggcttctatcaatggtgtcattggttttgctggcaaatccgcctacaattcagctaaacacggcttgatcggtctgaccaaagtaactgccttagaagctgctgattcaggcattacggtcaatgccatttgtcctggatatgttgacacaccactggttcgtggccagtttgaagacctttccaaaacaagaggtattccccttgaaaatgttcttgaagaagtgctatacccacttgttcctcaaaaacgcctcattgacgttcaagaaattgcagactatgtgtctttccttgccagtgataaggcaaaaggtgttacaggtcaagcctgtatcttagacggtggctacactgctcaataa

SEQ ID NO: 1676 - protein, 259 aa, Streptococcus pyogenes str. Manfredo
MTHTKEVAFITGAASGIGKQIGETFLKEGKTVVFSDINKEKLDEVVADYTKEGYDAFSVVCDVTKEEAINAAIDTVVEKYGRIDILVNNAGLQHVAMIEDFPTEKFEFMIKIMLTAPFIAIKRAFPTMKAQKHGRIINMASINGVIGFAGKSAYNSAKHGLIGLTKVTALEAADSGITVNAICPGYVDTPLVRGQFEDLSKTRGIPLENVLEEVLYPLVPQKRLIDVQEIADYVSFLASDKAKGVTGQACILDGGYTAQ

SEQ ID NO: 1677 - DNA, 801 bp, Bradyrhizobium sp. ORS278
  CDS (1)..(801): transl_table=11
atggccgtgacggaatcacctgagctcaccgacaaggtcgccttgatcaccggcgccgcacgcggcatcgggctcgcgaccgccaagcggtttttgcacgaaggctggcgggtggcgctgctcgacatagaggccaagctgctcgcggattcggccgctgcgctcaaatgtcccgatcgcacgctggcgctgcattgcgacgttgcagatgcagccatggtcgccgacgcgctggagcgtatcgccacgcgattcggccggctcgatgcgctcgtcaacaatgccggggtcgcgcggttcgcgtcggtgatggaaaccagcgagaccgattggcagcgcatcctggacgtcaacttgaccggaccattcctgtgcacccgggcggcggtgccgctgatgcgcgagcatggcggagccatcgtcaacatcacctcgatctcggccgtgcgcgcctcgacgctgcgctccgcctacggcaccagcaaggcggcgctcgcgcatctgaccaagcaactcgcagtggagctggcctcggccggcatccgcgtcaacgcggtggcgcccggtccggtcgagaccgcgatggcgcgggccgtgcacacgccggaaatccgcgccgactatcacgacgccattccgctcaatcgctacgggcttgaagaggagctggccgaggccatcttcttcctcagttcggagcggtcgagctacatcaccggccaggtgctggccgtggatggcggcttcgatgccgcgggaatcggtctgccgaccttgcgcggccaacgccggaacgcctga

SEQ ID NO: 1678 - protein, 266 aa, Bradyrhizobium sp. ORS278
MAVTESPELTDKVALITGAARGIGLATAKRFLHEGWRVALLDIEAKLLADSAAALKCPDRTLALHCDVADAAMVADALERIATRFGRLDALVNNAGVARFASVMETSETDWQRILDVNLTGPFLCTRAAVPLMREHGGAIVNITSISAVRASTLRSAYGTSKAALAHLTKQLAVELASAGIRVNAVAPGPVETAMARAVHTPEIRADYHDAIPLNRYGLEEELAEAIFFLSSERSSYITGQVLAVDGGFDAAGIGLPTLRGQRRNA

SEQ ID NO: 1679 - DNA, 735 bp, Bradyrhizobium sp. ORS278
  CDS (1)..(735): transl_table=11
atgtccgaccgcctcaagggcaagcgcgcctttgtcaccgccgccgctgccggcatcggccgcgcctgcgccatcgccttcgcgcgccagggcgccaccgtgtttgccaccgacatcgatgagaagggcctggcgacgctgaagagcgagggcatcgccgaggttaccacgctcgacgtgcgcaacacagccgccgtgaacgcgatggccgaacgggtcggcaaggtcgagatcctgctcaatgctgccggcttcgtgcacaacggcaccatcctcgactgctcggacggcgattgggacttctcgttcgacctgaacgtcaaatcgatgcaccgcacgatccgcgccttcctgccgaaaatgctcgatcagggcggcggcgccatcgtcaacatcgcctccgccgccggcgtcttcaaggcggcgccgaaccgctacgtctatggcgccaccaaagccgctgtcgcggcgctgacgcgctcggtcgcggccgacttcgtggccaggaagatccgctgcaactgcatctgcccaggcacgatcgaaacgccgtcgatgctgggacgcgcggcatcggccggtccgaacggcctcgagatgttcatctcgcgccagccgatgggccggctcggcaccgccgaagagatcgcgcatctcgccgtgtatctcgccagcgacgagagcgcgttcaccaccggcgtcgcgcacacgatcgacggcggctggacgctgtag

SEQ ID NO: 1680 - protein, 244 aa, Bradyrhizobium sp. ORS278
MSDRLKGKRAFVTAAAAGIGRACAIAFARQGATVFATDIDEKGLATLKSEGIAEVTTLDVRNTAAVNAMAERVGKVEILLNAAGFVHNGTILDCSDGDWDFSFDLNVKSMHRTIRAFLPKMLDQGGGAIVNIASAAGVFKAAPNRYVYGATKAAVAALTRSVAADFVARKIRCNCICPGTIETPSMLGRAASAGPNGLEMFISRQPMGRLGTAEEIAHLAVYLASDESAFTTGVAHTIDGGWTL

SEQ ID NO: 1681 - DNA, 744 bp, Xanthobacter autotrophicus Py2
  CDS (1)..(744): transl_table=11
atggctggacgacttcagggtaagaccgcgctggtgacggcggcgggacagggcatcggccgggccatcgccgaggccttcgtgcgcgagggcgcgagcgtgatcgccaccgacctcgacaccgccaagctcgaaggctttcccggcaccgcccgcaagctcgacgtgcgctccagcgaggccgtcgccgcgctggcgaaggagatcggcccggtggacgtgctggtgaatgccgctggctacgtccaccagggcaatatcttcgacacttcggagaaggactgggacttctccttcgacctcaatgtgaaggccatgcaccgcaccatctcggccttcctgccgggcatgctggagaagggcaaaggctccatcgtcaacatcgcctcggcggcgtcctccatccgcggcgtgccgaaccgctatgtctacggcgcctccaaggcggcggtcatcggcctcaccaaggcagtggcggcggacttcatcctgaagggcgttcgcgccaacgtcatctgccccggcaccatccagtcgccctcgctggacgagcgcatcgccgccgtctcggcccagaccggccgctcgctggacgacgtgcgggccgatttcgtcggccgccagcccatgggccggctcggcacgccggaggagatcgcggcgctcgcgctctatctcgcctccgacgagagcgccttcaccaccgggcagatccacatcatcgacggcggctgggcgctctag

SEQ ID NO: 1682 - protein, 247 aa, Xanthobacter autotrophicus Py2
MAGRLQGKTALVTAAGQGIGRAIAEAFVREGASVIATDLDTAKLEGFPGTARKLDVRSSEAVAALAKEIGPVDVLVNAAGYVHQGNIFDTSEKDWDFSFDLNVKAMHRTISAFLPGMLEKGKGSIVNIASAASSIRGVPNRYVYGASKAAVIGLTKAVAADFILKGVRANVICPGTIQSPSLDERIAAVSAQTGRSLDDVRADFVGRQPMGRLGTPEEIAALALYLASDESAFTTGQIHIIDGGWAL

SEQ ID NO: 1683 - DNA, 765 bp, Symbiobacterium thermophilum IAM 14863
  CDS (1)..(765): transl_table=11
atgcagctcttctcgctggaaggccgggtcgccctggtgaccggggctgggcgggggatcggccgggccctggcgctgggcctggcggacgccggggcggacgtggtttgcctggccaggaccggctccgaggtggaggccgcggcggaggaggtccgggccaggggccgccgggcgctggcggtgaccgcagacgtgacgagccaggcgcaggtgacggaggccgtcgaggcggccctggaccggttcggcaagatcgacatcctggtgaacaacgcgggcatcaacatccgcaagccggcgctggaggtggcggaggcggactgggaccgggtggtgcagaccaatctgaagggtcccttcctggtcgcccagacggtgggccggcacatgtgcgagcggggctacggccggatcatcaacgtcgcatcggtaggcggagcggtggcgctgcgcaccggggttgcctacggcgccagcaaggcggggctgatgcacatgacccgtatcctggccatggagtgggcccggtacggggtgacggtgaacggcatcggcccctggtacttccgcacgccgctgacggagaagctgctgcaggacgaacagtacgtggcggagattctggcccgcacgccgatgcggcgcatcggcgacctggcggagctggtggggccggtggtgttcctcgcgtcggacgcgtccagctacgtcaccgggcaggtgctgatggtggacgggggcatgtctgtctacgggttctga

SEQ ID NO: 1684 - protein, 254 aa, Symbiobacterium thermophilum IAM 14863
MQLFSLEGRVALVTGAGRGIGRALALGLADAGADVVCLARTGSEVEAAAEEVRARGRRALAVTADVTSQAQVTEAVEAALDRFGKIDILVNNAGINIRKPALEVAEADWDRVVQTNLKGPFLVAQTVGRHMCERGYGRIINVASVGGAVALRTGVAYGASKAGLMHMTRILAMEWARYGVTVNGIGPWYFRTPLTEKLLQDEQYVAEILARTPMRRIGDLAELVGPVVFLASDASSYVTGQVLMVDGGMSVYGF

SEQ ID NO: 1685 - DNA, 729 bp, Agrobacterium tumefaciens
  CDS (1)..(729): transl_table=11
atgactcgcaaaacggcattcgtgcttggaggttccaagggcattggagctgaaatcgttcgcaccttggcagtggccggccacgatgtggctttcacctacaactcatcgacggacctagccgcagccttatgcgatgagctgagagctgcagggcttacttgtttttgttttagagcggatgttcgagatctttctagcgtgccgcaagcgatagcgaaggcggcatcgcaactagggcatatcaacatcctcataaacaatgccggaattttaaaacgtggcaaactgcaagaattcgatcttctggcgttcgacgaaattttcaatgtaaatgtgagggggcctttcattgcttcgcaagctgtcctgccattcatgccaaacggcggaagaatacttatgatgggaagtgttgcagcagacagatcggcgatcgaaggttcagcattctatgcagccaccaaggcagcactgtcttctatggctcgcgggtttgcccgggacgttgcgcccttggggatcacagtcaataccatccaaccaggtgttatcgaaacaaacatggtatcgcccggtgctctcagtcgagacgcgtatcatgcaattccggccgggcgaaaaggtctgccgagcgatgtggcgaacctcgtcaggtttttagtcagtgacgaatcttcttatataaccggaacaagtctcaacatagatggcggttatttggcctag

SEQ ID NO: 1686 - protein, 242 aa, Agrobacterium tumefaciens
MTRKTAFVLGGSKGIGAEIVRTLAVAGHDVAFTYNSSTDLAAALCDELRAAGLTCFCFRADVRDLSSVPQAIAKAASQLGHINILINNAGILKRGKLQEFDLLAFDEIFNVNVRGPFIASQAVLPFMPNGGRILMMGSVAADRSAIEGSAFYAATKAALSSMARGFARDVAPLGITVNTIQPGVIETNMVSPGALSRDAYHAIPAGRKGLPSDVANLVRFLVSDESSYITGTSLNIDGGYLA

SEQ ID NO: 1687 - DNA, 744 bp, Bacillus licheniformis ATCC 14580
  CDS (1)..(744): transl_table=11
atgctggaaaataaaacagccgttgtgacaggagcctcaagaggaatcggccgcgcgatcgccctggacctggcgaaaaacggagcaaatgtcgtcgtcaactacgcgggaaatgaagcgaaagcgaacgaagtcgtagacgaaatcaaagcgctcggccgcgatgcgtttgcttttaaagcggacgtttccaatgcggatgaggttcaggcgatgatgaaggaagcggtcggacgcttcggcacgcttgacatccttgtcaacaatgcgggcattactaaagacaatctgttcatgagaatgaaagaagatgaatgggacgacgtcattaacataaacttaaaaggtgtgttcaattgttcaaaagctgtgacaagacagatgatgaaacaaagaagcggccggatcatcaatatcacctcggttgtaggcgtcgtcggtaacgccgggcaggccaactatgtcgcggctaaatcaggcgtgatcggcttgacgaaaacgctggcaaaagaactggcgtcaagaaacatcactgtgaatgcgatcgctccgggattcatttcgacggaaatgacggacaagctgacaaaagacattcaagacgaaatgctgaagcagattccgcttgcgcggttcggcgagccgtctgacatcagcagcgccgttgttttcctcgcatctgaccatgcgagctacatgaccggccagacgctgaacatcaacggcggaatggctatggtttaa

SEQ ID NO: 1688 - protein, 247 aa, Bacillus licheniformis ATCC 14580
MLENKTAVVTGASRGIGRAIALDLAKNGANVVVNYAGNEAKANEVVDEIKALGRDAFAFKADVSNADEVQAMMKEAVGRFGTLDILVNNAGITKDNLFMRMKEDEWDDVININLKGVFNCSKAVTRQMMKQRSGRIINITSVVGVVGNAGQANYVAAKSGVIGLTKTLAKELASRNITVNAIAPGFISTEMTDKLTKDIQDEMLKQIPLARFGEPSDISSAVVFLASDHASYMTGQTLNINGGMAMV

SEQ ID NO: 1689 - DNA, 780 bp, Burkholderia pseudomallei K96243
  CDS (1)..(780): transl_table=11
atgaaccggctcgcgggcaaggtcgcgatcgtgacgggcgcggggcgcggcatcggcgcggcgatcgcgcgcgcgttcgtgcgcgaaggcgcggccgtcgcgatcgcggagctcgacgcggcgctcgccgaagagagcgccgacgcgatcgcgcgcgacacggccggcgcgcgggtgctcgcggtgccgacggacgtcgcgcaggccgagtcggtcgcggcggcgctcgcgcgcacggagcgcgcattcggcccgctcgacgtgctcgtgaacaacgccggcgtcaacgtgttcggcgatccgctcgcgctcaccgacgaagactggcggcgctgcttcgcgatcgatctcgacggcgtctggaacggctgccgcgcggcgctgcccggcatggtcgagcgcgggcgcggcagcatcgtgaacatcgcgtcgacgcatgcgttcaagatcattccgggctgtttcccgtacccggtcgcgaagcatggcgtgctgggcctcacgcgcgcgctcggcatcgaatacgcgccgcgcaacgtgcgcgtgaacgcgatcgcgcccggctacatcgagacgcagttgacgcatgactggtggagcgcgcagcccgatccgcaggccgcgcgccgcgagacgctcgcgctgcagccgatgaagcggatcgggcgtcccgacgaagtcgcgatgaccgcggtattcctcgcgtcggacgaagcgccgttcatcaacgcgagctgcatcacgatcgacggcggccgctcggtgctgtaccacgactga

SEQ ID NO: 1690 - protein, 259 aa, Burkholderia pseudomallei K96243
MNRLAGKVAIVTGAGRGIGAAIARAFVREGAAVAIAELDAALAEESADAIARDTAGARVLAVPTDVAQAESVAAALARTERAFGPLDVLVNNAGVNVFGDPLALTDEDWRRCFAIDLDGVWNGCRAALPGMVERGRGSIVNIASTHAFKIIPGCFPYPVAKHGVLGLTRALGIEYAPRNVRVNAIAPGYIETQLTHDWWSAQPDPQAARRETLALQPMKRIGRPDEVAMTAVFLASDEAPFINASCITIDGGRSVLYHD

SEQ ID NO: 1691 - DNA, 738 bp, Silicibacter pomeroyi DSS-3
  CDS (1)..(738): transl_table=11
atgtttgatctgaccggaaagaatgccctgatcaccggtgcctcgggtggcatcgggggcgccatcgcgcgcgcgctgcatgctgccggcgcctcggtggtgctgtcgggcacccgggtcgagccgcttcaggcgctggccgacgagctgggcgaacgcgcccatgtgctgacctgcaatctgagcgatatggcggccgtcgaggcgctgccgaaacaggccgccgacctgttgggctcggtcgatatcctggtgaacaatgccggcatcacgcgcgacaacctgttcatgcgtatgtcggatgacgaatggcaaagcgtgatcgacgtcaacctgaccgccaccatgaaactgtgcaagggcgtgctgcgcggcatgatgaaggcgcgctggggccggatcgtgaatatctcgtctgtggtgggtgccatcggcaacccggggcagggcaattatgccgcctccaaggcgggtgtcgtcggcatgtccaaggcgctggcctatgaggtcgccagccggggaatcaccgtcaacgcggtggcaccgggctttatcaccacggcaatgaccgacaagctgacggatgagcagaaatcgggcctgctgacgcaggttcccgctggccgcatgggttcgcccgaggaaatcgcggcggcggtcctgtatcttgccagtcccgaggccgcttatgtgaccggtgccaccttgcatgtgaacggcggtatggccatgttgtga

SEQ ID NO: 1692 - protein, 245 aa, Silicibacter pomeroyi DSS-3
MFDLTGKNALITGASGGIGGAIARALHAAGASVVLSGTRVEPLQALADELGERAHVLTCNLSDMAAVEALPKQAADLLGSVDILVNNAGITRDNLFMRMSDDEWQSVIDVNLTATMKLCKGVLRGMMKARWGRIVNISSVVGAIGNPGQGNYAASKAGVVGMSKALAYEVASRGITVNAVAPGFITTAMTDKLTDEQKSGLLTQVPAGRMGSPEEIAAAVLYLASPEAAYVTGATLHVNGGMAML

SEQ ID NO: 1693 - DNA, 744 bp, Bacillus clausii KSM-K16
  CDS (1)..(744): transl_table=11
atgttaacaggaaaaacggctgttgtaacaggcgcttcacgtggaattggcaaagcgatcgcccttgaacttgctgccaaaggggcgaatatcgtcgtcaattatgcaggaaatcgagaccgtgctgaagaagtagtggccaacattaaagcgcttggccaagaggcgtttgcgtatcaggcagacgttgcctccgaaggggaagtggcagcgatgatgaaagaagcgatcggccgctttcaatcaattgatattttagtaaacaatgcaggcattacgcgcgataacttgctaatgagaatgaaagaagacgattgggatgccgtcatcaatacgaacttaaaaggggtgttccactgcgcgaaagcagtcagccggcaaatgatgaaacaacgtgctggcagaatcatcaatgtctcgtctgtcgttggcgtaatgggtaacgctgggcaagcgaattatgttgccgccaaagcaggcgtcattggcttgactaagtctttggcgcgggaattggcagggcgaggcattcttgtcaatgcggtggcgccaggctttattacgacagatatgacagatgagctagcaagcgaaacaaaggaacagctgcttcaacaaatcccattggcgaagcttggcgaaccagaggatatcgcccgtgttgttcggtttttggcaagcgatgacgccgcttacttaaccggtcaaacgatccacgttgacggcggcatggtcatgccttaa

SEQ ID NO: 1694 - protein, 247 aa, Bacillus clausii KSM-K16
MLTGKTAVVTGASRGIGKAIALELAAKGANIVVNYAGNRDRAEEVVANIKALGQEAFAYQADVASEGEVAAMMKEAIGRFQSIDILVNNAGITRDNLLMRMKEDDWDAVINTNLKGVFHCAKAVSRQMMKQRAGRIINVSSVVGVMGNAGQANYVAAKAGVIGLTKSLARELAGRGILVNAVAPGFITTDMTDELASETKEQLLQQIPLAKLGEPEDIARVVRFLASDDAAYLTGQTIHVDGGMVMP

SEQ ID NO: 1695 - DNA, 804 bp, Thermobifida fusca YX
  CDS (1)..(804): transl_table=11
atggccatttcaggccgtttgacggacaagatcgcactcatcaccggagccggatcgggattcggacgcgccagcgccctgcgtttcgcagctgaaggagcctccgtggtctgcgtcgaccgcaacgccgacgctgcccacagcgccgctgacgacatcgccgccgcaggcggcaccgccctcgcactcaccgccgacgtgtcctccgctgccgacgcggaacgaatgactaccaccacgctggaacacttcggccgcatcgacatcgtcttcgccaacgcgggcatccccggctccggcgacgcccacaccaccaccgaagaagaatgggaccgggtcatcgccatcaacctcaaaggcgtctggctgacctccaaatacgcgctgccgcacatggtcgaacgccgcagcggggtcatcaccaaccaggccagcgtcggcgggctcatcggcatccccggcatcttcccctacgccgcagccaaaggcggcgtgatctccatgacccggcaaatggccgccgcctacgcaccccacaacatccgggtcaatgcgatctgcccgggcggggtctacaccccgctggtggaactgtcccgtcaaaagcgcggcctgaccgccagcagcgtcgaggaagccaacgctatcgccgcacgcaactaccccctgggccgtctcggcacagtggaggagatcgcctccctcgccctcttcctcgccagcgacgaagccgcctggatcaccgggggcatctaccccgttgacggcggacgcggcgcggtagggaccattcccaccgactga

SEQ ID NO: 1696 - protein, 267 aa, Thermobifida fusca YX
MAISGRLTDKIALITGAGSGFGRASALRFAAEGASVVCVDRNADAAHSAADDIAAAGGTALALTADVSSAADAERMTTTTLEHFGRIDIVFANAGIPGSGDAHTTTEEEWDRVIAINLKGVWLTSKYALPHMVERRSGVITNQASVGGLIGIPGIFPYAAAKGGVISMTRQMAAAYAPHNIRVNAICPGGVYTPLVELSRQKRGLTASSVEEANAIAARNYPLGRLGTVEEIASLALFLASDEAAWITGGIYPVDGGRGAVGTIPTD

SEQ ID NO: 1697 - DNA, 753 bp, Prochlorococcus marinus str. NATL2A
  CDS (1)..(753): transl_table=11
atgacattatcaaaattacttgaaggacagactgcaattgtaactggcgcaagcagaggtattggtaaagctattgcaatttttctagcgaaggaaggagcagaagtaatcatcaattattcttcatctttggagaatgcaaataaagtcgtatcagaaataaactcctttggaggcaaagcataccctcttcaagctgatatttctaatgaaaactcggtaaatgaattaataaaaacagtactggagaaaaataataaaattgatgtcctcgtcaataacgctggtataactaaagatggccttttaatgagaatgaaaacggacgattggcagaaagttttagatcttaacttgagtggtgttttttattgcacaagagcggtatcaaggcagatgttgaagcaaaaaaaaggaagaattatcaacataacttctgtcgttgggttgatgggcaacccagggcaagcaaattattctgcagccaaggcaggagtagtaggtctcacacaaagtgctgcaaaagaatttgccagcagaggaattactgtaaatgcagttgcccctggttttatttcaactgatatgacaaaagatctgaatagtgaatcaatcctttctgctatcccgcttggacgattcggcaaccctgaagatgttgcaggggcagtgaagtttttagcagcggatccttcggcttcttacataacaggtcaggtaattcaagttgatggagggatggttatgagttaa

SEQ ID NO: 1698 - protein, 250 aa, Prochlorococcus marinus str. NATL2A
MTLSKLLEGQTAIVTGASRGIGKAIAIFLAKEGAEVIINYSSSLENANKVVSEINSFGGKAYPLQADISNENSVNELIKTVLEKNNKIDVLVNNAGITKDGLLMRMKTDDWQKVLDLNLSGVFYCTRAVSRQMLKQKKGRIINITSVVGLMGNPGQANYSAAKAGVVGLTQSAAKEFASRGITVNAVAPGFISTDMTKDLNSESILSAIPLGRFGNPEDVAGAVKFLAADPSASYITGQVIQVDGGMVMS

SEQ ID NO: 1699 - DNA, 741 bp, Ralstonia eutropha JMP134
  CDS (1)..(741): transl_table=11
atgaagctgaaagacaaggtggccgtgatcacgggcgcggctgcaggcattgggcaggcgactgcgcggaagttcgcaggtgaaggcgctacggtgattctctgcgaccgagcggcagatgcagtacagcaagaggccaaaagcctgaggtcggagggctatagggtcgctgcctattcgttggacgtcaccgaccgcgcgggcgtggacgctttggccgcggatatcctggggaattttgggcgcatcgacatactggtcaacaacgcgggcatcacgctggatgcaaaggtcacccgcatgacagaagagcagtttgaccgggtgatcgatgtcaacctcaagggtgtgttcaactgcacgcaggcggtaatcggcgcaatgctcgagcagcagtccggggtcattctgaacgcgtcgagcgtggttggactctacggcaacttcggtcagtcgaattatgcggctagcaagttcggtgtcatcggatttaccaagacctgggcgagagagctcgggccgaaagggattcgcgtgaatgccgtgtgccctggctttatcgagaccgacattctgaagacgatgcctgagaaggtgcttgacggatttcgttccaattgctggcagcgacgcctcggctctccgaaagagattgcgaacgtctatgcgtttcttgcgtctgatgacgccagctttgttaacggagaagcgattgaggtttcgggagggctttcgatctga

SEQ ID NO: 1700 - protein, 246 aa, Ralstonia eutropha JMP134
MKLKDKVAVITGAAAGIGQATARKFAGEGATVILCDRAADAVQQEAKSLRSEGYRVAAYSLDVTDRAGVDALAADILGNFGRIDILVNNAGITLDAKVTRMTEEQFDRVIDVNLKGVFNCTQAVIGAMLEQQSGVILNASSVVGLYGNFGQSNYAASKFGVIGFTKTWARELGPKGIRVNAVCPGFIETDILKTMPEKVLDGFRSNCWQRRLGSPKEIANVYAFLASDDASFVNGEAIEVSGGLSI

SEQ ID NO: 1701 - DNA, 756 bp, Ralstonia eutropha JMP134
  CDS (1)..(756): transl_table=11
atgcgactgcaaggcaaggttgcgattctcaccggtgctgcgggcggtatcggccgcgctaccgcgcttggtttcgcgcgcgaaggcgcgagcattgtggtgaccgacatcaaccgcgacggcgcgcaggaagtcgccgacacgatcaacgcagccggcgggcgtgccatggcactggcgcacgacgtgggctgcgaaacgcagtggacgcgagttgtcgacgctgcggtcgaggcattcggcacggtcgacgttcttttcaacaatgcgggcatcttcgtgctcaagccgcttgccgaaacgacgctggacgagtggaaccgcctcatggcgatcaacgtcacgggcgtgttccttggcatgaagcacgtgatgccgctgatggcgcgcgccgggaagggctcggtcatcaacgtgtcttcggtcgccggcctggtcggctcgccgcggtccacgatgtacagcgccagcaagggtgccgtgcgtgccatgacgaagggcgcagcactggagtatgcggcgaagggcgtgagggtcaattcgatccatcccggccttatcgatacggccatggccgactacgcttcgggcacggcgggacgcagcaagcaggatctgggccaggtcatgtcgccgatgggccgactgggcacggccgatgaagtcggcggcctcgctctgttcctcgcttcggacgagtcgtcctacatgaacggcgcggagttggtgctggacggcggattcacggcggcctag

SEQ ID NO: 1702 - protein, 251 aa, Ralstonia eutropha JMP134
MRLQGKVAILTGAAGGIGRATALGFAREGASIVVTDINRDGAQEVADTINAAGGRAMALAHDVGCETQWTRVVDAAVEAFGTVDVLFNNAGIFVLKPLAETTLDEWNRLMAINVTGVFLGMKHVMPLMARAGKGSVINVSSVAGLVGSPRSTMYSASKGAVRAMTKGAALEYAAKGVRVNSIHPGLIDTAMADYASGTAGRSKQDLGQVMSPMGRLGTADEVGGLALFLASDESSYMNGAELVLDGGFTAA

SEQ ID NO: 1703 - DNA, 774 bp, Pseudomonas fluorescens PfO-1
  CDS (1)..(774): transl_table=11
atgacgactctttctggcaagaccgcactggttaccggctccaccagcggaatcgggctgggcatcgccctgacgctggccaaggctggcgccaacctgatcctaaacggctttggcgacgcctccaaggtgatcgccgaagtcgagcagttcggcggcaaggtcggccatcacccggcggacgtcagcgatcccgcccagatcgccgacatgattgcctacgccgaacgcgagttcggcggcgtggacattctggtcaacaacgccggcatccagcacgtcgcggcggtggaagaatttccggtggagcgctgggattcgatcatcgcgatcaacctgtcgtcggtgtttcacagcactcgcctgagtttgccgggcatgcgcgccaagggctgggggcgaatcgtcaacatcgcctcggtgcatggtctggtcggttccaccggcaaagccgcgtacgtggcagccaagcatggggtgatcggcttgaccaaagtggtcggcctggaaaccgccgccagcaacgtcacctgcaacgccatctgcccgggctgggtgctgacgccgctggtgcagaagcagatcgatgatcgcgcagccaagggtgtcgacccgcagcaggcgcaacacgatctgctggccgaaaagcagccgtcgctggagttcgtcacgccggcgcatctgggtgaactggtgctgttcctgtgcagcgaggccggcagccaggtgcgtggcgccgcgtggaatatcgatggcgggtggctcgcgcagtaa

SEQ ID NO: 1704 - protein, 257 aa, Pseudomonas fluorescens PfO-1
MTTLSGKTALVTGSTSGIGLGIALTLAKAGANLILNGFGDASKVIAEVEQFGGKVGHHPADVSDPAQIADMIAYAEREFGGVDILVNNAGIQHVAAVEEFPVERWDSIIAINLSSVFHSTRLSLPGMRAKGWGRIVNIASVHGLVGSTGKAAYVAAKHGVIGLTKVVGLETAASNVTCNAICPGWVLTPLVQKQIDDRAAKGVDPQQAQHDLLAEKQPSLEFVTPAHLGELVLFLCSEAGSQVRGAAWNIDGGWLAQ

SEQ ID NO: 1705 - DNA, 819 bp, Pseudomonas fluorescens PfO-1
  CDS (1)..(819): transl_table=11
atggctgaacctctgtccctgccaccggtgcccgagccaccaaaaggcgagcgtctgaaaaacaaggttgtgttgctgaccggcgccgcccaaggcatcggcgaagcaatcgtcgcgaccttcgcctcccagcaggccaaactggtgatcagcgatatccaggccgaaaaggtcgagaaagtcgccgcccactggcgcgagcagggcgccgatgtgcaagcgatcaaggccgacgtatcgcgtcagcaggatctgcacgccatggccaaactggccatcgaactgcacgggcgcatcgacgtgctggtcaattgcgccggggtcaacgtgttccgtgatccgctggaaatgaccgaagaagactggaaacgctgcttcgcgatcgacctcgacggcgcctggtatggctgcaaggccgtattgccgcagatgatcgagcagggcatcggcagcatcatcaacattgcctcgacccattccacgaacatcattcccggctgcttcccgtacccggtggccaagcatggcctgctcggcctgacccgcgcgctgggcatcgagtacgcgccgaagggtattcgggtcaacgcgattgcaccgggctacatcgaaacccagctcaacgtcgattactggaacggtttcgccgacccgcacgccgaacgtcagcgcgctttcgatctgcacccaccgaaacgcatcggccaaccgatcgaagtggcaatgactgctgtattcctggccagtgatgaagcgccgttcatcaacgcctcgtgcatcactatcgatggtggtcgctcggtcatgtaccacgactga

SEQ ID NO: 1706 - protein, 272 aa, Pseudomonas fluorescens PfO-1
MAEPLSLPPVPEPPKGERLKNKVVLLTGAAQGIGEAIVATFASQQAKLVISDIQAEKVEKVAAHWREQGADVQAIKADVSRQQDLHAMAKLAIELHGRIDVLVNCAGVNVFRDPLEMTEEDWKRCFAIDLDGAWYGCKAVLPQMIEQGIGSIINIASTHSTNIIPGCFPYPVAKHGLLGLTRALGIEYAPKGIRVNAIAPGYIETQLNVDYWNGFADPHAERQRAFDLHPPKRIGQPIEVAMTAVFLASDEAPFINASCITIDGGRSVMYHD

SEQ ID NO: 1707 - DNA, 741 bp, Rhodobacter sphaeroides 2.4.1
  CDS (1)..(741): transl_table=11
atggccggtcggctggagggcaagcgcgcgctggtgacggcggcagggcaggggatcgggcgcgcctctgcgctggccatggcgcgcgagggcgcgcgtgtgctggcgaccgacctgaatgcggcagcgctcgaagggcttgcggccgaagggctcgaggtgcagccgctcgatgtgcgcgatccggcctcgatcgcggccgctgtcgcggcggcagggccgctcgacgtgctcttcaactgcgcgggcttcgtggcctcgggcacgatcctcgactgcgacgaggaggactgggccttctccgtcgggctgaacctcaccggcatgtatcggatgtgccgcgccttcctgccgggcatgatcgcgggcggcggcgggtcgatcatcaacatggcctcggtcgtgtccgcggccatcgcggcgcccaaccgcttcgtctacggcaccaccaaggcgggggtcgtggggctcaccaaatccatcgccgccgatttcatcgggcagggcatccgctgcaacgcgatctgccccggcaccgtcgaaagcccctcgctcgaggaccggctccgcgccaccggcgattacgaggccgcgcggcgcgccttcgtggcccgccagcccatcggccgcatcggccgcccggaggagatcgcggcgcttgtcgtctatctcgcttcggacgaatccgcctacaccaccggggtcgcccatgtcatcgacgggggctggtccaatatctga

SEQ ID NO: 1708 - protein, 246 aa, Rhodobacter sphaeroides 2.4.1
MAGRLEGKRALVTAAGQGIGRASALAMAREGARVLATDLNAAALEGLAAEGLEVQPLDVRDPASIAAAVAAAGPLDVLFNCAGFVASGTILDCDEEDWAFSVGLNLTGMYRMCRAFLPGMIAGGGGSIINMASVVSAAIAAPNRFVYGTTKAGVVGLTKSIAADFIGQGIRCNAICPGTVESPSLEDRLRATGDYEAARRAFVARQPIGRIGRPEEIAALVVYLASDESAYTTGVAHVIDGGWSNI

SEQ ID NO: 1709 - DNA, 774 bp, Burkholderia sp. 383
  CDS (1)..(774): transl_table=11
atgaatcgtctcgcaggcaaagttgccatcgtcaccggcgccggtagcggtaccggcatgggcgccgtcatcgcgcgcgtgttcgccgcggaaggcgccacggtggtcgtgacggccaacgccaatcgccaggacaacatggacacgctggttcgggagatcaccgacctcggccagagcgcgtcgtcggcggtgctcgacgtgacccgtcaggaccagtgggcgtcggtcgtggcggatacggtgcagcgccatggccgcatcgacatcctgatcaacaacgcaggcacgccgggcccgcgcgacggcagctgggacaaggcgacggccgaagatttccatcatgtgatcgacgtgaacctgaacagccagttctacggaatcaaggccgtcacgccgcatatggagcgccagggcaacggcgcgatcgtcaatatctcgtcggcggcgggcatcatcgtgttccccgacgtgcccccgggttacagcgcctccaagggcgccagccgtcatctgaccaaggcggccgccgtggatttcgcccgccgaggcatccgcgtcaacggaatctatcccgggctgatcgaaacgccgatggccgctcatttcaccgagaatccggagatgctggcgggcctgctcaagggcattccgatcggccgggtcgggacgtccgaggaaatcgccaaggccgcgctgttcctggccagcgacgatgcgtcctacgtcatcggtgccgagctggtggtcgatggcggcttgacgagcatttga

SEQ ID NO: 1710 - protein, 257 aa, Burkholderia sp. 383
MNRLAGKVAIVTGAGSGTGMGAVIARVFAAEGATVVVTANANRQDNMDTLVREITDLGQSASSAVLDVTRQDQWASVVADTVQRHGRIDILINNAGTPGPRDGSWDKATAEDFHHVIDVNLNSQFYGIKAVTPHMERQGNGAIVNISSAAGIIVFPDVPPGYSASKGASRHLTKAAAVDFARRGIRVNGIYPGLIETPMAAHFTENPEMLAGLLKGIPIGRVGTSEEIAKAALFLASDDASYVIGAELVVDGGLTSI

SEQ ID NO: 1711 - DNA, 780 bp, Burkholderia sp. 383
  CDS (1)..(780): transl_table=11
atgaatgtcaagattgacggccgactggccggcaaggtcgccgtcgtgagcggcggcgccggtggctgtggcggcgcggcgtccgaactgttcgccgcacagggcgcgaaggtcgcgatcatcgaccgcgacggcgacgccgctgaaacactcgcatcccggctgcgcgacgcgggcctgcaggcgatcggcttcggcgccgacgtgtcgaaacaggccgaagtccagcaggccgtgaacgccgcgcgggagcagtacggcaacgcggacatcctgttcaatcacgccggcacgctgatcgtcaaaccgttcctcgacatcgaggagtcggaatgggactggctgatgggcgtgaacgtgaagagcatgttcctgatgacgaaagcggtgctgccgcagatgctggagaaggggcggggcagcatcgtctgcacgtcgtcgatttccgcggtatgcgcgacgccgggcgaggtgctgtatgacgcgaccaagggcgcgtgccacatgttcgcgcgggcgattgcggtcgagtaccgcgaccgcggcattcggtgcaacgcgctcgcaccggggttcatccgcacgccgcacgggatgcgcgaactgaaggacctgcaggcgatgggtgtcgacgcgaccgaggcggcgatcgcggttcagcaaggccgcctgtgcgagccgtcggaagtcgcggcggcggcactgttcctcgcttccgacgagtcgagtttcgtcaacggcacccacctgttcgtcgacaactgcttctccgccgtctga

SEQ ID NO: 1712 - protein, 259 aa, Burkholderia sp. 383
MNVKIDGRLAGKVAVVSGGAGGCGGAASELFAAQGAKVAIIDRDGDAAETLASRLRDAGLQAIGFGADVSKQAEVQQAVNAAREQYGNADILFNHAGTLIVKPFLDIEESEWDWLMGVNVKSMFLMTKAVLPQMLEKGRGSIVCTSSISAVCATPGEVLYDATKGACHMFARAIAVEYRDRGIRCNALAPGFIRTPHGMRELKDLQAMGVDATEAAIAVQQGRLCEPSEVAAAALFLASDESSFVNGTHLFVDNCFSAV

SEQ ID NO: 1713 - DNA, 741 bp, Burkholderia sp. 383
  CDS (1)..(741): transl_table=11
atgaaactcaaggacaaggtggcgatcatcacgggcgccgcggcggggatcgggcaggcaacggccaggaccttcgcgagcgaaggggcgatcgtcgtgttgtgcgaccgttccgcagacgcggtgcgacacgaggcgcggcacctgaacgagcgcggccattcggcggtcgcgcatacgctcgacgtgaccgaccgggccggcatcgacgcggtaatcgcgaacgtgaaggcgcagttcggccggatcgacattctcgtcaacaacgcgggcattacgcaggatgcgcggctcgtgaacatgagcgaggaacagttcgacaaggtcatcgacgtcaacctgaagggcgtgttcaactgcacgcaggcggtcgtcgacacgatgatcgagcagaagcgcggcgtggtgctcaacgcgtcgagcgtcgtcggcatctacgggaatttcggccagacgaactacgcggccagcaaattcggcgtgatcggtttcaccaagacgtgggccagggagctcggccctaaaggcattcgcgtcaatgcggtgtgcccgggcttcatcgagacggacatcctcaagacaatgccggacaaagtgctcgacgggtttcgggacgcatgctggcagcggcggttgggtacgccgagcgaaattgcgagcgtttacgcgttcctcgcgtcggacgaagccagtttcgtgaacgggacggcgatcgaggtgtcgggcgggttgtcggtgtag

SEQ ID NO: 1714 - protein, 246 aa, Burkholderia sp. 383
MKLKDKVAIITGAAAGIGQATARTFASEGAIVVLCDRSADAVRHEARHLNERGHSAVAHTLDVTDRAGIDAVIANVKAQFGRIDILVNNAGITQDARLVNMSEEQFDKVIDVNLKGVFNCTQAVVDTMIEQKRGVVLNASSVVGIYGNFGQTNYAASKFGVIGFTKTWARELGPKGIRVNAVCPGFIETDILKTMPDKVLDGFRDACWQRRLGTPSEIASVYAFLASDEASFVNGTAIEVSGGLSV

SEQ ID NO: 1715 - DNA, 792 bp, Burkholderia thailandensis E264
  CDS (1)..(792): transl_table=11
atgacgaagaatctggcgccgcgtcttgccggcaagcgcgcattcatcaccggcgcggcgggcggccttgggcgcgcgatcgcgcgtcggatggcggaacagggcgcgaaggtgttcttgaccgacatcgtcgacgcggccgtgctcgacgcgttcgcggccgagctcaacgatgcggcgggtgagcgcgtcgcgtgggcggccgtgcatgacgtcaccgacgaagcgcagtgggcgtcgcggctttcgcaggcgaacgacgcgatgggcgggctgtcggtgctcgtgcacaacgcgggcatcggctcgttcggcgccgtcgggcagatcgagcgcgacgaatggcggcgcgtgatggcgatcaacgtcgagagcatcgtgctcggcacgaagcgcgcgctgccgtatctggaggcgggcgcgcccgcgtcgatcgtcaacatctcgtcggtcgccgcgttcaagcaggagcccgactacaccgcgtacaacgcgtcgaaggcggcggtcgcttcgctgacgaagtcgatcgcggtcgactgcgcgcgccggcagaccgaggtgcgctgcaactcgatccatccgtcgttcatcatgacgggcatcgtcgcgccgatcgtccggcaggtcggcgagaaggaggcggcgcgcaagctcgcgcgcggcgtgccgatgcgccggctcggcgagccggacgatgtcgcgtatgcggccgtctatctcgcatccgacgagagccgttacgtgacgggcgcggagctcgtgatcgacggcgggatgtgcgcggtctga

SEQ ID NO: 1716 - protein, 263 aa, Burkholderia thailandensis E264
MTKNLAPRLAGKRAFITGAAGGLGRAIARRMAEQGAKVFLTDIVDAAVLDAFAAELNDAAGERVAWAAVHDVTDEAQWASRLSQANDAMGGLSVLVHNAGIGSFGAVGQIERDEWRRVMAINVESIVLGTKRALPYLEAGAPASIVNISSVAAFKQEPDYTAYNASKAAVASLTKSIAVDCARRQTEVRCNSIHPSFIMTGIVAPIVRQVGEKEAARKLARGVPMRRLGEPDDVAYAAVYLASDESRYVTGAELVIDGGMCAV

SEQ ID NO: 1717 - DNA, 744 bp, Burkholderia thailandensis E264
  CDS (1)..(744): transl_table=11
atgggagacagactggcaggcaagacggcgctcgtcacggccgccgcgcagggcatcggccgcgcggcggccgagcggctcgcgcgcgaaggcgcgcgcgtgatcgcgacggatctgcgcatcgacgcgttgcgcgacggcccgttcgacgcgcgcgtgctcgacgtgcgcgacggcgcggcgatcggcgcgctcgccgacgcgatcggccccgtcgacgcgctgttcaactgcgcgggcttcgtccacgcgggctcggtgctcgacgcgaccgaggacgaatgggacttcggcttcgatctgaacgtgaagtcgatgtaccggacgatccgcgcgttcctgcccgcgatgctcgcgcgcgagcgcggctcgatcatcaacatggcgtccgccgcgtcgagcgtgaagggcgtgccggaccggttcgtctacggtgcgacgaaggcggccgtgatcggcctgacgaagtcggtcgccgccgatttcgtcacgcacgggattcgctgcaatgcgatctgcccgggcaccgtcgaatcgccgtcgctcgatgcgcgcatcgtcgagcaggcgcgcgcgcgcggcgaatcggtcgacgcggtgcgcgcggcgttcgtcgcgcgccagccgatggggcgcatcggcaagccgcaggaaatcgcggcgctcgtcgcatatctcgcgtccgacgaatcgtcgttcacgacgggcgcgatccatctgatcgacggcggctggtcgaactga

SEQ ID NO: 1718 - protein, 247 aa, Burkholderia thailandensis E264
MGDRLAGKTALVTAAAQGIGRAAAERLAREGARVIATDLRIDALRDGPFDARVLDVRDGAAIGALADAIGPVDALFNCAGFVHAGSVLDATEDEWDFGFDLNVKSMYRTIRAFLPAMLARERGSIINMASAASSVKGVPDRFVYGATKAAVIGLTKSVAADFVTHGIRCNAICPGTVESPSLDARIVEQARARGESVDAVRAAFVARQPMGRIGKPQEIAALVAYLASDESSFTTGAIHLIDGGWSN

SEQ ID NO: 1719 - DNA, 810 bp, Burkholderia thailandensis E264
  CDS (1)..(810): transl_table=11
atggcggatcgcccgaaagggagcggcgcggtgaaccggctcgcgggcaaggtcgccctcgtgacgggcgcgggacgcggcatcggcgcggcgatcgcgcgtgcgttcgcgcgcgaaggcgcggccgtcgcgattgcggagctcgacgcggcgctcgccgacgaaaccgtcgacgcgatcgcgcgcgacgtggccgatgcgcgcgtgctcgcggtgccagcggacgtcgcgcaagccgagtcggtcgcggcggcgctcgcgtgcacggagcgcgcgttcggcccgctcgacgtgctcgtcaacaacgcaggcgtcaacgtgttcggcgatccgctcgcgcttgccgaagaagactggcggcgctgcttcgcgatcgatctcgacggcgtctggcacggctgccgcgcggcgctgccgggcatggtcgagcgcggtcggggcagcatcgtgaacatcgcgtcgacgcacgcgttcaagatcatcccgggctgctttccgtacccggtcgcgaagcacggcgtgctgggcctcacgcgcgcgctcggcgtcgaatatgcgccgcgcaacgtgcgcgtgaacgcgatcgcgcccggctacatcgagacgcaatcgacacatgactggtggaacgcgcagcccgaccccgaggccgcgcgccgcgaaacgctcgcactgcagccgatgaagcggatcgggcgtgcggacgaagtcgcgatgaccgcggtgtttctcgcatcggacgaggcgccgttcatcaacgcgagctgcatcacgatcgacggcggccgatcggtgctgtaccacgactga

SEQ ID NO: 1720 - protein, 269 aa, Burkholderia thailandensis E264
MADRPKGSGAVNRLAGKVALVTGAGRGIGAAIARAFAREGAAVAIAELDAALADETVDAIARDVADARVLAVPADVAQAESVAAALACTERAFGPLDVLVNNAGVNVFGDPLALAEEDWRRCFAIDLDGVWHGCRAALPGMVERGRGSIVNIASTHAFKIIPGCFPYPVAKHGVLGLTRALGVEYAPRNVRVNAIAPGYIETQSTHDWWNAQPDPEAARRETLALQPMKRIGRADEVAMTAVFLASDEAPFINASCITIDGGRSVLYHD

SEQ ID NO: 1721 - DNA, 747 bp, Novosphingobium aromaticivorans DSM 12444
  CDS (1)..(747): transl_table=11
atgggacgcttgaatggcaaggtcgcgatcatcaccggcgcggcacgcgggatgggcgaatcccatgcgcgcacctttgtccgggaaggcgcccgggtcgtgctgaccgatctcagcgaggaggccggaaaggccctcgtcgcagaactgggcgacaacgcagtgttcctgaagcaggacgtcacggacccacaatcctggaatgccgtcgtcgaaaccgcagttcgagagtttgggacgatcgatatcctcgtcaacaacgcgggcatccttggccccatggcgccgacggacagcctcgacgacgaaggatatcgcaaggtctgcgcggtaaaccaggactcggtcttcttcggcatgcgcgccgtcctgcccgtgatggtaaaggcccgcaggggttccatcgtgaacatctcctcgatcgccggcatggccgcaaactacggcttcccaagcctcgcctatgttgccagcaagtttgcggtccgcggcatgaccaaggcaactgcggtcgagttcggcaagcacaacatccgcgtcaactcggtgcacccgggcttcatccagacccccatgatggtcgaggcaaccgacgaggtaggcggcgaagcgctcgcacagatccccctgggccgcatcgccgatccgtccgaggtttcgaacctcgtgctctttctggcctcggacgagtcctcctacatcaccggctcagagcatctggtcgatgccggcatgctggcccactga

SEQ ID NO: 1722 - protein, 248 aa, Novosphingobium aromaticivorans DSM 12444
MGRLNGKVAIITGAARGMGESHARTFVREGARVVLTDLSEEAGKALVAELGDNAVFLKQDVTDPQSWNAVVETAVREFGTIDILVNNAGILGPMAPTDSLDDEGYRKVCAVNQDSVFFGMRAVLPVMVKARRGSIVNISSIAGMAANYGFPSLAYVASKFAVRGMTKATAVEFGKHNIRVNSVHPGFIQTPMMVEATDEVGGEALAQIPLGRIADPSEVSNLVLFLASDESSYITGSEHLVDAGMLAH

SEQ ID NO: 1723 - DNA, 744 bp, Desulfitobacterium hafniense Y51
  CDS (1)..(744)
atgttgctgaataatagcgtagccattgtcaccggaggaagtcgcggcattggacgtgccattgccttggaactggcccgtgcaggggctaaagtggtggtgaactatgccggacatggggaaaaggcggaagagactctgagcctgattcaggaagcgggcggagaggctttggcagttcaggctgatgtcagccaggttgaagatgtggaacggctgattcagaccacccttaaaacctatggcaagatcgatattctggtcaataatgccggaattacccgtgacaccttgctgctgcggatgaaggaaacagattgggatgcggtgctggataccaatctcaaaggggttttcttatgcacgaaggcggtcagcaagtccatgatgaagcaacgctccggagttattatcaatatctcctctgtggtcggtattaccggcaatgcgggacaagcgaattacgcggcggccaaagcgggaatcatcggctttaccaaatccatcgccaaagagctgggctcccgtggcatccgggtcaatgcagtggctccggggtatatttctacagatatgacggaatccttaggagaagaggtccgggagcaggtcatgacccagattccgctgggcagaatgggtcagcctgaagatatagccaagacggttgtctttttggcttcaccggccgcttcctacatcaccgggcaaacattagccgtagacggcggcatggctatgtaa

SEQ ID NO: 1724 - protein, 247 aa, Desulfitobacterium hafniense Y51
MLLNNSVAIVTGGSRGIGRAIALELARAGAKVVVNYAGHGEKAEETLSLIQEAGGEALAVQADVSQVEDVERLIQTTLKTYGKIDILVNNAGITRDTLLLRMKETDWDAVLDTNLKGVFLCTKAVSKSMMKQRSGVIINISSVVGITGNAGQANYAAAKAGIIGFTKSIAKELGSRGIRVNAVAPGYISTDMTESLGEEVREQVMTQIPLGRMGQPEDIAKTVVFLASPAASYITGQTLAVDGGMAM

SEQ ID NO: 1725 - DNA, 744 bp, Burkholderia xenovorans LB400
  CDS (1)..(744): transl_table=11
atgacacaaagactggccggcaagacggccctgatcacggcggcaggacaaggcatcggactcgccaccgccgaactcttcgcccgcgaaggcgcgcgcgtgatcgccacggacatccgcatcgacggactcgccggcaagccggtcgacgcgcgcaaactcgacgtgcgcgacaacgcggcgatcaacgcgctggccgccgaactcggcgcgatcgacgtgctgttcaactgcgcgggtttcgtgcatgcgggcaacattctcgaatgcagcgaagaagattgggactttgcgttcgacctgaacgcgaaggcgatgtaccgcacgatccgcgcgtttctgcctgccatgctggacaacggcggcgggtcgatcatcaatatgtcgtcggcggcgtcgagtgtgaagggtgtgccgaaccgctttgcctatagcgcctccaaggcggcggtgatcgggctgaccaagtccgttgctgcggacttcatcacgcgtggtgtacgctgtaacgcgatctgcccgggcacggtggcttcgccgtcgctcgaacagcggatcgtcgcgcaggctcaggcgcagggcgcgacgctcgacgccgtgcaggctgccttcgtggcgcggcagccaatgggccgcatcggcaagccggaagagatcgccgcgttggcgctgtatctcgcgtccgacgaatcgtcgttcaccacgggccatgcgcatgtgatcgacggcggctggtcgaactga

SEQ ID NO: 1726 - protein, 247 aa, Burkholderia xenovorans LB400
MTQRLAGKTALITAAGQGIGLATAELFAREGARVIATDIRIDGLAGKPVDARKLDVRDNAAINALAAELGAIDVLFNCAGFVHAGNILECSEEDWDFAFDLNAKAMYRTIRAFLPAMLDNGGGSIINMSSAASSVKGVPNRFAYSASKAAVIGLTKSVAADFITRGVRCNAICPGTVASPSLEQRIVAQAQAQGATLDAVQAAFVARQPMGRIGKPEEIAALALYLASDESSFTTGHAHVIDGGWSN

SEQ ID NO: 1727 - DNA, 777 bp, Burkholderia xenovorans LB400
  CDS (1)..(777): transl_table=11
atgaaacggctcgccggcaaagtcgcgcttgtcaccggagcgggacgcggcatcggcgcggcgatcgcgtacgcgttcgcgcgcgagggtgcggcggtggtgctggcggaactggatatcgaaaccgcgcagcagacagcggagcacatcaggtcgcagaccggcgcgcgcgtgctcgcggtacacaccgacgtgacgcaggcggcctcggttcaacacgcggtgagcgaggccgaacgcgcattcggcgcgctggacgtgctggtgaacaacgccggcatcaacgtgttctgcgacccgttgaccatgaccgacgacgactggcgccgctgcttcgcggtcgatctcgacggcgtctggaacggttgccgcgcggtgttgccgcgcatggtggagcgcggcgcggggagcatcgtgaatatcgcgtcgacgcactcgttcaagatcattccgggctgctttccgtaccccgtggccaagcacggcgtgatcggcctgacgcgcgcgctcggcatcgaatacgcgccgcgcaatgtgcgggtcaacgcgatcgcgccgggttacatcgaaacgcaattgacgcacgactggtggaacgaacaggccgatccggccgccgcgcagcaggcgacgctggatctgcagccgatgaagcgcatcggccgcccggaagaagtggcgatgacggcggtattcctcgcctcggacgaagcgccgttcatcaacgccacctgcatcacggtggatggcggccgctcggcgctgtatcacgactga

SEQ ID NO: 1728 - protein, 258 aa, Burkholderia xenovorans LB400
MKRLAGKVALVTGAGRGIGAAIAYAFAREGAAVVLAELDIETAQQTAEHIRSQTGARVLAVHTDVTQAASVQHAVSEAERAFGALDVLVNNAGINVFCDPLTMTDDDWRRCFAVDLDGVWNGCRAVLPRMVERGAGSIVNIASTHSFKIIPGCFPYPVAKHGVIGLTRALGIEYAPRNVRVNAIAPGYIETQLTHDWWNEQADPAAAQQATLDLQPMKRIGRPEEVAMTAVFLASDEAPFINATCITVDGGRSALYHD

SEQ ID NO: 1729 - DNA, 741 bp, Ralstonia metallidurans CH34
  CDS (1)..(741): transl_table=11
atgaaattgcagggacgcgtagcgatcatcaccggcgccgccgccggcatcggttttgccaccgccgaacgtttcgccgccgaaggcgcgaagctcatcatgtgcgatgtgcaggaggcccgcgtgcgcgaggccgccgagcggctggccgccaagggcgcgcaggtcgaggcgcacaaggtcgacgtcacgcgccgcgacgaggtcgatgccatggtggcagccacgctggcccgccacggtcgcatcgatgttctcgtcaacaacgccggcatcaccaaggacgcgcgcctcgccaagatgaccgaggcacagttcgatgcggtcatcgacgtcaacctgaagggcgtgttcaactgctcacaggccgtggccagcatcatgtccgagcagggcagcggcgtgatcctgaacgcatcgagcgtggttggcctgtatggcaacttcggccagaccaattacgcggcttccaagttcggcgtgatcggcttcaccaagacctgggcgcgcgaactgggtccgaagggcgtgcgcgtgaacgcggtatgcccgggctttgtcaataccgagatcctgcagaccgtgccggagaaggtgctcgacggcatgaaggaacattgctggatgcgccgcctggccgagccgtcggagatcgccgcgatctacacgttcctggccagcgacgacgccagctacgtcaacggcacgacgatcgaagccagcggcggcatgtcgctgtaa

SEQ ID NO: 1730 - protein, 246 aa, Ralstonia metallidurans CH34
MKLQGRVAIITGAAAGIGFATAERFAAEGAKLIMCDVQEARVREAAERLAAKGAQVEAHKVDVTRRDEVDAMVAATLARHGRIDVLVNNAGITKDARLAKMTEAQFDAVIDVNLKGVFNCSQAVASIMSEQGSGVILNASSVVGLYGNFGQTNYAASKFGVIGFTKTWARELGPKGVRVNAVCPGFVNTEILQTVPEKVLDGMKEHCWMRRLAEPSEIAAIYTFLASDDASYVNGTTIEASGGMSL

SEQ ID NO: 1731 - DNA, 759 bp, Silicibacter sp. TM1040
  CDS (1)..(759): transl_table=11
ttgaacacgatgacacagaacacaggccggctggccgaaaaaacagctttgattactgctgcggggcaggggatcggtcgcgccagcgcggaactctttgcggctgagggcgccaaggtgatcgcctgcgacatcaatgcagagtcattggcagaactcgcggaggtcgatgggatcacggcccttgcgcttgatgtcacggatgcatccgcagttgcgcgcgcaatccaagatgcagggccattgaatgtgttgttcaactgcgcgggatatgtcgcaagtggcagcattttggactgcgatgagaacgactgggacttcagtttcgacctcaacgtcaaagccatgtatcgcctcacgaaactggttttgcccggcatgctggaaaacggcggtggctctatcatcaacatgtcgtcggtggcctcctccctgaaaggggtgccaaatcgctttgcctattgcgcgtcaaaggcggcggtgatcggcatgaccaaatccattgccgcagattttgtgacccaaggtatccgttgcaacgcgatttgccccggcacggtggacagtcccagcctgcatgatcggctgcgcgctacgggcgattatgagcaggcccgcaaggatttcatcgcacgtcagcccatggggcgcattggcaaggctgaagagattgcggcgctcgcgctctatctcgccagcgatgagagcggctttaccactggacagacccacgccatcgacggcggctgggcgatttga

SEQ ID NO: 1732 - protein, 252 aa, Silicibacter sp. TM1040
MNTMTQNTGRLAEKTALITAAGQGIGRASAELFAAEGAKVIACDINAESLAELAEVDGITALALDVTDASAVARAIQDAGPLNVLFNCAGYVASGSILDCDENDWDFSFDLNVKAMYRLTKLVLPGMLENGGGSIINMSSVASSLKGVPNRFAYCASKAAVIGMTKSIAADFVTQGIRCNAICPGTVDSPSLHDRLRATGDYEQARKDFIARQPMGRIGKAEEIAALALYLASDESGFTTGQTHAIDGGWAI

SEQ ID NO: 1733 - DNA, 738 bp, Silicibacter sp. TM1040
  CDS (1)..(738): transl_table=11
atgtttgatctgacaggtaagaacgcgctgatcacaggcgcatccggtggcatcggtggcgacattgcgcgcgcgctccacgcagcgggggcgactgttgcgctctccggcacccggccagacccgctgcacgccttggccgaggagcttggcgagcgggctcatgttgtgacctgcaacctctccgacgccgaggccgtcgaggcgctgccgaaacaggccgcagaggcgatgggctctgttgacatcctggtcaacaacgccgggatcaccaaggacaacctctttatgcggatgaaggatgaagagtggcagagcgttctcgatgtgaacctcacctccaccatgcgcctgtgccgcggtgtgctgcgcggcatgatgaaggcacgctggggccggatcgtgaatatctcctccgttgtgggcgccaccggcaaccccggtcagggcaactatgcggcctccaaggcgggcatggtcggcatgtccaagtcgctggcctatgaggttgcaaaccgtggcatcaccgtgaacgccgtggcgccgggcttcatcgcgaccgccatgaccgacaaactcaacgacacccagaaagaggcgatcctcagccagatccccgcaggccgtatgggggattcgaaagaaatcgccgccgcagtgctttatctggcgtcgcaagaagccgcctatgtcaccggcaccacgctgcatgtgaatggcggcatggcgatgctctaa

SEQ ID NO: 1734 - protein, 245 aa, Silicibacter sp. TM1040
MFDLTGKNALITGASGGIGGDIARALHAAGATVALSGTRPDPLHALAEELGERAHVVTCNLSDAEAVEALPKQAAEAMGSVDILVNNAGITKDNLFMRMKDEEWQSVLDVNLTSTMRLCRGVLRGMMKARWGRIVNISSVVGATGNPGQGNYAASKAGMVGMSKSLAYEVANRGITVNAVAPGFIATAMTDKLNDTQKEAILSQIPAGRMGDSKEIAAAVLYLASQEAAYVTGTTLHVNGGMAML

SEQ ID NO: 1735 - DNA, 804 bp, Mycobacterium sp. MCS
  CDS (1)..(804): transl_table=11
ttgatgccgcgcctcctcgacaaggtggtcgtggtgaccggggcggcccgggggaccggccgggtgcactgcgagcggttcgccgaggaaggcgccgacgtcatcgcgctcgacgtcgcggcggtggccgacgagctgtcgggaacggcggccgcagtggcacgacacggccgacggtgtgtgacgggagaggccgacgtgcgtgacttcgccgccttgacggccgcgatcgatcgcggggtcgaggagctcggtcggctcgacgtcgtcgtggcgaatgcgggcgtccacccggctggtgcgccggcctgggaactgacgggcgaggcctggcggcaagcactcgacgtcaacgtgaccggtgtatggcatacggtcaaagcagctgcgcggcacatggattcaggtggtggggcggtgatcgtcatcagctccacgaatggcctgcgcgggaccccgaactccgcgcactacaccacgagcaagcacgccgtggtcgggttggcccggaccctggccaacgaactgggtccccgcagcatccgggtcaacacagtccacccgggcgccgtcgcgacgccgatggtgctcaacgaagccaccttcagacggttacgcccggacctcgaagaacccaccgccgacgacgccgcggaggtgctccgagcgcggaacctccttccggtgccgtgggtcgatccggtcgacgtcgccaacgcggtggtgttcctcgcctcagacgaggcgcgctacatcaccggctcacagctcgtcgtcgacgcgggcctgacgcagaaggtatga

SEQ ID NO: 1736 - protein, 267 aa, Mycobacterium sp. MCS
MMPRLLDKVVVVTGAARGTGRVHCERFAEEGADVIALDVAAVADELSGTAAAVARHGRRCVTGEADVRDFAALTAAIDRGVEELGRLDVVVANAGVHPAGAPAWELTGEAWRQALDVNVTGVWHTVKAAARHMDSGGGAVIVISSTNGLRGTPNSAHYTTSKHAVVGLARTLANELGPRSIRVNTVHPGAVATPMVLNEATFRRLRPDLEEPTADDAAEVLRARNLLPVPWVDPVDVANAVVFLASDEARYITGSQLVVDAGLTQKV

SEQ ID NO: 1737 - DNA, 840 bp, Mycobacterium sp. MCS
  CDS (1)..(840): transl_table=11
atgacagtgggacgtctggccggcaaggtggcgctgatcaccggagcggcacgcggcatcggccgagcgcaggccgtgcgcttcgcgcaagagggggcggacatcatcgccctggacatctgcgggcccgtcgacgacaccgtggtggttccttctgcgacccggcgggacctcgacgagaccgcttgcctggtcgccgaggtcggcgtccgcgtcgtcaccgaggtcgtcgacgtgcgcgaccccgatgcgctgcaagcggccaccgacgcggcggtgacggatctgggtggtatcgacatcgtgtgcgccaccgcaggcatcacctccaggggtgcggcgacgcagatgccggaggacacctggcagaccatgctcgatgtgaacctcaccggtgtctggcacacgtgcaaggtgtccgccccgcacctgatcgcgcggggcgccggatcggtgatcctggtcagttcgatcgccggcctgcgcgggctggtcggcgttgcccactacaccgcggccaaacacggtgtggtcggcctcatgcgcagcctcgcccacgacctggcaccgcacggcattcgcgtcaactccgtgcatccgacgaacgtcgacacaccattgatccagaacacggccgtcagcagcgctttccgcccagacctggaccgtccacctacaagggcggagttcgcggcggccgcgaggccgatgaacctgctcgcgatcccctggatcgaccccgtcgacgtggccaacgcctcgctgttcctggcgtccgacgaagctcgctacatcacggcggtgtcgctacccgttgacgcgggcagcacgcaacgctga

SEQ ID NO: 1738 - protein, 279 aa, Mycobacterium sp. MCS
MTVGRLAGKVALITGAARGIGRAQAVRFAQEGADIIALDICGPVDDTVVVPSATRRDLDETACLVAEVGVRVVTEVVDVRDPDALQAATDAAVTDLGGIDIVCATAGITSRGAATQMPEDTWQTMLDVNLTGVWHTCKVSAPHLIARGAGSVILVSSIAGLRGLVGVAHYTAAKHGVVGLMRSLAHDLAPHGIRVNSVHPTNVDTPLIQNTAVSSAFRPDLDRPPTRAEFAAAARPMNLLAIPWIDPVDVANASLFLASDEARYITAVSLPVDAGSTQR

SEQ ID NO: 1739 - DNA, 801 bp, Mycobacterium sp. MCS
  CDS (1)..(801): transl_table=11
ttgtcgaccgagacgacgagcaatgccgtgacccgggaacatgggcgcctccacggcaagtccgcggtgatcaccggggcggcgttcggcatcggccgggccaccgccgtgctcttcgcacgagagggcgcgcggctggtcgtgaccgatattcagagcgagccgctgctggcgcttgccgatgaactgcggcacgccggagcggacgtcgagcccgtcgtcggcgacgtctcggtggagtatgacgcggggcggatgatcggggcggcggtcgaccgcttcggacggctcgatgtgctggtcgccaacgcaggcatcatcccgctcggcgacgcgctggaaatgaccgccgccggctgggacgaagtgatggccatcgacgggcgcggcatgttcctgtgctgcaaattcgcgatcgaggcgatgttgccgaccgggggtggcgccatcgtctgcctctcctcgatctccggactggcggggcagaagcggcaggcggcctacggtcccgccaagttcatcgccaccggcttgaccaagcacctggcagtcgagtgggccgaccggggtatcagagtcaacgccgtcgcccccgggacgattcgaaccgagcgggtcaagcggttcccggaggagccgggtggctcggagtacctggcggcggtcgagcgtatgcacccgatgggccgcatcggcgaaccagccgaagtcgccagcgccatcgtctttctcgcctccgacgacgcctccttcatcaccggcgccgtgctgccggtcgacgggggatatctagcgcagtag

SEQ ID NO: 1740 - protein, 266 aa, Mycobacterium sp. MCS
MSTETTSNAVTREHGRLHGKSAVITGAAFGIGRATAVLFAREGARLVVTDIQSEPLLALADELRHAGADVEPVVGDVSVEYDAGRMIGAAVDRFGRLDVLVANAGIIPLGDALEMTAAGWDEVMAIDGRGMFLCCKFAIEAMLPTGGGAIVCLSSISGLAGQKRQAAYGPAKFIATGLTKHLAVEWADRGIRVNAVAPGTIRTERVKRFPEEPGGSEYLAAVERMHPMGRIGEPAEVASAIVFLASDDASFITGAVLPVDGGYLAQ

SEQ ID NO: 1741 - DNA, 795 bp, Mycobacterium sp. MCS
  CDS (1)..(795): transl_table=11
atgtatgccgaccgggcccctcggaggcccccgacgagtcaggtaggtgatcgagtgtcgttgctgagcggacagaccgcggtcgtcacgggcggtgcgcagggactgggatacgcgatcgcggaacgcttcgtgtccgagggggcgcgggtcgtgctcggcgacctcgacctcgacgccaccgaggcggcggccaaacgcctcggtggaccggacgtggccaccgcggtccggtgcgacgtcacccgggccgacgaggtggatgcgctcgtggccgcggcggtggagcgcttcggcggcctcgacgtcatggtgaacaacgcggggatcacccgcgacgccaccctgcgcaagatgaccgaggaacagttcgaccaggtgatcgccgtccacctcaagggcacctggaacgggctgaagtcggcggcggcgatcatgcgcgagaacaagcgcggtgccatggtcaacatgtcgtcgatctcgggcaaggtcgggctcgtcggacagaccaactactcggcggccaaggccgggatcgtcgggatgacgaaggccgcggccaaggaactggctcacctcggggtgcgcgtgaacgcgatccagcccggcctcatccggtcggcgatgaccgaggcgatgccgcagcacatctgggaccagaagctcgccgagataccgatgggccgggccggcgaaccggccgaggtggccaaggtcgccctcttcctcgcctcggacctctcctcgtacatgaccggcaccgtgctggaagtcacgggcgggaggcacatctga

SEQ ID NO: 1742 - protein, 264 aa, Mycobacterium sp. MCS
MYADRAPRRPPTSQVGDRVSLLSGQTAVVTGGAQGLGYAIAERFVSEGARVVLGDLDLDATEAAAKRLGGPDVATAVRCDVTRADEVDALVAAAVERFGGLDVMVNNAGITRDATLRKMTEEQFDQVIAVHLKGTWNGLKSAAAIMRENKRGAMVNMSSISGKVGLVGQTNYSAAKAGIVGMTKAAAKELAHLGVRVNAIQPGLIRSAMTEAMPQHIWDQKLAEIPMGRAGEPAEVAKVALFLASDLSSYMTGTVLEVTGGRHI

SEQ ID NO: 1743 - DNA, 771 bp, Mycobacterium sp. MCS
  CDS (1)..(771): transl_table=11
atgaccgacgccgaaatgaccgtggatctcgacttctcactgaccgggaaggtcgcactggtcaccggcggcgcatcgggcatcggtgcggcgatcgcatcggcgttcgccgccaagggcgcccgcgtggccgtggccgacctcaacgaacccggtgcacaggcgcacgccgcggcgttggccaccgagagttcgggattccgttgcgatgtcagcgatcccgcgtccgtcgcggcgaccgtcgacgccgtggccggcaccttcggcaggatcgacatcctggtcaacagtgccggggtggcccggctggcgcccgccgaggacctcacgctcaccgactgggagtcgacgatcgacatcaacctcaagggcacgttcctgatgtgccaggcggtgggccgccgcatgctggccgacggtggcggcagcatcgtcaacctggcgtctcaggccgcctccgtggcactcgaccagcacgtggcgtactgcgcgtcgaagttcggggtggtcggggtgtcgaaggtcctggccgccgaatggggcgggcggggcatccgggtcaacacgatctcgcccacggtggtcctcaccgaactgggccacaaggcctgggacggaccgcgcggcgatgccctcaagaagctgatccccatcggccggttcgcctacccgcccgagatcgccgccgccgcggtctacctcgcctccgacgcggccgcgatggtcaccggcgccgacctggtcgtcgacggcggctacaccgtcaaatag

SEQ ID NO: 1744 - protein, 256 aa, Mycobacterium sp. MCS
MTDAEMTVDLDFSLTGKVALVTGGASGIGAAIASAFAAKGARVAVADLNEPGAQAHAAALATESSGFRCDVSDPASVAATVDAVAGTFGRIDILVNSAGVARLAPAEDLTLTDWESTIDINLKGTFLMCQAVGRRMLADGGGSIVNLASQAASVALDQHVAYCASKFGVVGVSKVLAAEWGGRGIRVNTISPTVVLTELGHKAWDGPRGDALKKLIPIGRFAYPPEIAAAAVYLASDAAAMVTGADLVVDGGYTVK

SEQ ID NO: 1745 - DNA, 738 bp, Mesorhizobium sp. BNC1
  CDS (1)..(738): transl_table=11
atgtttgatctcaatggccgcaaggctctcgtcacgggagcaaccgggggcatcggcgaggcgatcgccagggcgcttcacaagcagggcgcgattgtgggcctgcacgggacgcgggtggaaaaactcgaagcgcttgcaggcgaacttggcgaaagggcaaagatatttgccgcgaatctttcggaccgcgatgacgtgaaggctttcgccgagcgcgccgaatcagagctcgaagggatcgacattctcgtcaacaatgcagggatcacccgcgacgggcttttcgtgcgcatgagcgacgaggactgggacgcggtgatcgaaaccaatctgactgccgccttcaggctcacccgcgcgctgacgcatcccatgatgcgccgccgctggggccgcatcatcaacatttcctccgtggtgggcgtggccggcaatccagggcaggcgaattattgcgcttccaaggccggtctcatcgggttttccaagtcgctcgcccaggaggtcgccagccgcaacatcacggtcaattgcgtggcgccgggtttcattgagacggcgatgacggacaagctgaacgagaagcagcgcgaatccatcatgggcgccattcccatgaggcgcatgggctcaggagaggagattgccacggctgtggtctatcttgcctccgaggaggcggcctatgttaccggccagaccattcacgtgaatggcgggatgctgatggtctaa

SEQ ID NO: 1746 - protein, 245 aa, Mesorhizobium sp. BNC1
MFDLNGRKALVTGATGGIGEAIARALHKQGAIVGLHGTRVEKLEALAGELGERAKIFAANLSDRDDVKAFAERAESELEGIDILVNNAGITRDGLFVRMSDEDWDAVIETNLTAAFRLTRALTHPMMRRRWGRIINISSVVGVAGNPGQANYCASKAGLIGFSKSLAQEVASRNITVNCVAPGFIETAMTDKLNEKQRESIMGAIPMRRMGSGEEIATAVVYLASEEAAYVTGQTIHVNGGMLMV

SEQ ID NO: 1747 - DNA, 786 bp, Mesorhizobium sp. BNC1
  CDS (1)..(786): transl_table=11
atgtggtgctatcttgcggccacatcctgcttgtcgaatggaaggctcaagatgacgatacgatttgacgggaaaaccgcgctgatcacagccgcagctcaagggatcggccgtgcaagcgcgctggctttcgcggaagccggcgcaaaagtctatgcaaccgacatcaacatgggcgcgctgaaggagatcgaaggcgtttcgggaatcatcacgcgcaagctcaacgttctcgacgagacggaagtcaaggcaatcgtcgctgaaatcgggcaggtcgacattctgttcaactgtgcgggcgtcgttcacggcggcacaattcttgagatgaaggacgaagatctcgatttcgcagttaatctcaatgtcaaggcgatgattcgcaccatccgtgcaatattgccgggcatgttggaacgcaaggacggcgctatcatcaatatggcctccgttgcatcgagcgttaagggtgtgccgaaccgctttgcctatagcgtcacgaaggctgcggtcatcgggctgaccaaggccgttgctgccgattatgtcaccaaaggcatccgctgtaacgcgatctgccccggcacggtcgaaagcccgtcgctgcaggatcgtctccgcgcacaggggaattatgaagagcagcgtgcggcctttattgctcgtcaaccgattggccgtataggccagcctgaagagatcgccgatctcgtcgtctacctcgctggcgccacttatacgaccggccaagcgtacaatatcgacggcggctggacgatttaa

SEQ ID NO: 1748 - protein, 261 aa, Mesorhizobium sp. BNC1
MWCYLAATSCLSNGRLKMTIRFDGKTALITAAAQGIGRASALAFAEAGAKVYATDINMGALKEIEGVSGIITRKLNVLDETEVKAIVAEIGQVDILFNCAGVVHGGTILEMKDEDLDFAVNLNVKAMIRTIRAILPGMLERKDGAIINMASVASSVKGVPNRFAYSVTKAAVIGLTKAVAADYVTKGIRCNAICPGTVESPSLQDRLRAQGNYEEQRAAFIARQPIGRIGQPEEIADLVVYLAGATYTTGQAYNIDGGWTI

SEQ ID NO: 1749 - DNA, 777 bp, Mesorhizobium sp. BNC1
  CDS (1)..(777): transl_table=11
atgtatttggaaaaactgaggcttgacgggcgggttgccgtaatcaccggcggcgggcagggcataggtgctgcctgcgcgcgggcgctcggcgaggccggtgccacggtgatcgtggcggacctcctggccgaacgggccgaggccaccgccaaggagctctccaccgccgggatcaaggcgcagggcattggactcgacgtcacgaaatccgccgatgtagatgccgcggcggacgaaatcgcgcgccagcacggcaggatcgatatcctcgtcaacaatgcgggcgtggccaagagcgacgtgcgggcggaagataccagcgacgaacactggcgcttccatatggacgtcaatttggacggtgtgttctggtgttgccgcgcgttcggccggcacatgctggagaaggaacgcggcgcgatcgtgaatatcggctccatgtcgggcttcatcgtcaacaagccgcagccgcagagcttctacaatgcctcgaaggcggccgtgcatcacctcacgaagtcgcttgctgccgaatggggccggcgcggcgtgcgcgtcaatgccgtggcgcccacctatatcgagacgccgctgacggccttcggcatcaaagaaagcccggagatgtacaaggtatggctcgagatgacgccgatggggcgcgttggccagccggacgagatcgcttccgtcgtgcatttcctggcatccgacgcctccagcctgatgactggctcgatcgtgctggccgacgccggctatacctgctggtga

SEQ ID NO: 1750 - protein, 258 aa, Mesorhizobium sp. BNC1
MYLEKLRLDGRVAVITGGGQGIGAACARALGEAGATVIVADLLAERAEATAKELSTAGIKAQGIGLDVTKSADVDAAADEIARQHGRIDILVNNAGVAKSDVRAEDTSDEHWRFHMDVNLDGVFWCCRAFGRHMLEKERGAIVNIGSMSGFIVNKPQPQSFYNASKAAVHHLTKSLAAEWGRRGVRVNAVAPTYIETPLTAFGIKESPEMYKVWLEMTPMGRVGQPDEIASVVHFLASDASSLMTGSIVLADAGYTCW

SEQ ID NO: 1751 - DNA, 747 bp, Cytophaga hutchinsonii ATCC 33406
  CDS (1)..(747): transl_table=11
atgggcttacttagtggaaaaactgctctggtaacaggagcatcaaaaggcataggaaaatcgatcgcgatgcgttacgcacaggaaggtgctaatgtggcgttcacctatctttcaagcgttgaaaaaggtcaggcattagaaaaagaattacaggcattgggtatcaaagcaaaaggataccgctcagatgcatctaaatatacagaagcagaagaattagtaacttccgtattagcagactttggacagcttgatattgttgtaaacaatgcaggtattacaaaagatggcttattaatgcgtatgacagaagaacaatgggattctgttatggaagtaaatttaaaatcggtatttaacctgacaaaagcggcattaaaaccaatgatgaaagcgaaagcaggttctattataaatatgacttctgttgtgggcatcagcggtaacgccggccagacaaactacgctgcctctaaagcaggtatcattggtttcacaaaatcagtagcgcaggaattgggttcacgcaacatccgctcaaacgcaattgccccgggttttattgaaacagaaatgacggaagtactggacccgaaagtgaaagctgaatgggaaaacggaattccgttgaaacgtgccggaaaaagtgaagatgtagcgaatgcctgtgtattccttgcatcagatctttcaacatacattaccggacaggtattacaggttgatggcggaatgctgacctag

SEQ ID NO: 1752 - protein, 248 aa, Cytophaga hutchinsonii ATCC 33406
MGLLSGKTALVTGASKGIGKSIAMRYAQEGANVAFTYLSSVEKGQALEKELQALGIKAKGYRSDASKYTEAEELVTSVLADFGQLDIVVNNAGITKDGLLMRMTEEQWDSVMEVNLKSVFNLTKAALKPMMKAKAGSIINMTSVVGISGNAGQTNYAASKAGIIGFTKSVAQELGSRNIRSNAIAPGFIETEMTEVLDPKVKAEWENGIPLKRAGKSEDVANACVFLASDLSTYITGQVLQVDGGMLT

SEQ ID NO: 1753 - DNA, 741 bp, Clostridium perfringens ATCC 13124
  CDS (1)..(741): transl_table=11
atgttaaaagataaagtagcaatagtaactggtggaacaagaggaattggaagagcaatcgctttaaaattagcagatcatggagctaatattgttataaattatagaaattctgataaagaggcagaagaattaaaagccattttagaaggaaaaggggtaaaagttcttactgtaaaatgtgatataagtaattttgaagattctaaaaatcttatggataaatgtaaggaagtatttgggaaaatagatatacttgtaaataatgcaggtataacaaaggataccttaattatgagaatgaaggaagaagactttgataatgtaatagatgtaaacttaaaaggtacatttaattgtgcaaagcatgcttctgccataatgttgaaacaaaggtttggtaaaattataaacatgacttctgttgtaggtatagctgggaatgctggtcaagtaaattatgcagcatcaaaggctggtgttataggattaactaaatctttagctaaagaattaggaagtagaggaataactgtaaatgctgtagcacctggatttataaatactgatatgacagcttctttatctgaaaaagttaaagaggaagcttctaaaaatattcctttaaaaagattaggagaccctgaagacgttgctaacttagtaggattcttagcatcagatgcagcaaattatataacaggtcaagtcataaatgtagatggcggaatggtaatgtag

SEQ ID NO: 1754 - protein, 246 aa, Clostridium perfringens ATCC 13124
MLKDKVAIVTGGTRGIGRAIALKLADHGANIVINYRNSDKEAEELKAILEGKGVKVLTVKCDISNFEDSKNLMDKCKEVFGKIDILVNNAGITKDTLIMRMKEEDFDNVIDVNLKGTFNCAKHASAIMLKQRFGKIINMTSVVGIAGNAGQVNYAASKAGVIGLTKSLAKELGSRGITVNAVAPGFINTDMTASLSEKVKEEASKNIPLKRLGDPEDVANLVGFLASDAANYITGQVINVDGGMVM

SEQ ID NO: 1755 - DNA, 831 bp, Rhodococcus sp. RHA1
  CDS (1)..(831): transl_table=11
atgagcgccgacctcgccggaaagacggccttcgtgaccggcgcggcgcgggggatcggccgtgcctgcgccgtcgagttcgcggcggctggggccgacctcatgctcgtcgacatcacccgaaacctgccaggggtgccgtacccactcggttcgcagagtcagctcgactacaccgcggagttgtgccgcgagcacggtgcgacggttctgacccaggcggtggatgtccgcgagctcgcagagatcacggcagcggtgcaggtcgcccacgaacgattcggtcgcctcgacgtgctcctcaacaatgcgggaatcgccgcaccgtccggaaaggccgctcacgacatcgccgaatccgagtggcgtctgatgatcgacgtcgacctctccggggcgtggcggacgatcgcgacggccggacggatcatggtcacccagcgcagcggaagcatcatcaatatcgcctcgacggccgggctcgtcgggtaccgccacttcgccgggtacgttgcggctaagcacggcctggtcggcctcaccaaggccgtcgccctcgactacgcgccgagcggggtccgggtgaatgcgctgtgcccgggatcggtgcgggacagcagtgagtacgaagggcggatgctggcggagatcgcacgctccctgggtgtcggcgtcgatgagcacgagtcggttttcgtgcaggcccagccgaccaacaagctcgtcgaacccggcgaggtcgcggcagcggcgcggtggctcgcgtccgacgatgcgcgtggagtcacgggttccgtggtgacggtggacggcggtttcacggcccggtga

SEQ ID NO: 1756 - protein, 276 aa, Rhodococcus sp. RHA1
MSADLAGKTAFVTGAARGIGRACAVEFAAAGADLMLVDITRNLPGVPYPLGSQSQLDYTAELCREHGATVLTQAVDVRELAEITAAVQVAHERFGRLDVLLNNAGIAAPSGKAAHDIAESEWRLMIDVDLSGAWRTIATAGRIMVTQRSGSIINIASTAGLVGYRHFAGYVAAKHGLVGLTKAVALDYAPSGVRVNALCPGSVRDSSEYEGRMLAEIARSLGVGVDEHESVFVQAQPTNKLVEPGEVAAAARWLASDDARGVTGSVVTVDGGFTAR

SEQ ID NO: 1757 - DNA, 744 bp, Rhodococcus sp. RHA1
  CDS (1)..(744): transl_table=11
atgacacttctcgagggacgggtcgccgtcgtcacgggcgcggcccagggcatcggtttcgagatggcccggaagttcgcgagcgagggcgcgtcggtggtcctcggtgacatgcatgccgagaacgtcaaggccgccgccggaaagctggaggccgacggcttccaggccgtcgccgtcgcctgcgacgtgaccgatccggatcaaatgcagaacctgggaaagacggcgatcgacgcgttcggcgcgatggacgtgtgggtcaacaacgccggcatcacccgcgacgcgacgctgcgcaagatgtcgctcgccgatttccgatccgtcatcgacgtgcacctgcagggcgcgtggctgggcacccagatcgcgtcgatcgcgatgcgggaggcaggcaagggttcgatcgtgaacatgtcgtcgatctccggcaaggtcggcatggtcgggcagaccaactacagcgccgcgaaggcaggcatggtgggcctgaccaaggcggccgcgaaggaggtcgcccacctcggggtgcgggtcaacgcgatccagcccggcgtggtgaacaccgacatgatccgcgccctgcgcgccgacatcatcgaggcgaagctcaaggaggtcccgatgggccgcggtgccgagcccgaagagatcgcgaacgtcgcactgttcctcgcgtccgatctgtccagctacatgacgggcaccgttctcgaagtcaccggcggacgtcacatctga

SEQ ID NO: 1758 - protein, 247 aa, Rhodococcus sp. RHA1
MTLLEGRVAVVTGAAQGIGFEMARKFASEGASVVLGDMHAENVKAAAGKLEADGFQAVAVACDVTDPDQMQNLGKTAIDAFGAMDVWVNNAGITRDATLRKMSLADFRSVIDVHLQGAWLGTQIASIAMREAGKGSIVNMSSISGKVGMVGQTNYSAAKAGMVGLTKAAAKEVAHLGVRVNAIQPGVVNTDMIRALRADIIEAKLKEVPMGRGAEPEEIANVALFLASDLSSYMTGTVLEVTGGRHI

SEQ ID NO: 1759 - DNA, 849 bp, Rhodococcus sp. RHA1
  CDS (1)..(849): transl_table=11
atgggccgcctcgcgggaaaggtcgcgttcatcaccggcggtgcccgcgggcaggggcgggcgcatgcggtgcgtttcgccgaggaaggcgccgacatcgtggtcgtcgatcattgcgcggacatcgattccgttccctacgccttggcgaccaccgatgatctggatgagaccgtgcgtctcgtgaaagaccgcggagtgtctgtcctgagtgttcaggcggatgttcgcgacctcgcctcactcgagcatgcgcaccgactggcgatcgacgagttcggcaagatcgacgtgctcgtcgccaatgccggtgtcggaagtttcggtcccgctctggagatcagcgagcagcaatggcaggacgtcatcgacatcgacctgaccggtgtctggaagaccgtgcgcgcggtggccccggcgatggtggagcgaggcgagggcggttcggtgatcttgacgagttcggttgccggtctcgtcgccttcctcaatttggcccactacaccgcggccaaacacggggtggtcgggctcatgcgcgctctggcggccgaacttgccccccaccgcatccgcgtcaattcgattcaccccacgaccgtggacacccccatggtcgacaacgccgagacacgcgagctgttcctcccgggagtggagagtccgaaccgcgaggtagcggcggagctgatgaagaacctgaatgcgttgcccgtgccgtggatcgaggacgtcgatgtcagcaacgcggcgctatggctcgcctccgaggaagcccgctacgtcaccggtgtcgccctaccgatcgacgccggcgcgaccgcaccattcaagatgccccaccagtag

SEQ ID NO: 1760 - protein, 282 aa, Rhodococcus sp. RHA1
MGRLAGKVAFITGGARGQGRAHAVRFAEEGADIVVVDHCADIDSVPYALATTDDLDETVRLVKDRGVSVLSVQADVRDLASLEHAHRLAIDEFGKIDVLVANAGVGSFGPALEISEQQWQDVIDIDLTGVWKTVRAVAPAMVERGEGGSVILTSSVAGLVAFLNLAHYTAAKHGVVGLMRALAAELAPHRIRVNSIHPTTVDTPMVDNAETRELFLPGVESPNREVAAELMKNLNALPVPWIEDVDVSNAALWLASEEARYVTGVALPIDAGATAPFKMPHQ

SEQ ID NO: 1761 - DNA, 750 bp, Rhodococcus sp. RHA1
  CDS (1)..(750): transl_table=11
atgacaaagcggttggagggcaaagtggccctcatcaccggcgcatctcgtggcatgggtgagtcgcacgcgaaggcattcgtcgagcacggggcgaaggtcgtactggcggacatcacggacgacgcaggggagctgcttgccaaggagctgggggagaatgcagtcttcgtgcatcacgacgtcacgcaactcgattcatggaccaatgtcgtcgaacggagtgtgaacgcgttcggcgagatcaatgtgctggtgaacaatgcaggggttctcggcccgctggccacgacggcagagcttaccgagggcgactaccggaaggtgtgcagtatcaaccaggacggtgtgttcttcgggatgaaagctgttctgccctccatggaacgagccggtatcggctccatcgtcaacatctcgtcgatcgccggcatggccgcgaactacgggttccccagtttggcgtacgtcgcaagcaagttcgcagtccgcggcatgacgaaagcgacagccgtcgaatacggacccaagaacattcgcgtcaattccgtgcaccctgggttcatccagactccgatgatggtggaggccaccaacgaagagggcggcgacgccttggctcagattcccctcggtcgcatcgcagatccgcaggaggtgtccaacctcgttctgttcctcgcgtcggacgaatcctcctacatcaccggatcggagcatctggtcgacgcgggcatgctcgcgcagtag

SEQ ID NO: 1762 - protein, 249 aa, Rhodococcus sp. RHA1
MTKRLEGKVALITGASRGMGESHAKAFVEHGAKVVLADITDDAGELLAKELGENAVFVHHDVTQLDSWTNVVERSVNAFGEINVLVNNAGVLGPLATTAELTEGDYRKVCSINQDGVFFGMKAVLPSMERAGIGSIVNISSIAGMAANYGFPSLAYVASKFAVRGMTKATAVEYGPKNIRVNSVHPGFIQTPMMVEATNEEGGDALAQIPLGRIADPQEVSNLVLFLASDESSYITGSEHLVDAGMLAQ

SEQ ID NO: 1763 - DNA, 807 bp, Rhodococcus sp. RHA1
  CDS (1)..(807): transl_table=11
atggccggccagctagagaacagaagtgtcgtcatcacgggggtcgccgatcctcagggcatcggcttcgggagcgcccgggtgctggcgcagaaaggtgcattgctcactctggtggacatttccgagcaggtccacgagcgacgagatgatctcgcgcgggaagggttcgacgtccgatcccacaccgtggatctgacgaatcattcggatgtcgtcgacctgatcgaccacgtagtcaaaggcgccggtgtcatcgacggcctggtgaatctcgcaggaatcgcagcgcgcgcaaagaagggtgacgatgtcgatttcgaggtaccgatccttgccacgacttcgatcgaatcatgggagcgcactctcgccattaacctcaccactcaattcaattgtgtgcgagcggtgttaccgcacatgattgaacagcggtacggccgcatcgtcaacttctcctctgtgaccgggccggtcggcgcgatcgctgggttgggcgcctacgcggcagccaaagcaggtgttgtcggtctcaccaagtccatcgcactggagaacggccagttcggaatcacagcgaacgcgatcgcgcccggatacgtcaacactgcagcgttgactcccggaatgcatatcggtggcgaaaacacaccactcaagcgaagcggtgaaccccgtgaaattggtgctctcgttggctttctcgcatcggaagagtcttcgtacgtaacgggtcaactcatcaccatcgatggcggaaacatgattcaggaatacaagggcccgggtgaactggttctctaa

SEQ ID NO: 1764 - protein, 268 aa, Rhodococcus sp. RHA1
MAGQLENRSVVITGVADPQGIGFGSARVLAQKGALLTLVDISEQVHERRDDLAREGFDVRSHTVDLTNHSDVVDLIDHVVKGAGVIDGLVNLAGIAARAKKGDDVDFEVPILATTSIESWERTLAINLTTQFNCVRAVLPHMIEQRYGRIVNFSSVTGPVGAIAGLGAYAAAKAGVVGLTKSIALENGQFGITANAIAPGYVNTAALTPGMHIGGENTPLKRSGEPREIGALVGFLASEESSYVTGQLITIDGGNMIQEYKGPGELVL

SEQ ID NO: 1765 - DNA, 744 bp, Alkalilimnicola ehrlichei MLHE-1
  CDS (1)..(744): transl_table=11
atgcaaaaactcgacgacaaaatcgcactggtcaccggcggctctcgcggtatcggcaaatccatcgcgctggagctggccaagctgggcgccaaagtggctattaactaccacggcagcaaggacaaggccgaggccgtcgccgacgagattcgtggcctggggaccgaggccctggtgctgcaggccgatgtgggcgatgcggactctgcacgcaatctggtcaagcaggttatcgaccagtgggggcgggtggatgtactggtcaacaacgccggtatcacccgggacaccaccttcaagaagatgaccgacgaggcctggcacgaggtcatcaacaccaacctgaacagcgtattttacgtcaccagcgccgccctgccctccatgctggagaacaagttcgggcggatcatcaacatcagctccttcgtgggtcaggccggcaacttcggtcagaccaactacgccgccagcaagggcgcggtgatcgcgttcaccaagagcctggcgaaggaagtggcccgcaataacatcaccgtgaacgcggtggcgccgggctttaccgccaccgagatggtcgccgccatcccggagaaggtgcaggagaagatcctgtccacggtgccgcagaaccgtttcggcgagccggaggaagtcgcgcgcggcgtcgcctacctggcttcggacggcgactacatcaccggtcagcagctcaacattaacggtggtgtttacatgtaa

SEQ ID NO: 1766 - protein, 247 aa, Alkalilimnicola ehrlichei MLHE-1
MQKLDDKIALVTGGSRGIGKSIALELAKLGAKVAINYHGSKDKAEAVADEIRGLGTEALVLQADVGDADSARNLVKQVIDQWGRVDVLVNNAGITRDTTFKKMTDEAWHEVINTNLNSVFYVTSAALPSMLENKFGRIINISSFVGQAGNFGQTNYAASKGAVIAFTKSLAKEVARNNITVNAVAPGFTATEMVAAIPEKVQEKILSTVPQNRFGEPEEVARGVAYLASDGDYITGQQLNINGGVYM

SEQ ID NO: 1767 - DNA, 738 bp, Hyphomonas neptunium ATCC 15444
  CDS (1)..(738)
atgggccggctagcaggcaaaaaagcactgattaccgccgcgggcgccggcattggccgcgcctccgccgaggcatttgcccgcgaaggcgcgcgcatcatcgccacagacatcagcgccgaggcgctcgccgccctcaagggtacagccaacatcgaaacacagcttctggacgtgaccgatcccgccgccatcgcggccctcttcacgacccatcccgatctcgacattctgttcaatgtcgcaggctgggtccatcatggaacgatcgagacctgcggccgggatgactgggaccgctcgctcctggtcaacctcacctccatgtatgaaacctcccgcgcagccctgccaaacatgctggcacatggcggcggcgtgatcctcaatatgagttccgtcgcctccagcgtcgtcggcgcgcccaaccgctttgcttacggcgccaccaaggccggtgtgatcgggctcacgaaagccatcgctgcggattatgcgggccgcaacattcgctgcaatgccatctgtccgggcacggttgatacaccctcgctacagggccgtatgtcggcgcagggcgactatgacagcgcgcgccagatgttcatcgcgcgccagcccatgggccgcctcggcaccgccgaagagatcgcacacctcgccgtctatctcgcctcagatgaggcatccttcacgacgggcgcgattcacgtcgttgacggcggctggacaaattag

SEQ ID NO: 1768 - protein, 245 aa, Hyphomonas neptunium ATCC 15444
MGRLAGKKALITAAGAGIGRASAEAFAREGARIIATDISAEALAALKGTANIETQLLDVTDPAAIAALFTTHPDLDILFNVAGWVHHGTIETCGRDDWDRSLLVNLTSMYETSRAALPNMLAHGGGVILNMSSVASSVVGAPNRFAYGATKAGVIGLTKAIAADYAGRNIRCNAICPGTVDTPSLQGRMSAQGDYDSARQMFIARQPMGRLGTAEEIAHLAVYLASDEASFTTGAIHVVDGGWTN

SEQ ID NO: 1769 - DNA, 780 bp, Rhizobium leguminosarum bv. viciae 3841
  CDS (1)..(780): transl_table=11
atgggcggccgcctgcagggcaagaacatcctgataacaggtgctgcgcagggtatcggccttgcgatcgcgaaggctttcctgcgggaggatgccgccgtctttctcgtcgatcgcgatgcggcgctgctggcgcaggcggcgaaagagctccagagcagtggcggccagcttggttatctgccggccgatattaccgatgccggcacgatcacgacattggtcgctcaggcgaatgaagaaatcgggcagctgaatgcgctcgtcaacaatgccggggtgaatgtcttcgccgaaccgctcgagacgacggacgaggaatggaaccgctgcttcgacatcaatctgaagggcgcatggaactgctgcaaggcggtgctgccgggcctgatcgaacagggcggcggcgttatcctcaacatcgcctcgacgcacgctttcaccatcatcccgcacacatttccctatccgctggcaaaacacgccctgctcggaatgacgaaatccttgggcctcgaatatgccgcccgcaatatccgcgtgaacgcgctggcgccgggctatgtctcgacgcagaaggtgatcgattactggaacggctttcctgatccggaggcggcaaaggccgaaacgatgaaactgcatcctggcgggcgcatcgcgacgccggaggagattgccatggcggccgtgttcatgatctccgacgagtgcccgttcatcaatgccacctgcctgacgatcgatggcggcctcagcgtgctgcagcatcccgcctga

SEQ ID NO: 1770 - protein, 259 aa, Rhizobium leguminosarum bv. viciae 3841
MGGRLQGKNILITGAAQGIGLAIAKAFLREDAAVFLVDRDAALLAQAAKELQSSGGQLGYLPADITDAGTITTLVAQANEEIGQLNALVNNAGVNVFAEPLETTDEEWNRCFDINLKGAWNCCKAVLPGLIEQGGGVILNIASTHAFTIIPHTFPYPLAKHALLGMTKSLGLEYAARNIRVNALAPGYVSTQKVIDYWNGFPDPEAAKAETMKLHPGGRIATPEEIAMAAVFMISDECPFINATCLTIDGGLSVLQHPA

SEQ ID NO: 1771 - DNA, 750 bp, Rhizobium leguminosarum bv. viciae 3841
  CDS (1)..(750): transl_table=11
atgacaacccccgatttgacaagcagacttgccggcaagaccgttctcatcaccgccgccggccagggcatcggccgggcaacggcggcggcctttgccgcgatcggcgccaaggtccacgcgaccgatatcaacaccgaggccttggcgacgcttgccgccgaaaccggcgtctccacccataagctgaacgtgctcgaagaggatgcggtcaaggccctggtcgccgagatcggcgccgtcgacgtgctgttcaactgcgccggtttcgtccatgccggctcgatcctggagatgacggattccgatctcgaattcgccttcgacctcaacgtcaaggcgatgatccgcaccatccgcgccgtgctgccgggcatgatcgagcgcaaggacggagcgatcatcaacatggcctccgtcgcctccagcatcaagggcgtgccgaaccgcttcgcctatggcgtcaccaaggcggcggtgatcgggctcaccaaggccgtcgccgccgattacgtcggtcagggcatccgctgcaacgccatctgccccggcacggtggaaagcccgtcgctgcaggaccgcatgcgggcgcagggcgactacgacgcggcgcgtgccgccttcatcgcccgccagccgatgggccggctgggctcaccggaagagatcgccgatctcgccgtctatctcgccggcgcgacctacacgtcgggccaggcgatcgccatcgacggcggctggacgatctga

SEQ ID NO: 1772 - protein, 249 aa, Rhizobium leguminosarum bv. viciae 3841
MTTPDLTSRLAGKTVLITAAGQGIGRATAAAFAAIGAKVHATDINTEALATLAAETGVSTHKLNVLEEDAVKALVAEIGAVDVLFNCAGFVHAGSILEMTDSDLEFAFDLNVKAMIRTIRAVLPGMIERKDGAIINMASVASSIKGVPNRFAYGVTKAAVIGLTKAVAADYVGQGIRCNAICPGTVESPSLQDRMRAQGDYDAARAAFIARQPMGRLGSPEEIADLAVYLAGATYTSGQAIAIDGGWTI

SEQ ID NO: 1773 - DNA, 783 bp, Pseudomonas aeruginosa UCBPP-PA14
  CDS (1)..(783): transl_table=11
atgaacgattttccgaagtggacaggccaggtcgcgctcatcagcggcgccggcagcgaactcggcatcggtttcgccattgcccggcggctggcccgcgaaggcgtgcgcctgctgatcaccgccagcagcgagcggattaggcaacgagcggaggaactgagcgcatgtggtcacgacgtgcgcgccgcgagcgccgacctgaccgacgaagcccaggtgcagggtctgctggactgggccgaagcccagtggggacgggtcgacatcctggtgaacaatgccggcatggcccagttggacagcgcggagcccttcagcgcagtggaagcgacctcgctgcgggattggcaactgtccctgtcgcgcaacctgaccagtgctttcctgctcacccgcggcctgctgccgggcatgcgcgagcgcggctacgggcggatcgtcaacgtcgcctccaccaccggaacccgcggcagcaacccgggcgaagccgcgtatagcgcggccaaggccggtctggtcggctggagcatgggcctggcgctggaggtggcgaagagcggcatcacggtgaacagcgtcgcgccgggctggatcgccaccgcctcgagcaccgccgaagaacgccaggccgccctggccagccccagcggacgtgccggccggcccgaagaggtggccgccgcggttgccttcctcgcctcgcccgaagccagcttcgtcaacggcgaactgctggtggtggacggcggcaactgcctgatcgaaaacaaacggagctga

SEQ ID NO: 1774 - protein, 260 aa, Pseudomonas aeruginosa UCBPP-PA14
MNDFPKWTGQVALISGAGSELGIGFAIARRLAREGVRLLITASSERIRQRAEELSACGHDVRAASADLTDEAQVQGLLDWAEAQWGRVDILVNNAGMAQLDSAEPFSAVEATSLRDWQLSLSRNLTSAFLLTRGLLPGMRERGYGRIVNVASTTGTRGSNPGEAAYSAAKAGLVGWSMGLALEVAKSGITVNSVAPGWIATASSTAEERQAALASPSGRAGRPEEVAAAVAFLASPEASFVNGELLVVDGGNCLIENKRS

SEQ ID NO: 1775 - DNA, 741 bp, Mycobacterium avium 104
  CDS (1)..(741): transl_table=11
atgtccttgctcagtggtcagaccgcggtcatcacaggtggcgcacaaggtttggggttcgcgatcgccgaacggttcgtcgccgaaggggcgcgggtcgtcctcggcgacgtcaatctggaggcgacgcaaaccgcggccaaacagctgggcggtgaccaggtggcgctggccgtgcgctgcgacgtcaccaagtcgtccgaggtcgaaacgctgatccagaccgccgtcgagcggttcggcggcctggacatcatggtcaacaacgccgggatcacccgggacgccaccatgcgcaagatgaccgaggagcagttcgatcaggtcatcgccgtgcacttgaagggcacctggaacggcacccggttggcggcggcgatcatgcgggaaaacaagcgcggcgccatcatcaacatgtcctcggtgtcgggcaaggtcggcatggtcggccagaccaactactcggcggccaaggccggcatcgtgggcatgaccaaggcggccgccaaggagctggcctacctgggtgtgcgggtgaacgcgatcgcccccggtttgatccgctcggcgatgacagaggccatgccgcaacgcatttgggactccaaggtggccgaggtgccgatgggccgggccggcgagcccagcgaggtcgccagcgtggcgctgtttttggcctccgacatgtcgtcgtacatgaccggcaccgtcatggagatcacgggcggccggcacctgtga

SEQ ID NO: 1776 - protein, 246 aa, Mycobacterium avium 104
MSLLSGQTAVITGGAQGLGFAIAERFVAEGARVVLGDVNLEATQTAAKQLGGDQVALAVRCDVTKSSEVETLIQTAVERFGGLDIMVNNAGITRDATMRKMTEEQFDQVIAVHLKGTWNGTRLAAAIMRENKRGAIINMSSVSGKVGMVGQTNYSAAKAGIVGMTKAAAKELAYLGVRVNAIAPGLIRSAMTEAMPQRIWDSKVAEVPMGRAGEPSEVASVALFLASDMSSYMTGTVMEITGGRHL

SEQ ID NO: 1777 - DNA, 750 bp, Mycobacterium avium 104
  CDS (1)..(750): transl_table=11
atggcggagtcgctactgcttggcaaagtcgcggtggtgacgggcgcggggcaaggtatcggtcgtgagattgcccgggcgctgcaccgccacggcgcgcgggtcgtgctggcagacctcgacggcagcgccgcccgatccgcggcggcacagatcgacgacagcggcgcaaactgcactggattggcgtgcgatgtgacgtcggaggagcaggtgggcgctctggtggctggcacggtgcgtgagcatggtgggctggacgtgttcgtcaacaacgccggcatcacacgcgacgcatcgctgaaaaggatgacggtagccgacttcgacgcggtcatcgccgtccaccttcgcggcacctggctcggcgtacgggaagccgccgcggtgatgcgtgagcgcaagacgggcagcatcgtcaacatgtcgtccctttcgggcaaagccggtaatccgggtcagacgaattacagcgccgccaaagccggcatcgtcgggctcacgaaagcggccgcaaaagagttggcgcatcacaatgttcgtgtcaacgcgatccagccgggcttgatccgcacgcccatgacagcggcgatgccgccggacgtctttgccgagcgagaggctgcggtaccgatgaaacgtgcgggcgaacccgaggaggtcgcgggggcagtggtgttcctggcttccgaactctctagctacatcaccggtacggtcctcggagtcggtggcgggaggtatatgtga

SEQ ID NO: 1778 - protein, 249 aa, Mycobacterium avium 104
MAESLLLGKVAVVTGAGQGIGREIARALHRHGARVVLADLDGSAARSAAAQIDDSGANCTGLACDVTSEEQVGALVAGTVREHGGLDVFVNNAGITRDASLKRMTVADFDAVIAVHLRGTWLGVREAAAVMRERKTGSIVNMSSLSGKAGNPGQTNYSAAKAGIVGLTKAAAKELAHHNVRVNAIQPGLIRTPMTAAMPPDVFAEREAAVPMKRAGEPEEVAGAVVFLASELSSYITGTVLGVGGGRYM

SEQ ID NO: 1779 - DNA, 735 bp, Mycobacterium smegmatis str. MC2 155
  CDS (1)..(735): transl_table=11
ttgctgaccggacagactgcggtggtcacgggcggagcccaggggctcggtctcgccatcgcgaagcgcttcatctccgaaggcgcccgcgtggtgctgggcgacctcaactccgaggccaccgaggccgcggtggaggagctcggcggatccgaggtggccgcggccgtgcgctgcgacgtgacgtcgtcggccgacgtcgacgctttggtgcaagccgcggtcgagcggttcggcggtctggacatcatggtcaacaacgcgggcatcacacgtgatgcgacattgcgcaagatgaccgaggagcagttcgaccaggtcatcgcggtccatctgaagggcacgtggaacggcaccaaggcggccgcggcgatcatgcgggagaacaagcgcggcgcgatcgtgaacatgtcctcgatctccggcaaggtcggactgatcggacagaccaactactcggcggccaaggccggcatcgtcggcatgaccaaggccgcggccaaggaactcgcgtacctcggggtgcgggtgaacgcgatccagcccgggctcatccgttcggccatgaccgaggccatgccgcaacgcatctgggacgagaagctcgccgagatcccgatggggcgtgccggtgaacccgacgaggtggccaaggtggcgctgttcctcgcgagcgatctgtcgtcgtacatgaccggcaccgtgctcgaggtcaccggcggtcggcacgtatga

SEQ ID NO: 1780 - protein, 244 aa, Mycobacterium smegmatis str. MC2 155
MLTGQTAVVTGGAQGLGLAIAKRFISEGARVVLGDLNSEATEAAVEELGGSEVAAAVRCDVTSSADVDALVQAAVERFGGLDIMVNNAGITRDATLRKMTEEQFDQVIAVHLKGTWNGTKAAAAIMRENKRGAIVNMSSISGKVGLIGQTNYSAAKAGIVGMTKAAAKELAYLGVRVNAIQPGLIRSAMTEAMPQRIWDEKLAEIPMGRAGEPDEVAKVALFLASDLSSYMTGTVLEVTGGRHV

SEQ ID NO: 1781 - DNA, 768 bp, Mycobacterium smegmatis str. MC2 155
  CDS (1)..(768): transl_table=11
atggatgtgcgttcggcattcgatctgagcgggcgcactgcgctggtgaccggcggaaaccagggcctgggcaaggctttcgcgatcgcactcgcacaggccggtgcccgtgtgtccttctcgggccgcaacgccgaacgcaacgagaagaccgcggccgaggccgccgcggcaggacaccaactgcacgcgatcacggccgacatcaccagggccgaggacgtcgagcgcatgacggccgaggccatcgaagcgctcggtcacatcgacatcctggtcaacaacgcgggcacgtgccaccacggtgagtcctggacggtcaccgaagagcagtgggacgacgtgttcgacctcaacgtcaaggcgctgtgggcgtgttcgctcgccgtcggtgcgcacatgcgcgagcgcggcagcggttcggtggtcaacatcggctcgatgtcgggcatcatcgtcaaccgcccccagatgcagcccgcgtacaacgcctccaaggccgcggtgcaccacctcacgaaatcccttgccgccgagtgggccccgttgggaatccgggtcaacgcgctggctcccggatacgtgaagaccgacatggccccggttgaccggccggagttcaagcggtactggatcgacgacaccccgcagctgcgctacgcggtgcccgaggagatcgcgcccagcgtggtgttcctggccagcgacgcggcctccttcatcaccggctcggtgctcgtcgcggacggcggatacaccgcatggtag

SEQ ID NO: 1782 - protein, 255 aa, Mycobacterium smegmatis str. MC2 155
MDVRSAFDLSGRTALVTGGNQGLGKAFAIALAQAGARVSFSGRNAERNEKTAAEAAAAGHQLHAITADITRAEDVERMTAEAIEALGHIDILVNNAGTCHHGESWTVTEEQWDDVFDLNVKALWACSLAVGAHMRERGSGSVVNIGSMSGIIVNRPQMQPAYNASKAAVHHLTKSLAAEWAPLGIRVNALAPGYVKTDMAPVDRPEFKRYWIDDTPQLRYAVPEEIAPSVVFLASDAASFITGSVLVADGGYTAW

SEQ ID NO: 1783 - DNA, 774 bp, Nocardioides sp. JS614
  CDS (1)..(774): transl_table=11
atgagcacaaggttcgaaggcaaggtcgcgatcgtcactggggcaggctccgggatcggacgggcgaccgccgaactgctcgccaccgaaggcggcgccataggcgtacttgacctgcgcatcgaggccgcggaggagactgtcgcggccatcaccgccgctggaggccgtgcaattgccctcgccgccaacgtggccgacaccgctgaagtcgaagcggccgtcgccaaggtcgtggcggagtacggcggtttgcacgtgctctataacaacgccggctgcgactccaaggggtcggtcgcggacgccagcgatgccgactgggagcgcgcgatggcggtcaacgccaagggcactttcgtctgctcgcgcgcggcagtcccccacatggccgcctcgggaggcggtgccatcgtcaaccagggatcggtggccgccctcgtaggcgtgcccaacttcgccgcgtactgcgccgccaagggagctgtcgttgcgctcactcggtcgatggccgtcgacttggcgccagtcaagatccgggtcaacgtgatctgcccggggaccgtctttaccccgctgatggagccgatgcttcgggcacgaggcgatggtgatctcgaggccggtctggccaagacactcgtgaagtaccccatcggacggctgggcactcccgaggaaatcgctcgggttgcagcgttcctcgcgtccgacgattcctccttcctgaccggttccgtcatcgccgccgatggcggaatgacagcgcagtag

SEQ ID NO: 1784 - protein, 257 aa, Nocardioides sp. JS614
MSTRFEGKVAIVTGAGSGIGRATAELLATEGGAIGVLDLRIEAAEETVAAITAAGGRAIALAANVADTAEVEAAVAKVVAEYGGLHVLYNNAGCDSKGSVADASDADWERAMAVNAKGTFVCSRAAVPHMAASGGGAIVNQGSVAALVGVPNFAAYCAAKGAVVALTRSMAVDLAPVKIRVNVICPGTVFTPLMEPMLRARGDGDLEAGLAKTLVKYPIGRLGTPEEIARVAAFLASDDSSFLTGSVIAADGGMTAQ

SEQ ID NO: 1785 - DNA, 777 bp, Nocardioides sp. JS614
  CDS (1)..(777): transl_table=11
atgaaaagcacgaggttcgacaacaaggtggccgtcatcaccggcgccggatccgggatcggccgcgccgcggccgagctcctcgcctccgagggtgccgccgtcggcgtactcgacctgcgcgcagaatccgcagaggagaccgtcgcggcgatcgtcgactcaggaggacgcgccatcgccctggccgcgaacgtcgcggattccgccgaggtcgaggcagccattgccaaggtcgtcgccgagtacggcggcctgaacgtgctctacaacaacgctggctgcgactctcgcgggtcggtcgccgacgccaccgatgaggactgggaacgggccttctcggtcaacgccaagggcacttttgtctgctcccgtgcggccgtcccccatctgaccgcatccggcggaggagccatcgtcaaccaaggatcggttgctgcgcttgtcggagtgcccaacttcgccgcctactgcgccgcgaagggtgccgtggtcgcgctgaccaggtcaatggcgatcgacctagcgccgcgcaagatccgggtgaacgtgatctgccccggcaccgtgttcacccccttgatggagccgatgctgcgagcccgcggcgacggagaccttgaggccggtctggccaagaccctggtgaagtaccccatcggacggctcggcacccccgaggagatcgcccgcgtggccgccttcctagcctcggacgactcctcgttcctcaccggctcggtgatcgccgccgacggcggcatgacggctcagtga

SEQ ID NO: 1786 - protein, 258 aa, Nocardioides sp. JS614
MKSTRFDNKVAVITGAGSGIGRAAAELLASEGAAVGVLDLRAESAEETVAAIVDSGGRAIALAANVADSAEVEAAIAKVVAEYGGLNVLYNNAGCDSRGSVADATDEDWERAFSVNAKGTFVCSRAAVPHLTASGGGAIVNQGSVAALVGVPNFAAYCAAKGAVVALTRSMAIDLAPRKIRVNVICPGTVFTPLMEPMLRARGDGDLEAGLAKTLVKYPIGRLGTPEEIARVAAFLASDDSSFLTGSVIAADGGMTAQ

SEQ ID NO: 1787 - DNA, 801 bp, Mycobacterium sp. KMS
  CDS (1)..(801): transl_table=11
atgccgcgcctcctcgacaaggtggtcgtggtgaccggggcggcccgggggaccggccgggtgcactgcgagcggttcgccgaggaaggcgccgacgtcatcgcgctcgacgtcgcggcggtggccgacgagctgtcgggaacggcggccgcagtggcacgacacggccgacggtgtgtgacgggagaggccgacgtgcgtgacttcgccgccttgacggccgcgatcgatcgcggggtcgaggagctcggtcggctcgacgtcgtcgtggcgaatgcgggcgtccacccggctggtgcgccggcctgggaactgacgggcgaggcctggcggcaagcactcgacgtcaacgtgaccggtgtatggcatacggtcaaagcagctgcgcggcacatggattcaggtggtggggcggtgatcgtcatcagctccacgaatggcctgcgcgggaccccgaactccgcgcactacaccacgagcaagcacgccgtggtcgggttggcccggaccctggccaacgaactgggtccccgcagcatccgggtcaacacagtccacccgggcgccgtcgcgacgccgatggtgctcaacgaagccaccttcagacggttacgcccggacctcgaagaacccaccgccgacgacgccgcggaggtgctccgagcgcggaacctccttccggtgccgtgggtcgatccggtcgacgtcgccaacgcggtggtgttcctcgcctcagacgaggcgcgctacatcaccggctcacagctcgtcgtcgacgcgggcctgacgcagaaggtatga

SEQ ID NO: 1788 - protein, 266 aa, Mycobacterium sp. KMS
MPRLLDKVVVVTGAARGTGRVHCERFAEEGADVIALDVAAVADELSGTAAAVARHGRRCVTGEADVRDFAALTAAIDRGVEELGRLDVVVANAGVHPAGAPAWELTGEAWRQALDVNVTGVWHTVKAAARHMDSGGGAVIVISSTNGLRGTPNSAHYTTSKHAVVGLARTLANELGPRSIRVNTVHPGAVATPMVLNEATFRRLRPDLEEPTADDAAEVLRARNLLPVPWVDPVDVANAVVFLASDEARYITGSQLVVDAGLTQKV

SEQ ID NO: 1789 - DNA, 783 bp, Acidovorax sp. JS42
  CDS (1)..(783): transl_table=11
atgctgaacggcaaaaccgccctcgtcaccggctccaccagcggcatcggcctgggcatcgccaaggcgctcgcgcgccagggggcgaacatcgtgctcaacggctttggcgacgtggacggtccgcgcgccgaggtgctggccgccggcgaggccgcaggcgcccgcgtggcctaccacggcgcggacatgagccgccccgcggagatcgaggacatgctcaagtacgccgcatcccagttcggccgcgtggacatcctggtcaacaacgccggcatccagcacgtggccagcgtgcaggacttccccgtggagaagtgggacgccatcatcgccatcaacttgaccagcgccttccacaccacgcgcctggcgctgcccggcatgctggccaatgactggggccgcatcatcaatgtggcgtcggtgcacggcctggtgggctcggcgcagaagtcggcctacgtggcggccaagcacggcatcgtgggcctgaccaaggtgacggcgctggagaccgccccgacgggcgtgacctgcaacgcgatctgccccggctgggtgctcacgccgctggtgcaaaagcaggtggacgccaaggccgccgcgctgggcatctccaatgaagaagccaagaaagtgctgctgggcgagaaggagccctccatgcagttcaccacacccgaagagctgggtgaactggccgtgttcttctgctcggccgccgccaacaacgtgcgcggcgtggcatggaatatggacggcggctgggtggcgcagtaa

SEQ ID NO: 1790 - protein, 260 aa, Acidovorax sp. JS42
MLNGKTALVTGSTSGIGLGIAKALARQGANIVLNGFGDVDGPRAEVLAAGEAAGARVAYHGADMSRPAEIEDMLKYAASQFGRVDILVNNAGIQHVASVQDFPVEKWDAIIAINLTSAFHTTRLALPGMLANDWGRIINVASVHGLVGSAQKSAYVAAKHGIVGLTKVTALETAPTGVTCNAICPGWVLTPLVQKQVDAKAAALGISNEEAKKVLLGEKEPSMQFTTPEELGELAVFFCSAAANNVRGVAWNMDGGWVAQ

SEQ ID NO: 1791 - DNA, 783 bp, Exiguobacterium sibiricum 255-15
  CDS (1)..(783)
atgaaacaacttgaaggaaaagtcgcattgattaccggagcagcaagcggaatcggtctcgaaattgcggaagaatttgcacaggaaggtgcaaaagtcgtcatcgttgatttacaggagaatgcagccaaacaggcggcggaaacacttcaaagtaaaggattcgaagcctttgctgtcgcaggggacgtcacaagtgaaacggcgattcagtcaagcattgaacaaacgatgaatcactacggacggatcgatatcgtcatcaacaatgccggcatgcaacatgtttcaccaatcgaagagttctcgactgaaaaatttgatttacttcaaagcatcatgttacgggcaccgttcctctatacgaaatacgtgttcccgatcatgaaaaaacaaggattcggtcgtatcctgaacatgtcatccattaacggtttgatcggatttgccggtaaagccgcttacaacagtgcgaaacacggtgtcatcggtttgacgaaagttgccgcactagaaggggcaacgtccggtattaccgtcaatgcgatttgtccgggttatgttgatacaccgctcgtccaaaaacaattgtcttcgcttgccgaaacacggaatgtgccgctcgaccgggtacttgaagaagtcatctacccgctcgttccgcaacatcgcttactgcaagtcaaagagattgccgactacgcgatcttcctcgcaagtgacaaagcagccggtgtcaccggtcaagctgtcgttcttgacggcggatataccgctcaataa

SEQ ID NO: 1792 - protein, 260 aa, Exiguobacterium sibiricum 255-15
MKQLEGKVALITGAASGIGLEIAEEFAQEGAKVVIVDLQENAAKQAAETLQSKGFEAFAVAGDVTSETAIQSSIEQTMNHYGRIDIVINNAGMQHVSPIEEFSTEKFDLLQSIMLRAPFLYTKYVFPIMKKQGFGRILNMSSINGLIGFAGKAAYNSAKHGVIGLTKVAALEGATSGITVNAICPGYVDTPLVQKQLSSLAETRNVPLDRVLEEVIYPLVPQHRLLQVKEIADYAIFLASDKAAGVTGQAVVLDGGYTAQ

SEQ ID NO: 1793 - DNA, 741 bp, Roseovarius nubinhibens ISM
  CDS (1)..(741): transl_table=11
atgcggctcgcggggaaacgggcggtcgtcaccggcggacggcagggcatcgggcgcggcatcgtcgacggctttctcgaccatggcgcagaggtcatcacctgtggccggggggcgcggcccgaagggctgcccgagggctgcggctgggtgacggcggatgtgtcggacgcggcgcaggtggcgcagctggtctctgaggccggcgccatcgacattctggtcaacaacgcgggcgtgcaggtggaaaagaccgtggccgacagcacggatgccgattgggatctggtgatcggggccaattgccagggcgtgttcaacgcctgccggggctttatcccggtgctgcgcgacggcggtgtgatcctcaacatggggtcgatctcggccaatcacgccgatccctccatggcgctctataacgcgtccaaggggttcgtgcatgggctcacccgctcgatcgcggtcgatcacgggccgcggctgcgctgcaatgcgatctgcccgggctggatcaacaccggcatgctcgaggcggggttcgacctcgcccaaaacccggaggcggcgcgcgccgatgcgatccgccgccacccggcgcggcgctttggcgaaccggcggatattgccgccatggcggtctggctggcgtcggacgaggcgcggttcgtctcggggcagtttttcaccgtggatggcggcctgacggcggcctcccctttgcaaccggggttattttga

SEQ ID NO: 1794 - protein, 246 aa, Roseovarius nubinhibens ISM
MRLAGKRAVVTGGRQGIGRGIVDGFLDHGAEVITCGRGARPEGLPEGCGWVTADVSDAAQVAQLVSEAGAIDILVNNAGVQVEKTVADSTDADWDLVIGANCQGVFNACRGFIPVLRDGGVILNMGSISANHADPSMALYNASKGFVHGLTRSIAVDHGPRLRCNAICPGWINTGMLEAGFDLAQNPEAARADAIRRHPARRFGEPADIAAMAVWLASDEARFVSGQFFTVDGGLTAASPLQPGLF

SEQ ID NO: 1795 - DNA, 753 bp, Synechococcus sp. WH 7805
  CDS (1)..(753): transl_table=11
atgaacccaacccggaccctcgatggtcaaaccgcccttgtgaccggtgccagccggggaatcgggcgtgccgtggctctggccctggctgaatgcggcgcggaagtggtggtgaattacgccagctccccggatgcggccgaagccgtggtgaaggagatcgaaagcatggggcaaaagggctatgcccttcaggccgacgtgggcgatgaagacgccgtggacgcactgatcaaaacggtgcttgagcgcagcggtcgcatcgatgtactagtcaataacgcgggcatcacgcgcgatgggctgctgatgcggatgaaatccaccgactggaacgcggtgatcaatctcaatctcaccggggtgtttctctgcacccgcgctgtgacccggccgatgctcaagcaaaaaagcggtcggatcatcaacatcacctcagtcgttggactgatgggcaatgcagggcaggctaattacgccgctgccaaggccggtgtcgtgggcctgacccgcagtgctgcgaaggaaatggcaagccgaggtatcacggtgaatgccgtagccccgggattcatcgccaccgacatgaccaaggaccttgacagcgagggcattctcacggctatcccgcttgggacgttcgggaccccggagcaggtggcaggggcggtgcgcttccttgccgcagattcggccgcggcttacatcaccgggcaggttcttcaggtggatggcggcatggtgatgggttga

SEQ ID NO: 1796 - protein, 250 aa, Synechococcus sp. WH 7805
MNPTRTLDGQTALVTGASRGIGRAVALALAECGAEVVVNYASSPDAAEAVVKEIESMGQKGYALQADVGDEDAVDALIKTVLERSGRIDVLVNNAGITRDGLLMRMKSTDWNAVINLNLTGVFLCTRAVTRPMLKQKSGRIINITSVVGLMGNAGQANYAAAKAGVVGLTRSAAKEMASRGITVNAVAPGFIATDMTKDLDSEGILTAIPLGTFGTPEQVAGAVRFLAADSAAAYITGQVLQVDGGMVMG

SEQ ID NO: 1797 - DNA, 744 bp, Desulfitobacterium hafniense DCB-2
  CDS (1)..(744): transl_table=11
atgttgctgaataatagcgtagccattgtcaccggaggaagtcgcggcattggacgtgccattgccttggaactggcccgtgccggggctaaagtggtggtgaactatgccggacatggggaaaaggcggaagagactctgagcctcattcaggaagcgggcggagaggctttggcagttcaggctgatgtcagccaggttgaagatgtggaacggctgattcagaccacccttaaaacctatggcaagatcgatattctggtcaataatgccggaattacccgcgacaccctgctgctgcgtatgaaggaaacggattgggatgcggtactggataccaatctcaaaggggttttcttatgcacgaaggcggtcagcaagtccatgatgaagcaacgctccggagtgattatcaatatctcctctgtggtcggtattaccggcaatgcaggacaagcaaattactcagcggccaaagcgggaatcattggctttaccaaatccattgccaaggagctgggctcccgtggcatccgggtcaatgcagtggctccggggtatatttctacagatatgacggaatccttaggagaagaggtccgggagcaggtcatgacccagattcctctgggcagaatgggtcagcctgaggatatagccaggacggtcgtctttttggcttcaccggccgcttcctacatcactgggcaaactttagccgtagacggcggcatggctatgtaa

SEQ ID NO: 1798 - protein, 247 aa, Desulfitobacterium hafniense DCB-2
MLLNNSVAIVTGGSRGIGRAIALELARAGAKVVVNYAGHGEKAEETLSLIQEAGGEALAVQADVSQVEDVERLIQTTLKTYGKIDILVNNAGITRDTLLLRMKETDWDAVLDTNLKGVFLCTKAVSKSMMKQRSGVIINISSVVGITGNAGQANYSAAKAGIIGFTKSIAKELGSRGIRVNAVAPGYISTDMTESLGEEVREQVMTQIPLGRMGQPEDIARTVVFLASPAASYITGQTLAVDGGMAM

SEQ ID NO: 1799 - DNA, 756 bp, marine gamma proteobacterium HTCC2080
  CDS (1)..(756): transl_table=11
atgttttcagagttgaaaggaaaagttgctgttgttacgggtggcggtgctggcatcggccttgcttgcgcggcacggcttgcagaagctggtgtcgcagtgggcgtcgcagacattgatagcgctgcggcgcatcaagccgctgcagacttaacgtcccaaggtcatcgttgcgtggcgatagttaccgatgtcagcaaggccaaagaggttgaaaagttatttcaaataaccaacgaagcttttggccctatcaacattgctgtcaacaatgcaggggttggcgcgccactaacaccgcttggtgatactgaggaggaagattttgaccgagtcatggctgtcaatttgaaaggggtatggctgtgcatgagggcagcattgcgtcacatggcaccgcaaaaatcaggctccattatcaacatggcgtcggcactgagtaccaccacatttccaggcagcggcctttacacagcaagtaagcacggtgtcgcgggactgactcgaagcgctgccgtcgagtatggcgagagtggtatccgtataaatgctatctgccccggcttcatttccacgccactgctgcacagcacagttaccgaggaggcggccaaatcgatggcggcaaggcaccctatgaaccgcttaggcaccccagcagaaatcgctgacgcggttacttacttggcatcagatgcctcgtcattcgtcactggcagcctattctcaattgatggcggctggacagcgacctaa

SEQ ID NO: 1800 - protein, 251 aa, marine gamma proteobacterium HTCC2080
MFSELKGKVAVVTGGGAGIGLACAARLAEAGVAVGVADIDSAAAHQAAADLTSQGHRCVAIVTDVSKAKEVEKLFQITNEAFGPINIAVNNAGVGAPLTPLGDTEEEDFDRVMAVNLKGVWLCMRAALRHMAPQKSGSIINMASALSTTTFPGSGLYTASKHGVAGLTRSAAVEYGESGIRINAICPGFISTPLLHSTVTEEAAKSMAARHPMNRLGTPAEIADAVTYLASDASSFVTGSLFSIDGGWTAT

SEQ ID NO: 1801 - DNA, 771 bp, Pseudomonas putida GB-1
  CDS (1)..(771): transl_table=11
atgaccctcaacggcaagactgcactcgtcaccggttccaccagcggcatcggcctgggcatcgcccaggtgttggcccgcgcgggtgccaacatcgtgctcaacggctttggcgacccggcaccggccatggccgagattgcccggcacggggtgaaggtggtccatcacccggcagacctgtcggacgtggcccagatcgaggccttgttcaacctggcagaaggccaatttggcggcgtcgacattctggtcaacaacgccggtattcagcatgtggcgccggtggagcagttccccaccgaaagctgggacaagatcattgccctgaacctgtcggctgtattccatggcacccgtttggcgctgccgggcatgcgcacgcgcaactgggggcggatcatcaacatcgcttcggtgcatggtttggtgggttcgaccggcaaggcagcctacgtggcggccaagcacggtgtagtcgggctgaccaaggtggtaggcctggaaaccgccaccagcaaggtcacctgcaacgcgatctgcccaggttgggtattgaccccgctggtacagaaacagatcgacgatcgtgccgccaacggtggcgatccactgcaagcgcaacacgatctattggcagaaaagcaaccgtccttggccttcgttacccccgagcacttgggtgaactggtactattcttgtgcagcgaggccggtagccaggttcgcggcgccgcctggaacgtcgatggtggctggttggcccagtga

SEQ ID NO: 1802 - protein, 256 aa, Pseudomonas putida GB-1
MTLNGKTALVTGSTSGIGLGIAQVLARAGANIVLNGFGDPAPAMAEIARHGVKVVHHPADLSDVAQIEALFNLAEGQFGGVDILVNNAGIQHVAPVEQFPTESWDKIIALNLSAVFHGTRLALPGMRTRNWGRIINIASVHGLVGSTGKAAYVAAKHGVVGLTKVVGLETATSKVTCNAICPGWVLTPLVQKQIDDRAANGGDPLQAQHDLLAEKQPSLAFVTPEHLGELVLFLCSEAGSQVRGAAWNVDGGWLAQ

SEQ ID NO: 1803 - DNA, 774 bp, Pseudomonas putida GB-1
  CDS (1)..(774): transl_table=11
atgctgacttcactacaaggcaaaagcgtattggtcaccggcggtaccagcggtatcggcctgggcatcgccgtcggcttcgcccgccagggcgccaaggtggcgatcagtggccggcaccgggacaaggttgaggctgtcgccagccgcttgcgtgatcaaggcctggccgtcatcggcctggtggccgatgtgggtgaccgcgcgcaggtgctgcggatgatcgaagaggtggcgcaggcccagggcgggctcgatgtactgtgcgccaatgccggggtcttcccctctgccgcactggccgagatgagcgataccgactgggacaaggtgctcggcaccaatgccaaaggcaccttcctctgcgtgcaggcggcgctgccgtatttgcgcagggccgagtacggccgggtgatcctgacctcgtccatcaccgggccagtcaccggctttccaggctgggcgcactacggcgcgagcaaggcagcgcagctgggtttcatgcgtaccgcagcgatcgagctggcccgcgatggcatcaccatcaatgccctgctgccaggcaacatcgttaccgaaggcttgcagggcatgggcgaggactaccaggccagcatggccgcgtccattccgctcaagcgcctcggccaggtcgaggacattgccaatgccgcgttgttctttgcttccagagaggccggctacatcactgggcaaagcctgatcatcgatggtgggcagatcctgcccgagtccctgcaagcactggcctga

SEQ ID NO: 1804 - protein, 257 aa, Pseudomonas putida GB-1
MLTSLQGKSVLVTGGTSGIGLGIAVGFARQGAKVAISGRHRDKVEAVASRLRDQGLAVIGLVADVGDRAQVLRMIEEVAQAQGGLDVLCANAGVFPSAALAEMSDTDWDKVLGTNAKGTFLCVQAALPYLRRAEYGRVILTSSITGPVTGFPGWAHYGASKAAQLGFMRTAAIELARDGITINALLPGNIVTEGLQGMGEDYQASMAASIPLKRLGQVEDIANAALFFASREAGYITGQSLIIDGGQILPESLQALA

SEQ ID NO: 1805 - DNA, 744 bp, Bacillus sp. SG-1
  CDS (1)..(744): transl_table=11
atgaatcttgaaggaaaaactgcactagtaacaggtgcgtcacgtggaatcggaagagagatagcacttgagcttgcacgccagggtgccaatgtagctgttaattatgcaggaagtgaagcgaaagccaatgaagtgacagaagaaatcaaggcaatggggagagaagcatttgccattcaatgcaacgtcgctgatggagaatctgtccaagccatggtcaaggaatccatctcccggtttggttctctcgatattcttgttaataacgctgggattaccagggacaacctgttgatgagaatgaaggaaagtgaatgggatgaagttattgatacaaacttaaaaggtgtattcctctgcacaaaggcagtcagccgccaaatgatgaaacagcgaagcggtagaatcattaacatttcttccattgtcggggtaagcggaaaccctggacaagcaaattacgttgcggctaagtcaggtgtaatcggattgacaaagacatcagcaagagagcttgctgcaagaggaattacagtaaatgctgtcgcacctggcttcatctcgactgacatgaccgacgagctgagtgaagaagtcaagactgaaatgcttaaagggatccctcttagtcgttttggcgaagcaaaagatatcgcgagagtcgtcagcttccttgcttcggaagactcttcctacatgacagggcaaacccttcacgttgacggcggaatggttatgtaa

SEQ ID NO: 1806 - protein, 247 aa, Bacillus sp. SG-1
MNLEGKTALVTGASRGIGREIALELARQGANVAVNYAGSEAKANEVTEEIKAMGREAFAIQCNVADGESVQAMVKESISRFGSLDILVNNAGITRDNLLMRMKESEWDEVIDTNLKGVFLCTKAVSRQMMKQRSGRIINISSIVGVSGNPGQANYVAAKSGVIGLTKTSARELAARGITVNAVAPGFISTDMTDELSEEVKTEMLKGIPLSRFGEAKDIARVVSFLASEDSSYMTGQTLHVDGGMVM

SEQ ID NO: 1807 - DNA, 786 bp, Streptomyces echinatus
  CDS (1)..(786): transl_table=11
atggtgaacgacgatcggcgggtggccctcgtcacgggcgccaccagcggcatcgggctgtccgtcgcccgggacctggcccgcgcgggcctggcggtgttcctctgcgcccgggacacggacgccgtgaagcggacggtggaggaactgcgggccgtcggtcacgaggccgacggcacgtcgtgcgacgtacgggacaagacctcggtccgggccctggtggactccgccctcggggcgtacggccgggtcgacgtcctggtgaacaacgccggccgcaacggcggcggggtcaccgccgatctccccgacgagacctggtacgacgtcatcgacaccaacctcaacagcgtcttcctggtcacccgtgaggtgctcaagcgctccggtatgcgggagcgcggctggggccgggtcatcagcatcgcctccaccggcggcaaacagggcgtggtgctcgcggcgccctactcggcgtccaagcacggggtgatcggcttctccaaagcgctcggcaaggagctcgcgccgaccggcgtcaccgtcaacgcggtgtgcccgggctacgtcgagaccccgatggcccagcgggtgcgggccggctacgccgccgcctgggagaccaccgaggaggacgtactggagcagttccaggccaagatcccgctggggcgctactccacgccggaggaggtggccggcctcgtcggctatctggtgagcgacacggcggcgtccatcacggcccaggcgctgaacgtctgcggcggcctgggcaactactga

SEQ ID NO: 1808 - protein, 261 aa, Streptomyces echinatus
MVNDDRRVALVTGATSGIGLSVARDLARAGLAVFLCARDTDAVKRTVEELRAVGHEADGTSCDVRDKTSVRALVDSALGAYGRVDVLVNNAGRNGGGVTADLPDETWYDVIDTNLNSVFLVTREVLKRSGMRERGWGRVISIASTGGKQGVVLAAPYSASKHGVIGFSKALGKELAPTGVTVNAVCPGYVETPMAQRVRAGYAAAWETTEEDVLEQFQAKIPLGRYSTPEEVAGLVGYLVSDTAASITAQALNVCGGLGNY

SEQ ID NO: 1809 - DNA, 846 bp, Oryza sativa subsp
  CDS (1)..(846)
atggcagcgtcgacgccggcggcgagcagagagcggcggtggagccgcgccggcaagacggcgctcgtcaccggcggcaccaaaggcatcgggcgcgcgatcgtggaggagctcgccgggttcggggtgagggtgcacacgtgttcacgccacgacgccgacctgcaggactgcctccgccggtggaacgccgccgacggtggcggcctcggcggcggcgcggcggcgcccgtcacggcgtccgtctgcgacgtgtcggtgcgcggcgacagggaggcgctggtggcggcggcgcgcgccgcgctcggcgggaggctggacatactcgtcaacaacgtcggccagacgctgttcggcgcggccgcggcgtgcgcggcggaggactacgcgcgcatcatggcgaccaacctcgagtcctgcttccacctcgcccagctcgcgcaccctctcctcctcggcgccggcggcgccgccgcgagcgtggtgaacatctcctccgtcgcagggttcatcgcctacccggcgctgtccgtctactcggcgacgaagggcgccatgaaccagctcacgcggagcctcgccgccgagtgggcgcgcgacggcatccgcgtcaactgcgtcgcgccgggcggcgtccggaccgacatcgccggcagcagcggcgtggcgctggagccgggggcggcgcgggcgatggaggagagggaggcggcgcgggtcgccatgggccgcatcggcgagcccgaggaggtggcgtcgctcgtcgcgttcctctgcatgccggcggcgtcgtacatcaccgggcaggtcatctgcgtcgacggtggccgcaccatcaccgcctag

SEQ ID NO: 1810 - protein, 281 aa, Oryza sativa subsp
MAASTPAASRERRWSRAGKTALVTGGTKGIGRAIVEELAGFGVRVHTCSRHDADLQDCLRRWNAADGGGLGGGAAAPVTASVCDVSVRGDREALVAAARAALGGRLDILVNNVGQTLFGAAAACAAEDYARIMATNLESCFHLAQLAHPLLLGAGGAAASVVNISSVAGFIAYPALSVYSATKGAMNQLTRSLAAEWARDGIRVNCVAPGGVRTDIAGSSGVALEPGAARAMEEREAARVAMGRIGEPEEVASLVAFLCMPAASYITGQVICVDGGRTITA

SEQ ID NO: 1811 - DNA, 963 bp, Oryza sativa subsp
  CDS (1)..(963)
atgcctgccgccgcactcgacctcctccctgacaaggcgcaccagccgtccatggcgccgtcgctccacgcctgggactcccccaatggcgcccccactcccatgcccaagaggctggaagggaaggtggccattgtcaccggcggggcgagggggatcggggaggcgatcgtgaggctgttcgttaagcacggggccaaggtggtgatcgcggacatcgacgacgcggcgggcgaggcgctggcggcggcgctggggccgcacgtcgggttcgtgcggtgcgacgtgtcggtggaggaggacgtggagcgcgccgtcgagcgcgccgtggcgcggtacgggcggctggacgtgctgtgcaacaacgccggggtgctgggccgccagacgcgcgccgccaagagcatcctgtcgttcgacgccggggagttcgaccgcgtgctccgcgtcaacgcgctgggcgccgcgctcggcatgaagcacgcggcgctcgccatgacccagcgccgcgccggcagcatcatctccgtcgccagcgtcgccggcgtgctcggcggcctcggcccgcacgcctacaccgcctccaagcacgccatcgtggggctcaccaagaacgccgcctgcgagctcggcgcccacggcatccgcgtcaactgcatctcccccttcggcgtcgccaccccgatgctcatcaacgcctggcgccagggccacgacgcctccaccgccgacgacgccgacgccgacatcgacctcgacatcgccgtgcccagcgaccaggaggtggagaagatggaggaggtggtcaggggcctcgccacgctcaagggcgcgacgctgagacccagggacatcgccgaggcggcgctcttcctcgccagcgacgactccagatacatttccggccacaacctcgtcgtcgacggcggcgtcaccacctccagaaacctaattggcctttga

SEQ ID NO: 1812 - protein, 320 aa, Oryza sativa subsp
MPAAALDLLPDKAHQPSMAPSLHAWDSPNGAPTPMPKRLEGKVAIVTGGARGIGEAIVRLFVKHGAKVVIADIDDAAGEALAAALGPHVGFVRCDVSVEEDVERAVERAVARYGRLDVLCNNAGVLGRQTRAAKSILSFDAGEFDRVLRVNALGAALGMKHAALAMTQRRAGSIISVASVAGVLGGLGPHAYTASKHAIVGLTKNAACELGAHGIRVNCISPFGVATPMLINAWRQGHDASTADDADADIDLDIAVPSDQEVEKMEEVVRGLATLKGATLRPRDIAEAALFLASDDSRYISGHNLVVDGGVTTSRNLIGL

SEQ ID NO: 1813 - DNA, 837 bp, Oryza sativa subsp
  CDS (1)..(837)
atgtccgccgccgccgcatcctcccccgctccccggttggaaagcaaggttgcgctggttaccggtggtgcttcaggtattggtgaagcaattgttcgcctctttagagagcatggtgcaaaggtatgtattgcagatatccaagatgaagcaggtcagaagctccgggactcccttggaggtgaccaagatgtcttatttgtccactgcgatgtttcggtggaagaggatgtagcccgagcggtcgatgcaacagctgaaaagtttggtactcttgacatcatggtcaacaatgctggctttacaggccagaaaatcacagatatccgaaacatcgacttttctgaagtcaggaaggtaatcgacatcaatttagttggtgtattccacgggatgaaacacgcagcccgcatcatgatccccaataagaaggggtccatcatctcattgggaagtgtttctagtgtcattggagggttgggacctcattcatacacagcaaccaagcatgctgtggtgggtctaaccaagaatgtagctggggaattggggaagcatgggatacgcgtgaactgcgtatctccctatgcagtgcccacggctctctccatgccgtatctgccccagggcgagcgcaaggatgatgccctgaaagactttttcgcctttgttggtggtgaagcaaacctgaaaggtgtggatctgctacctaaggatgttgctcaagcagtgctctacttggcaagcgatgaagcgaggtacatcagcgcgctcaacctcatggtggatggtggctttacctctgtgaatcacaatttgagagcatttgaagattaa

SEQ ID NO: 1814 - protein, 278 aa, Oryza sativa subsp
MSAAAASSPAPRLESKVALVTGGASGIGEAIVRLFREHGAKVCIADIQDEAGQKLRDSLGGDQDVLFVHCDVSVEEDVARAVDATAEKFGTLDIMVNNAGFTGQKITDIRNIDFSEVRKVIDINLVGVFHGMKHAARIMIPNKKGSIISLGSVSSVIGGLGPHSYTATKHAVVGLTKNVAGELGKHGIRVNCVSPYAVPTALSMPYLPQGERKDDALKDFFAFVGGEANLKGVDLLPKDVAQAVLYLASDEARYISALNLMVDGGFTSVNHNLRAFED

SEQ ID NO: 1815 - DNA, 1179 bp, Oryza sativa subsp
  CDS (1)..(1179)
atgagggttcttcctcttcgtgccaccacggctctcctggccaccctcctggtcgccgcctcgttccaggatctcaccgtcgctgcagacggcggcggcggcgtggttccggtcccggatagcgtgtgcgacgccaagtgccagaagcggtgctcgctgaaggtggccgggcggtgcatggggctgtgcaagatgtgctgccacgactgcggcggctgcgtgccgtcggggccgtacgccagcaaggacgagtgcccctgctaccgcgacatggtctcccccaagagccgacgccccaagtgcccgagggagaagagcggagctatgggagctctgtgtggtttgggcagccacttctcgacagcctcgagttgccagaggttacccggcaaggtcgcggtgatcaccggcgcggccagcggcatcggcaaggcgacggccgccgagttcatccgcaacggcgccaaggtcatcctggccgatatacaggacgacctcggccgcgccgtcgcggccgagctgggcccggacgccgcgtacacccgctgcgacgtcaccgacgaggcgcagatcgccgcggcggtggacctcgccgtggcgcggcacggccgcctcgacatcctctacagcaacgccggcatctcgggctcctcggcgcccgcgccgctcgcgtcgctcgacctcgcggacttcgaccgcgtcatggcggccaacgcgcggtccgcggtggcggccgtcaagcacgccgcgcgcgtcatggtgccccggcgcggcggctgcgtcctctgcacggggagcaccacgggcatgctcggcgggctcgcggcgctgccgtacagcctctcgaaggcggcggtggtgggcgtggtgcggctggcggcggccgagctggcgcgctccggcgtgcgcgtgaacgccatctcgccgcacgccatcgcgacgccgctgctggtccggtcgctggcgaggatgaacccgggggtcagcgacgagcagctgaaggagatggtggagagggggatgagcgagctccatggcgcggtgctggagctggaggacgtggcgagggcggccgtctacctggcgtccgacgaggccaagttcgtcaccgggcagaaccacgtcatcgacggcgggttcacggtcgggaagccgatggacatgcgggttccacgttga

SEQ ID NO: 1816 - protein, 392 aa, Oryza sativa subsp
MRVLPLRATTALLATLLVAASFQDLTVAADGGGGVVPVPDSVCDAKCQKRCSLKVAGRCMGLCKMCCHDCGGCVPSGPYASKDECPCYRDMVSPKSRRPKCPREKSGAMGALCGLGSHFSTASSCQRLPGKVAVITGAASGIGKATAAEFIRNGAKVILADIQDDLGRAVAAELGPDAAYTRCDVTDEAQIAAAVDLAVARHGRLDILYSNAGISGSSAPAPLASLDLADFDRVMAANARSAVAAVKHAARVMVPRRGGCVLCTGSTTGMLGGLAALPYSLSKAAVVGVVRLAAAELARSGVRVNAISPHAIATPLLVRSLARMNPGVSDEQLKEMVERGMSELHGAVLELEDVARAAVYLASDEAKFVTGQNHVIDGGFTVGKPMDMRVPR

SEQ ID NO: 1817 - DNA, 897 bp, Oryza sativa subsp
  CDS (1)..(897)
atgcatcgcatcctcagcagggggaggaggacacctgcagcttcgtcttcctccgtcactgccttcgccaccgcctccgattcacagaggttggccgggaaggtcgccgtcatcaccggcggcgccagcggcatcggcagggcgacggcggaggagttcgtcaggaatggcgccaaggtcatcctcgccgatgtgcaggacgacctgggacacgccgtcgccgcggagctcggcgcggacgcggcgtcgtacgcgcgctgcgacgtcaccgacgaggcgcaggtcgcggccgccgtggacctcgccgtggcacggcacgggcgtctcgacgtcgtcttcaacaacgccggcatccccggtgacctcacgccgacccccgtgggcgcgctggacctcgctgacttcgaccgcgtgatggcggtgaacaccagggcggtggtggcgggcgtcaagcacgccgcgcgcgtcatggtgccgcgccgccgcggcagcatcatctgcacggcgagcacggcgggggtgatcggtggcgtggcggtcccgcactacagcgtgtccaaggccgcggtgctcgggctggtgcgcgccgtggcgggcgagatggcgcgctccggcgtgcgcgtgaacgccatctcccccaactacatctggacgcccatggcggcggtcgccttcgcaaggtggtaccccagccggagcgccgacgaccaccgccggatcgtggagaatgacataaacgagatggatggcgtgacactggaggccgaggacgtggcaagggcggcggtgttcctcgcctccgacgaggctaagtacgtgaacgggcacaacctcgttgtcgacggcgggtacaccgtcggcaaggtgcccaacatgccggtcccagatggccattga

SEQ ID NO: 1818 - protein, 298 aa, Oryza sativa subsp
MHRILSRGRRTPAASSSSVTAFATASDSQRLAGKVAVITGGASGIGRATAEEFVRNGAKVILADVQDDLGHAVAAELGADAASYARCDVTDEAQVAAAVDLAVARHGRLDVVFNNAGIPGDLTPTPVGALDLADFDRVMAVNTRAVVAGVKHAARVMVPRRRGSIICTASTAGVIGGVAVPHYSVSKAAVLGLVRAVAGEMARSGVRVNAISPNYIWTPMAAVAFARWYPSRSADDHRRIVENDINEMDGVTLEAEDVARAAVFLASDEAKYVNGHNLVVDGGYTVGKVPNMPVPDGH

SEQ ID NO: 1819 - DNA, 864 bp, Oryza sativa subsp
  CDS (1)..(864)
atgacgtcgacttcgcctgaaagtctaatcgccggtggattctccacggcggcgagctcccaccagaggttggccggcaaggtggccgtcatcaccggcgccgccagcggcatcggcaaggcgaccgccgcggagttcatcaggaacggcgccaaggtgatcatcaccgacgtcaacgacgacctcggccacgccgcggcggcggagctcggcccggacgccacgtacgcgcgctgcgacgtcgccgacgaggcgcaggtcgccgccgccgtcgacctcgccgtggcgcgccacggccgcctcgacgtcatgcacaacaacgccgccatcccggggaggttcccgcaggacgacatggcgtccgtcgacctcgccgacttcgacgccatgatggcggtgaacgcccgcgcgtcgctcgccggcatcaagcacgccgcgcgcgtcatggcgccccgccgcgccggcgtcatcctctgcacggccagcgccgtcggcgtcctcccgctcccggcggtcgccacgcactccatcaccaaggccaccatcatcgccatcgtgcgcgcagcggcggagcccctggcgcgccacggcctgcgggtgaacgccatctcgccgggcgccgtcaggacgccggtcctgcagggcaaggtgtcggtgatgtcggcgtcgtctcctaccatgagcgacgagctgaagcagatgatcgacgtcgacgcgaacgacatgatgatggggccggaggaggtggccatggcggcggtgtacctcgcctccgacgaggccaggtacgtgaccggccacaacctcgtcgtcgacggcgggtacaccgtgcacaaaggagctgacacaccggcggcgcgttga

SEQ ID NO: 1820 - protein, 287 aa, Oryza sativa subsp
MTSTSPESLIAGGFSTAASSHQRLAGKVAVITGAASGIGKATAAEFIRNGAKVIITDVNDDLGHAAAAELGPDATYARCDVADEAQVAAAVDLAVARHGRLDVMHNNAAIPGRFPQDDMASVDLADFDAMMAVNARASLAGIKHAARVMAPRRAGVILCTASAVGVLPLPAVATHSITKATIIAIVRAAAEPLARHGLRVNAISPGAVRTPVLQGKVSVMSASSPTMSDELKQMIDVDANDMMMGPEEVAMAAVYLASDEARYVTGHNLVVDGGYTVHKGADTPAAR

SEQ ID NO: 1821 - DNA, 873 bp, Oryza sativa subsp
  CDS (1)..(873)
atgcagctcgttctcagggtgaagagatcgtcgggtttactacaccaattctccactgcggcgaactcgcagaggttggccgggaaggtggccgtcatcaccggcgccgccagcggcatcggcaaggcgtcggcgaaggagttcatcggcaatggcgccaaggttatactcgccgacgtccaggacgacctcggccgcgccgtcgccgccgagctcggccctggcgcgacgtacacgcggtgcgacgtcacggacgaggcgcaggtcgccgcggcggtggacctcgccgtggcgcgccacggggcgctcgacgtgttctacagcaacgccggcgtcctgggctccatcgcgccggcgccgctcgcctccctggacctgggcgagttcgaccgcgtcatggccgtgaacgcccgcgccgccgtcgccgccgccaagcacgcggcgcgcgccatggtgccgcgccggagcgggtgcgtcctcttcacggggagcgtgtcgggcgtggtgggcggcacggggccgacgtcgtacggcgtgtcgaaggcggccgtgctgggcgtggtgcgcgccgtggccggggagctggcgcgccacggcgtgcgggcgaacgccgtctcgccgtgcggcgtcgcgacgccgctgtccatggtgcaggtccttgaggcctaccccgggatgagcttcgaggagctcaagaacgccatggcggcgtccatggagcagatggaagctggcccgttgatcgaccccgaggacgtggcgagggcggccgtcttcctggcgtccgacgaggccaggtacatcaacggccataacctcgtcgtcgacggcggcttcacggtggggaagctgctcaaaatccccaaggagtag

SEQ ID NO: 1822 - protein, 290 aa, Oryza sativa subsp
MQLVLRVKRSSGLLHQFSTAANSQRLAGKVAVITGAASGIGKASAKEFIGNGAKVILADVQDDLGRAVAAELGPGATYTRCDVTDEAQVAAAVDLAVARHGALDVFYSNAGVLGSIAPAPLASLDLGEFDRVMAVNARAAVAAAKHAARAMVPRRSGCVLFTGSVSGVVGGTGPTSYGVSKAAVLGVVRAVAGELARHGVRANAVSPCGVATPLSMVQVLEAYPGMSFEELKNAMAASMEQMEAGPLIDPEDVARAAVFLASDEARYINGHNLVVDGGFTVGKLLKIPKE

SEQ ID NO: 1823 - DNA, 843 bp, Oryza sativa subsp
  CDS (1)..(843)
atgttgactggattcgtcaacagtttctcctctgtgtcaagacccgaaaggttggctggaaaggtggccgtgatcaccggtggcgcaagcggcatcggcgaggcgacggccaaggagttcatccgcaatggcgccaaggtcatcatcgccgacgtacaagacgatctcggccacaccgtcgctgccgagctcggcccgggctcggcctacacccgctgcgacgtcaccgacgaggcgcagatcgcggcgaccgtggaccttgccgtggcgcgccacggccaccttgacatcctgtacaacaacgccgggatcacaagctcctctgtggggcaccttgcctccctcgacctcgccgacttcgaccgcgtcatggcggtgaacgcccgggcggtgctcgccggcatcaagcacgccgcgcgcgtgatggcaccacgacgcaccggctccatcctctgcacggccagcgtggcgggcatgatgggcggcgagatgccccacgcgtacaacgtctccaaggcggcggtcataggtgtggtgcggtccgccgccggcgagctggcacgccacggcgtgcggctgaacgcgatctcgccgctcggcatcgcgacgccactggcgatgcgcgggttcggcgacatgctggcgtgggcggacgccgagcgggtgaggcggctcatcgaggaggacatgaacgagctagagggcgcgacgctggaggcggaggacatcgcgagggcggcggtgtacctcgcctccgacgaggccaagtacgtcaccgggcataacctcgtcgtcgacggcgggttcaccgtcgggaagcggctcaacgtggcgcgtgcttga

SEQ ID NO: 1824 - protein, 280 aa, Oryza sativa subsp
MLTGFVNSFSSVSRPERLAGKVAVITGGASGIGEATAKEFIRNGAKVIIADVQDDLGHTVAAELGPGSAYTRCDVTDEAQIAATVDLAVARHGHLDILYNNAGITSSSVGHLASLDLADFDRVMAVNARAVLAGIKHAARVMAPRRTGSILCTASVAGMMGGEMPHAYNVSKAAVIGVVRSAAGELARHGVRLNAISPLGIATPLAMRGFGDMLAWADAERVRRLIEEDMNELEGATLEAEDIARAAVYLASDEAKYVTGHNLVVDGGFTVGKRLNVARA

SEQ ID NO: 1825 - DNA, 924 bp, Oryza sativa subsp
  CDS (1)..(924)
atgaaaggcgccgagtgctctcatcgcagggggaggagcagaggtgttcgtccgatgttctcttccggcctggccgatcgctccttctcctcgtcggcgtcaagctccagaaagttggatgggaaagtggccgtgatcaccggcgcggcgagcggcatcggcgaggccacggcgaaggagttcgtcaggaacggcgccaaggtcatccttgccgatatccaggacgacctcggccgcgcggtggccggcgagctcggcgccgacgccgcgtcgtacacgcactgcgacgtcacggtggaggcggatgtcgccgcggccgtcgacctcgccgtggcgcgccacggtcgtctcgacgtcgtgtacagcaacgccggcatcgccggcggcgcacctccggccacgctcgcggcgctcgacctcgacgactacgaccgcgtcatggccgtcaacgccaggtccatggtggcgtgcctcaagcacgcggcgcgcgtcatggcgccgcgccgcgccggctgcatcctctgcacggcgagctccacggcggtgctcggcaacatcgggcccctcgcgtactccatgtcgaaggcggccgtcgtcggcatggtgcagacgacggtggcgaggcagctggcgcgcgacggcgtgcgggtgaacaccatctcgccgcacgccatcccgacggctatggcgctgggcatcatcgccgagacgttcccggcggccaccgcggaggaggtgaggaggatggtgacgagggagatgcaggagctggaaggggcgtcgctggaggtggaagacgtggcgagggcggccgtcttcttggcgtccgacgaggccaagttcatcaccggccacaacctcgtcgtcgacggcggcttcactgtaggcaaggtgctcgtccgggatcctcctggctcagcttga

SEQ ID NO: 1826 - protein, 307 aa, Oryza sativa subsp
MKGAECSHRRGRSRGVRPMFSSGLADRSFSSSASSSRKLDGKVAVITGAASGIGEATAKEFVRNGAKVILADIQDDLGRAVAGELGADAASYTHCDVTVEADVAAAVDLAVARHGRLDVVYSNAGIAGGAPPATLAALDLDDYDRVMAVNARSMVACLKHAARVMAPRRAGCILCTASSTAVLGNIGPLAYSMSKAAVVGMVQTTVARQLARDGVRVNTISPHAIPTAMALGIIAETFPAATAEEVRRMVTREMQELEGASLEVEDVARAAVFLASDEAKFITGHNLVVDGGFTVGKVLVRDPPGSA

SEQ ID NO: 1827 - DNA, 954 bp, Oryza sativa subsp
  CDS (1)..(954)
atggggtcacttcacaaatatgccgtacaagcatcaatccataatggaatttacaaatgtttactgctgttcttgacaccacaaaacacatgggggaagagcatagctgctcacgtattcttctcctcgtcgtcaagatccagaaagttggatggcaaagtggccgtgataaccggcgcagcgagcggcatcggcgaggccacggcgaaggagttcgtcaggaatggcgccaaggttatcattgccgatatcaaggatgatctcggccgcgccgtggccggcgagctcggcgccgacgccgcgtcgtacacgcactgcgacgtcaccgtcgagaaggatgtcgcctcggccgtcgacctcgccgtggcgcgacacggccgcctcgacgtcgtgtacagcaacgccgccatcgcgggtggcgcgcctccggccacgctcgcggcgctcgacctcgacgagtacgaccgcgtcatggccgtcaacgccaggtccatgttggcgtgcgtcaagcacgcggcgcgcgtcatggcgccccgccgcgccggttgcatcctctgcacggccagcacggcggcggtgctcggcggcatggcggcgccggcgtactccatgtcgaaggcggccgtcgtcggcatggtgcggacggtggcgaggcagctggcgcgcgacggcgtgcgggtgaacgccatctcgccgcacgcagtcccgacgccgatggcgataggtctcttctccgagacgttcccggcggcgaccgcggaggaggtgaggaggatggtgacgagggagatgcaggagctggaaggggcgtcgctggaggtggaagacgtggcgagggcggccgtcttcttggcgtccgacgaggccaagttcatcaccggccacaacctcgtcgtcgacggcgggttcacggcaggcaaggtgctcgtccgggatcctccgggctctgcttga

SEQ ID NO: 1828 - protein, 317 aa, Oryza sativa subsp
MGSLHKYAVQASIHNGIYKCLLLFLTPQNTWGKSIAAHVFFSSSSRSRKLDGKVAVITGAASGIGEATAKEFVRNGAKVIIADIKDDLGRAVAGELGADAASYTHCDVTVEKDVASAVDLAVARHGRLDVVYSNAAIAGGAPPATLAALDLDEYDRVMAVNARSMLACVKHAARVMAPRRAGCILCTASTAAVLGGMAAPAYSMSKAAVVGMVRTVARQLARDGVRVNAISPHAVPTPMAIGLFSETFPAATAEEVRRMVTREMQELEGASLEVEDVARAAVFLASDEAKFITGHNLVVDGGFTAGKVLVRDPPGSA

SEQ ID NO: 1829 - DNA, 1044 bp, Oryza sativa subsp
  CDS (1)..(1044)
atgaccgccgtcgacttgatgcctgcagctgacgacgacaacaacaagcagtcatccaccggcctcctccacccccaccagctccccgccgccgccgacaacgccatactacacaataccaggcatccattcatttctactactctagctaattcattcttcaatcgatcgatcagcgcgcgagtaattcattcttcgatttgcaggcggctggaggggaaggtggccatcgtcaccggcggctcgcgtggcatcggcgaagccatcgtaagggccttcgttcaccacggcgctctcgtcgtcgtcgccgacatcgacgacgccgggggccacgcgctggccgccgcgctcggcccgcacgcctgcacctacgtccactgcgacgtggccgaggaggccgacgtggaacgcgccgtcgccaccacgctggagcagcacggccgcctggacgtgctgtgcaacaacgccggggtgctgggccgccagacgcgcggcgccaagagcatcgcgtccctcgacgccgccgagttcgcccgcgtgctgcgcgtcaacgcgctgggcgccgccctcggcatgaagcacgcggcgcgtgccatggtgccccgccgctccgggagcatcgtgtcggtggcgagcgtggcgggcgtgatgggcggcctcggcccgcacgcgtacacggcctccaagcacgccctagtggggctcaccaagaacgccgcctgcgagctcggggagcacggcatccgcgtcaactgcatctcccccttcggcgtggcgacgccgatgctggtgaacgcgtggcggcaggggcagggaggagatcacgcggatgaggatcaggcggcggcgagcgaggaggaggaggtggagaagatggaggagatggtgcggaggctggcgacgctcaaggggccgacgctgcgggcaggcgacatcgcggaggcggcggtgttcctggccagcgacgagtccaggtacgtgtccggccacaacctcgtcgtcgacggcggcgtcaccacctccagaaacgtcatcggcctctga

SEQ ID NO: 1830 - protein, 347 aa, Oryza sativa subsp
MTAVDLMPAADDDNNKQSSTGLLHPHQLPAAADNAILHNTRHPFISTTLANSFFNRSISARVIHSSICRRLEGKVAIVTGGSRGIGEAIVRAFVHHGALVVVADIDDAGGHALAAALGPHACTYVHCDVAEEADVERAVATTLEQHGRLDVLCNNAGVLGRQTRGAKSIASLDAAEFARVLRVNALGAALGMKHAARAMVPRRSGSIVSVASVAGVMGGLGPHAYTASKHALVGLTKNAACELGEHGIRVNCISPFGVATPMLVNAWRQGQGGDHADEDQAAASEEEEVEKMEEMVRRLATLKGPTLRAGDIAEAAVFLASDESRYVSGHNLVVDGGVTTSRNVIGL

SEQ ID NO: 1831 - DNA, 1134 bp, Oryza sativa subsp
  CDS (1)..(1134)
atgagggttcctcctcttcgtgccaccacggctctcctggccaccctcctggtcgccgcctcgttccaggatctcaccgtcgctgcagacggcggcggcggcgtggttccggtcccggatagcgtgtgcgacgccaagtgccagaagcggtgctcgctgaaggtggccgggcggtgcatggggctgtgcaagatgtgctgccacgactgcggcggctgcgtgccgtcggggccgtacgccagcaaggacgagtgcccctgctaccgcgacatggtctcccccaagagccgacggcccaagtgcccgagggagaagagcggagctatgggagctctgtgtggtttgggcagccacttctcgactgcctcgagttgccagaggttacccggcaaggtcgcggtgatcaccggcgcggccagcggcatcggcaaggcgacggccgccgagttcatccgcaacggcgccaaggtcatcctggccgatatacaggacgacctcggccgcgccgtcgcggccgagctgggcccggacgccgcgtacacccgctgcgacgtcaccgacgaggcgcagatcgccgcggcggcaacgccggcatctcggggctcctcggcgcccgcgccgctcgcgtcgctcgacctcgcggacttcgaccgcgtcatggcggccaacgcgcggtccgcggtggcggccgtcaagcacgccgcgcgcgtcatggtgccccggcgcggcggctgcgtcctctgcacggggagcaccacgggcatgctcggcgggctcgcggcgctgccgtacagcctctcgaaggcggcggtggtgggcgtggtgcggctggcggcggccgagctggcgcgctccggcgtgcgcgtgaacgccatctcgccgcacgccatcgcgacgccgctgctggtccggtcgctggcgaggatgaacccgggggtcagcgacgagcagctgaaggagatggtggagagggggatgagcgagctccatggcgcggtgctggagctggaggacgtggcgagggcggccgtctacctggcgtccgacgaggccaagttcgtcaccgggcagaaccacgtcatcgacggcgggttcacggtcgggaagccgatggacatgcgggttccacgttga

SEQ ID NO: 1832 - protein, 377 aa, Oryza sativa subsp
MRVPPLRATTALLATLLVAASFQDLTVAADGGGGVVPVPDSVCDAKCQKRCSLKVAGRCMGLCKMCCHDCGGCVPSGPYASKDECPCYRDMVSPKSRRPKCPREKSGAMGALCGLGSHFSTASSCQRLPGKVAVITGAASGIGKATAAEFIRNGAKVILADIQDDLGRAVAAELGPDAAYTRCDVTDEAQIAAAATPASRGSSAPAPLASLDLADFDRVMAANARSAVAAVKHAARVMVPRRGGCVLCTGSTTGMLGGLAALPYSLSKAAVVGVVRLAAAELARSGVRVNAISPHAIATPLLVRSLARMNPGVSDEQLKEMVERGMSELHGAVLELEDVARAAVYLASDEAKFVTGQNHVIDGGFTVGKPMDMRVPR

SEQ ID NO: 1833 - DNA, 876 bp, Oryza sativa subsp
  CDS (1)..(876)
atggagaagaagaagcagaagagacagatcaaagatcaagatgttcagagcattgcagatcgtcctcaggggttgcctgggaaggtggcggtgatcaccggcgcggcaaccggcatcggcaaggcgaccgcggcggagttcgtcaggaatggcgccaaggtcatcctcgccgacgtccaggacgacgtcggccgcgccgtcgcctcggagctcggcgcggacgcggcgtcgtacaaccgctgcgacgtcaccgacgaggcgcaggtcgcggcggcccgtggactcgccgttgcccggaaggggcaactcgacgtcatggtcaacaacgccggcatcgtgggctccctgtcgcgccccccgctcggcgccctcgacctcgccgacttcgacgccgtcatggcggtgaacacgcgcggcgtcctcgcgggcgtcaagcacgccgcgcgcgtcatggcgccgcgccgccgcggcaccatcatctgcgtggcgagcgtcgccggggtgctcggcagcgtgacgccgcacccgtacagcgtgtccaaggccgccgtgctcggcgcggtccgcgccgccgccggcgagatggcgcgctccggcgtgcgcgtgaacgccatctcccccaactacatccccacgccgctggtgatgcgcatcatggcggagtggtaccccggggcgagcgccgacgagcaccgccgcgtcgtggagcgggagatcaacgagatggagggcgcgacgctggagcccgaggacatcgcgagggcggcggtgtacctggcctccgacgaggccaagtacgtgaacggccacaacctcgtcgtcgacggcgggtacaccgtcggcaaggcgcccaacctgccggcgccgccgcaataa

SEQ ID NO: 1834 - protein, 291 aa, Oryza sativa subsp
MEKKKQKRQIKDQDVQSIADRPQGLPGKVAVITGAATGIGKATAAEFVRNGAKVILADVQDDVGRAVASELGADAASYNRCDVTDEAQVAAARGLAVARKGQLDVMVNNAGIVGSLSRPPLGALDLADFDAVMAVNTRGVLAGVKHAARVMAPRRRGTIICVASVAGVLGSVTPHPYSVSKAAVLGAVRAAAGEMARSGVRVNAISPNYIPTPLVMRIMAEWYPGASADEHRRVVEREINEMEGATLEPEDIARAAVYLASDEAKYVNGHNLVVDGGYTVGKAPNLPAPPQ

SEQ ID NO: 1835 - DNA, 864 bp, Oryza sativa subsp
  CDS (1)..(864)
atgacgtcgacttcgcctgaaagtctaatcgccggtggattctccacggcggcgagctcccaccagaggttggccggcaaggtggccgtcatcaccggcgccgccagcggcatcggcaaggcgaccgccgcggagttcatcaggaacggcgccaaggtgatcatcaccgacgtcaacgacgacctcggccacgccgcggcggcggagctcggcccggacgccacgtacgcgcgctgcgacgtcgccgacgaggcgcaggtcgccgccgccgtcgacctcgccgtggcgcgccacggccgcctcgacgtcatgcacaacaacgccgccatcccggggaggttcccgcaggacgacatggcgtccgtcgacttcgccgatttcgacgccatgatggccgtgaacccccgcgcgtcgctcgccggcatcaagcaagccgcgcgcgtcatggcgccccgccgcgccggcgtcatcctctgcacggccagcgccgtcggcgtcctcccgctcccggcggtcgccacgcactccatcaccaaggccaccatcatcgccatcgtgcgcgcagcggcggagcccctggcgcgccacggcctgcgggtgaacgccatctcgccgggcgccgtcaggacgccggtcctgcagggcaaggtgtcggtgatgtcggcgtcgtctcctaccatgagcgacgagctgaagcagatgatcgacgtcgacgcgaacgacatgatgatggggccggaggaggtggccatggcggcggtgtacctcgcctccgacgaggccaggtacgtgaccggccacaacctcgtcgtcgacggcgggtacaccgtgcacaaaggagctgacacaccggcggcgcgttga

SEQ ID NO: 1836 - protein, 287 aa, Oryza sativa subsp
MTSTSPESLIAGGFSTAASSHQRLAGKVAVITGAASGIGKATAAEFIRNGAKVIITDVNDDLGHAAAAELGPDATYARCDVADEAQVAAAVDLAVARHGRLDVMHNNAAIPGRFPQDDMASVDFADFDAMMAVNPRASLAGIKQAARVMAPRRAGVILCTASAVGVLPLPAVATHSITKATIIAIVRAAAEPLARHGLRVNAISPGAVRTPVLQGKVSVMSASSPTMSDELKQMIDVDANDMMMGPEEVAMAAVYLASDEARYVTGHNLVVDGGYTVHKGADTPAAR

SEQ ID NO: 1837 - DNA, 1167 bp, Vitis vinifera
  CDS (1)..(1167)
  misc_feature (202)..(202): y is t or c
  misc_feature (250)..(250): s is g or c
  misc_feature (431)..(431): k is g or t
  misc_feature (576)..(576): r is g or a
atggccttgtggaataatgttgaaattgagattgatttggaggttgcatgtgaggttgtagtggagatggccaatgttgaagttgttgtggctgaagagatgatgaaaactgttgattatgtgcatgtggtggagattggaaatacatatcaaaacagtggaaacactttattgggcatccaaattcatggcttcacatgcyattcgcggtttggacaaggagaaccactgttgccgaaagtgctcggasactttcgtgaaggagttttgagtaagattcttattttggcggttcgctccctaggagtgcgagacaatgttgaagatgggagcaaagccatggcagcctcgtcatttctttctgtattcacaagaaggctagagggcaaggtggcactcataaccggaggggccagcggcatcggcaaatkcactgctgaaaccttcacccaacacggagccaaagtggtcattgctgacatccaagacgaactgggtcactccgtgattgaagctctaggccaaaccaatgcatcatacgtccactgtgatgtcactgatgaatcccaaatcaargctgccgttgacaagactgcagcaacccacggaaagctggacatcatgttcaacaatgcgggaatagttaacaactacaagccccgcattatggataacgagaaggcagactttgagcgtgtccttagcatcaacgtcaccggtgttttcctgggcatgaagcacgctgccagggtcatggttccggcaaaaagtgggagcataatctcaaccgccagtgtaagctcgaatgtaggggctgcggctacacatgcttactgctgctctaagcatgctgtattagggctcaccagaaatgctgcaatcgagcttggacaatttggaattagggttaattgcttatcaccctatgcacttgcaacgcctttagctaccaattttcttaatcttactgctgaagagctggagactgccatgaatgcgaccgccaaccttaagggcgtgacacttaaggcacaagatgtggccaacgctgcgctttatttagcgagtgatgagtccagatatgtgagtgggcacaaccttttcatagatgggggtttcactgtcgctaatccctcattccacctgttccagtatccagactcttga

SEQ ID NO: 1838 - protein, 388 aa, Vitis vinifera
  misc_feature (68)..(68): The Xaa at location 68 stands for His, or Tyr.
  misc_feature (84)..(84): The Xaa at location 84 stands for Asp, or His.
  misc_feature (144)..(144): The Xaa at location 144 stands for Cys, or Phe.
MALWNNVEIEIDLEVACEVVVEMANVEVVVAEEMMKTVDYVHVVEIGNTYQNSGNTLLGIQIHGFTCXSRFGQGEPLLPKVLGXFREGVLSKILILAVRSLGVRDNVEDGSKAMAASSFLSVFTRRLEGKVALITGGASGIGKXTAETFTQHGAKVVIADIQDELGHSVIEALGQTNASYVHCDVTDESQIKAAVDKTAATHGKLDIMFNNAGIVNNYKPRIMDNEKADFERVLSINVTGVFLGMKHAARVMVPAKSGSIISTASVSSNVGAAATHAYCCSKHAVLGLTRNAAIELGQFGIRVNCLSPYALATPLATNFLNLTAEELETAMNATANLKGVTLKAQDVANAALYLASDESRYVSGHNLFIDGGFTVANPSFHLFQYPDS

SEQ ID NO: 1839 - DNA, 777 bp, Agrobacterium tumefaciens
  CDS (1)..(777): transl_table=11
atgacttatgaaagcttgctgaaaaggttccgcttggacaagaaagttgctttgatcaccggcgggacgcgcggcattggtctagcgacggctcacgcattcggggaggctggtgccaggctctacctgagtgctcgccgcgaggaatttgaagatggcggcgccatactcagggcgggctacgacgtgaccttctatcccgcggacctggcgacgcgcgctgcggcgagcgcgcttgtgaatagggtgatacgtgacgcagggagaatagatatccttatcaacaatgctggtcttgccaacggcggcgacacgcctcgcttcactgaagaacagtggcgcgacgttatggcgttgaacgtcgactcggtgttttggtgctcgcaagctgtcatcgcttcgatgcgcgatacgggaggcggtaagattgtcaacgtcggatcgatgtccgggattgtctccaacattccgcaaaatcaggtcgcctataatagttccaaggcagcggtgcacatgatgaccaagagcctcgccagcgagttggcgctagacaacatcagggtcaacgctgtcgcacccggctacatcgacactgaaatgtcgcgagagggtatggtccatcctatcagggggcccatctggcgcgaaatgacccctatgcagcgctttggaaaacccgacgaggttgcagcggcaatacttttcctagcctcggatgcctcaagttatgtcacgggagatattctcgttgtcgatggcggctacacgacccgttag

SEQ ID NO: 1840 - protein, 258 aa, Agrobacterium tumefaciens
MTYESLLKRFRLDKKVALITGGTRGIGLATAHAFGEAGARLYLSARREEFEDGGAILRAGYDVTFYPADLATRAAASALVNRVIRDAGRIDILINNAGLANGGDTPRFTEEQWRDVMALNVDSVFWCSQAVIASMRDTGGGKIVNVGSMSGIVSNIPQNQVAYNSSKAAVHMMTKSLASELALDNIRVNAVAPGYIDTEMSREGMVHPIRGPIWREMTPMQRFGKPDEVAAAILFLASDASSYVTGDILVVDGGYTTR

SEQ ID NO: 1841 - DNA, 858 bp, Vitis vinifera
  CDS (1)..(858)
atgcaagctcaagtcatgacagagaaaacccttcaaggagaaaacatctcttcctcacctaaaaggttggaaggaaaagttgcccttgtgaccggcggtgctagaggaattggtgaggcaatagtgagactcttcgttcgacatggagccaaggtcattatcgccgacattgatgatgctactggccttcctctagctaacctgttacacccctccacagtgtacgcgcactgtgacgtgaccgtagaaggggacatcgaaaattcaatcaatctagcagtttcccagtacggaaaactcgacattctcttcaataatgctggggtcctcggaaatcaatccaagaacaagatctgcatagccaatttcgatgccgatgagtttgatcatatcatgcgcgtcaacgtgagaggagttgccttaggaatgaagcatgcagcgagagtaatggtgcctaagagaagtggctgcatcatatccaccgccagtgtagctggcctcatgggaggccttggcccgcatgcatacacagcttcaaagcacgccattgtagggcttacaaaaaacacagcttgtgagctgggcaggtatgggattagggttaactgcatctccccattcggagtggccacttccatgcttgtaaacgcatggaggaagtctgaggaagaagatgatgtagaggaaatggaagagtttgtaggtgggatagccaatttgaagggtgttaagctcagggctgaatgtatagctgaggctgcagtctatcttgctagtgatgaatcagagtatgtaagtggccataaccttgttgtggatggtggagttaccacctcaaaaaactttgtgggcttgtag

SEQ ID NO: 1842 - protein, 285 aa, Vitis vinifera
MQAQVMTEKTLQGENISSSPKRLEGKVALVTGGARGIGEAIVRLFVRHGAKVIIADIDDATGLPLANLLHPSTVYAHCDVTVEGDIENSINLAVSQYGKLDILFNNAGVLGNQSKNKICIANFDADEFDHIMRVNVRGVALGMKHAARVMVPKRSGCIISTASVAGLMGGLGPHAYTASKHAIVGLTKNTACELGRYGIRVNCISPFGVATSMLVNAWRKSEEEDDVEEMEEFVGGIANLKGVKLRAECIAEAAVYLASDESEYVSGHNLVVDGGVTTSKNFVGL

SEQ ID NO: 1843 - DNA, 849 bp, Vitis vinifera
  CDS (1)..(849)
atgaaatgtttcctttgtttgaattgcaggttagcagggaaagtggcactaataactggtggagccagtggcataggcgcctgcactgccaagttatttgtgaaacatggtgccaaggtcatagtggcagatgtccaagaccaacttgggcgctccctttgccaagaaattggtcccgcagaaaccgttttccatgtccactgcgatgtaacatgtgactccgacgtccaaaacgccgtcgacactgccatatccaaatatgggaaactcgacatcatgttcagcaacgccggcgtccatggcgaaatggagtcaagaatcatactctctgataacacaaactttaaaagggttttcgatgtgaatgtgtatggggccttcttggccgctaagcatgccgctagagttatgattccagctaagacaggatgcattatatttacgtcaagtgtggcttcagttgtttcggaggagatctcacatgcatatgtggcatcgaagcatgctgtggtgggacttgccaacaacttatgtgtggagttgggacaatatgggataagagttaattgcatatctccgttcggagtggcaacacctatgttacagaaaggattgggaataatggagaagaggaaggttgaagagttagtttcctctgcggccaacctaaaaggtgcggtgttagaggcggaagacatcgcagaggcagccttgtatctggggagcgatgactccaagtacgttagcgggatcaacttggtggtggatggcggttacagcattactaatccctctgctggaatggtatttaaatctcacttgtcatcaacccatccatcccaaaactaa

SEQ ID NO: 1844 - protein, 282 aa, Vitis vinifera
MKCFLCLNCRLAGKVALITGGASGIGACTAKLFVKHGAKVIVADVQDQLGRSLCQEIGPAETVFHVHCDVTCDSDVQNAVDTAISKYGKLDIMFSNAGVHGEMESRIILSDNTNFKRVFDVNVYGAFLAAKHAARVMIPAKTGCIIFTSSVASVVSEEISHAYVASKHAVVGLANNLCVELGQYGIRVNCISPFGVATPMLQKGLGIMEKRKVEELVSSAANLKGAVLEAEDIAEAALYLGSDDSKYVSGINLVVDGGYSITNPSAGMVFKSHLSSTHPSQN

SEQ ID NO: 1845 - DNA, 777 bp, Vitis vinifera
  CDS (1)..(777)
atgaagctaaagggtagcgataactattcatatcccttctataatagattggaggggaaaattgcagttgtcaccggtggcgctagagggattggagaggcgacggtgagactctttgcaagacacggtgccaaggtggtcatagctgatgttgaagacacactcggagctgcacttgctagctcattagctccctcagttacctttgttcactgtgatgttagcttggaagaggatattgagaacgtaatcaattctacggtgtcccggtacggacgcctcgatatccttttcaacaatgctggggtgctgggaaatcaatcaaagcacaagagcataattgactttgatatagatgaattcgatcaggtgatgcgtgtgaatgtaagagggatggctctaggaatcaagcacgcggcgagagtcatggtcccaagaggaatgggatgtataatctccacggctagtgtagcaggagtgatgggagggcttggtcctcatgcttacacagcttcaaagcatgcaattgtggggctgacgaagaacactgcctgcgagcttgggcggtatgggattagagtaaactgcatttctccatttggggtggctacttccatgcttgtgaatgcatggaggagcatggagaagatggaggaggctaaagatatagccgaggctgctctttatcttgctagtgatgagtccaaatatgtaagtggacataaccttgtagtagatggtgggattaccacttcgagaaattgtgttggcttgtag

SEQ ID NO: 1846 - protein, 258 aa, Vitis vinifera
MKLKGSDNYSYPFYNRLEGKIAVVTGGARGIGEATVRLFARHGAKVVIADVEDTLGAALASSLAPSVTFVHCDVSLEEDIENVINSTVSRYGRLDILFNNAGVLGNQSKHKSIIDFDIDEFDQVMRVNVRGMALGIKHAARVMVPRGMGCIISTASVAGVMGGLGPHAYTASKHAIVGLTKNTACELGRYGIRVNCISPFGVATSMLVNAWRSMEKMEEAKDIAEAALYLASDESKYVSGHNLVVDGGITTSRNCVGL

SEQ ID NO: 1847 - DNA, 789 bp, Vitis vinifera
  CDS (1)..(789)
atgacagaccctacaccttttaacaagaagctacaaggtaaagtggctatcatcaccggcggcgcaagcggcatcggcgaggctacggcacgtctcttcgccgatcacggcgcacgagccgtcgttgtagccgacatccaagacgagctgggccgtggcgtcgccgagtcaatcggcttacaccgctgcaggtacattcactgtgatgtaaccgatgagcagcagatcaaagcgatggtggaatcgacggtgaagatgttcggacaactcgacatcatgttcagcaacgctggggttatgagtatgggcgaccagaccatactggagctggatctatcagcttccgacaaggtgtttgcagtaaacgcacgcggcatggcggcgtgtgtgaagcacgcggcgcgtgcgatggtggagggtggtgttaaagggagcatagtgtgcacggcgagcgtggctgcgacggtggggaatgacaagttcactgactacataatgtcgaagcacgcggtgttggggctagtgagatcggcgagtaagcagctgggcgcgtacggaataagggtgaattgcgtgtcaccgacggcagtggcgacgccaatgctttgcagcgcatttaagatgggcgtggaggaggcggagaaattttttgtagaggacatggatttaaaagggagaggggcagtgcaagtgagacacgtgggggatgcagcgttgtttcttgcttccgacgattctgagtttataacgggacataacttggccatcgacgggggcttccgccggtga

SEQ ID NO: 1848 - protein, 262 aa, Vitis vinifera
MTDPTPFNKKLQGKVAIITGGASGIGEATARLFADHGARAVVVADIQDELGRGVAESIGLHRCRYIHCDVTDEQQIKAMVESTVKMFGQLDIMFSNAGVMSMGDQTILELDLSASDKVFAVNARGMAACVKHAARAMVEGGVKGSIVCTASVAATVGNDKFTDYIMSKHAVLGLVRSASKQLGAYGIRVNCVSPTAVATPMLCSAFKMGVEEAEKFFVEDMDLKGRGAVQVRHVGDAALFLASDDSEFITGHNLAIDGGFRR

SEQ ID NO: 1849 - DNA, 996 bp, Tripsacum dactyloides
  CDS (1)..(996)
atgcacgctagcctcgcctcctacgccgcggcagctatgccggcgctggacctccgccccgagatagcgcacgcgcaccagcccgtcatgtcgccctcgcaccacggctgggacggcaatggcgccgcagccgtgcccacacctatgcccaagaggctggacgggaaggtggccattgtgacgggcggcgcgcgggggatcggcgaggccatcgtgcgtctgttcgccaagcacggggcccgggtggtgatcgcggacatcgacgacgccgccggggaggcgctggcggcggcgctgggcccgcaggtcagcttcgtgcgctgcgacgtgtcggtggaggaggacgtccggcgcgccgtggactgggcgctgtcgcgccacggcggccggctcgacgtgtactgcaacaacgccggggtgctgggccggcagacgcgcgccgccaagagcatcctgtccttcgacgcgggcgagttcgaccgcgtgctccgcgtcaacgcgctgggcgccgcgctcgggatgaagcacgcggcgcgggccatggcgccgcgccgcgcggggagcatcgtctccgtcgccagcgtcgcgggggtgctcggcggcctcggcccgcacgcctacaccgcctccaagcacgccatcgtggggctcaccaagaacgccgcctgcgagctcggcgcgcacggcgtccgggtcaactgcgtctcgcccttcggcgtcgccacgcccatgctcatcaacgcctggcgccagggccacgacggcgccgccgacgcggaactcgacctcgacatcaacgtgcccagcgaccaggaggtggagaagatggaggaggtggtcaggggcctggccacgctcaagggccccacgctgaggcccagggacatcgccgaggcggtgctgttcctggccagcgacgaggccaggtatatatccggccacaacctcgtcgtggacggcggcgtcaccacctccaggaacctcatcggcttgtga

SEQ ID NO: 1850 - protein, 331 aa, Tripsacum dactyloides
MHASLASYAAAAMPALDLRPEIAHAHQPVMSPSHHGWDGNGAAAVPTPMPKRLDGKVAIVTGGARGIGEAIVRLFAKHGARVVIADIDDAAGEALAAALGPQVSFVRCDVSVEEDVRRAVDWALSRHGGRLDVYCNNAGVLGRQTRAAKSILSFDAGEFDRVLRVNALGAALGMKHAARAMAPRRAGSIVSVASVAGVLGGLGPHAYTASKHAIVGLTKNAACELGAHGVRVNCVSPFGVATPMLINAWRQGHDGAADAELDLDINVPSDQEVEKMEEVVRGLATLKGPTLRPRDIAEAVLFLASDEARYISGHNLVVDGGVTTSRNLIGL

SEQ ID NO: 1851 - DNA, 825 bp, Streptomyces fungicidicus
  CDS (1)..(825): transl_table=11
atgcagctcgccggcaagaccgcgatcgtcaccggggccgcacgcgggctggggcgcgcctgcgcggtcgccttcgcccgtgagggcgccgacctcgtcctcctcgacctctgcgcggacctgcccggcgttccgtacccgctcggcggccccggccagctcgcccacaccgccgacctgtgccgcgggcacggcgcggccgtcctcgtccggcaggccgacgtacgggacctcggcgcgctgcggcacgccgtggacgacgcccacggccggttcggacgcatcgacgtgctgctcaacaacgccgggatcgccgcgccctccggcaaacccgtcgacgagatcgacgaggacgagtggcagctgatgatcgacgtggacctgtccggcgcgtggcgcgcgacgaaggcggtcggcaagatcatgaccgcccagcgggccggcagcatcatcaacgtcgcctccaccgccgggcaggtcggataccgcaacttcgcgggctacgtggcggccaaacacggtgtcatcgggctcaccagggccacggcgctcgacttcgcgccgatgagggtccgcgccaacgccctgtgcccgggctcggtccgggacgaccctgccgtcgagggccggatgctctccgagatcgccaggtccctccaggtgccggtcgccgaacacgaggaggccttcgtccagtcgcagcccatgaacgccctgatcgagcccgatgacgtcgcctcggccgccgtctggctcgcctccgacggatcccggcaggtcacggggtcggtcatcaccgtcgacggcgggttcaccactcgctga

SEQ ID NO: 1852 - protein, 274 aa, Streptomyces fungicidicus
MQLAGKTAIVTGAARGLGRACAVAFAREGADLVLLDLCADLPGVPYPLGGPGQLAHTADLCRGHGAAVLVRQADVRDLGALRHAVDDAHGRFGRIDVLLNNAGIAAPSGKPVDEIDEDEWQLMIDVDLSGAWRATKAVGKIMTAQRAGSIINVASTAGQVGYRNFAGYVAAKHGVIGLTRATALDFAPMRVRANALCPGSVRDDPAVEGRMLSEIARSLQVPVAEHEEAFVQSQPMNALIEPDDVASAAVWLASDGSRQVTGSVITVDGGFTTR

SEQ ID NO: 1853 - DNA, 852 bp, Phaeosphaeria nodorum
  CDS (1)..(852)
atggcagatataccatccgaacctccatcgcgaggtcttagggggaaagcggccatcgtgacaggtgctggttgtgcaggagaaggaattggtaatggtcgcgcaatttctatcatgctcgcagacgaggggtgtaacatactctgcttagacatgaatctggaatgggcacaaaagacagtggcaatttcgtcatcgaagccaggtcgaggaagagcaatagcgttcaaggctgatgttacgaaagccacagactgcgaagcagccgtgcagttggccctgaatgagtttggaagactggacgtgttgatcaacaatgttggtattggtggagcagctggcacagctgtcgacgtcgatatggaagcctggaccaaaggcctagagatcaatgtcagcagtatggtacagatggcaaagtacgctataccagcgatgctgaagaatgagggtgaaacgagaggcagtattatcaatatggggtcggttgccggtctcaaaggtggaacgcctcacttgctgtatccgacaagcaaaggcgctgttgtcaacatgacaagagcgatgtccgcacatcacgccgcagacggcattcgagtaaattgtgtctgtcctgggatgctgtacaccccgatgttgtacgctgggggtatgagtgaagaggcgcgcgaagcgaggcggaaacgaagtctactaggcaccgagggaacagcgtgggacgcagcttgtgcggtggccttcttagcaagcgaccatgcacggtggattacaggagctatccttccggtggacgcgggtacgactgctgctgttgggattgggatgcccaaaagtgccagcgtcaacggatga

SEQ ID NO: 1854 - protein, 283 aa, Phaeosphaeria nodorum
MADIPSEPPSRGLRGKAAIVTGAGCAGEGIGNGRAISIMLADEGCNILCLDMNLEWAQKTVAISSSKPGRGRAIAFKADVTKATDCEAAVQLALNEFGRLDVLINNVGIGGAAGTAVDVDMEAWTKGLEINVSSMVQMAKYAIPAMLKNEGETRGSIINMGSVAGLKGGTPHLLYPTSKGAVVNMTRAMSAHHAADGIRVNCVCPGMLYTPMLYAGGMSEEAREARRKRSLLGTEGTAWDAACAVAFLASDHARWITGAILPVDAGTTAAVGIGMPKSASVNG

SEQ ID NO: 1855 - DNA, 759 bp, Phaeosphaeria nodorum
  CDS (1)..(759)
atgtccaaacttttccaagacaaagtcgtgctggtaaccggaggcgcaagtggcatagggcgcgcaacagcgctcaaaatggccaccctcggcgcctctatcgccctctgcgacatcaacacgctcgcactcgcagccgtcgcatctgaactctccacacccacacacacgcaacaagtcgacgttggtagcacctcccaagtgcaatccttcgtacgatccacgatcgaaaagttcggtcgaatcgatcacgtcttcaactgcgccggcgtaaatcccacatccatccctcttgaggatacgcacgacgagtactgggacagactggtcaacacgaatctcaagggcgtgttcttggttacgagggagtgtctgccgcacctgaggcgcggcgcgagtatcgtcaacgtgtcgtcgatatctggaattcgtgggtccgcgatgcaatctgtgtactgcacgaccaagtttgggctgattggcatgtccaagtctcttgcgctggaacttgggcccaagggaattcgcgtcaactgcgtggcaccggggtacatcgatacgccgtcaaatgcgggcatagtgaagggtggggaggcgatcgagcgcatgagattgggtaatgcgctggaaaggctgggcaccccggaggaggtagcggatgttgtggcgttcttgtttggggaggagagtaggtatgtgaacggtgcagtgctggagattgatggcgcggttaaaatgagtagcacaacgagtaagtag

SEQ ID NO: 1856 - protein, 252 aa, Phaeosphaeria nodorum
MSKLFQDKVVLVTGGASGIGRATALKMATLGASIALCDINTLALAAVASELSTPTHTQQVDVGSTSQVQSFVRSTIEKFGRIDHVFNCAGVNPTSIPLEDTHDEYWDRLVNTNLKGVFLVTRECLPHLRRGASIVNVSSISGIRGSAMQSVYCTTKFGLIGMSKSLALELGPKGIRVNCVAPGYIDTPSNAGIVKGGEAIERMRLGNALERLGTPEEVADVVAFLFGEESRYVNGAVLEIDGAVKMSSTTSK

SEQ ID NO: 1857 - DNA, 900 bp, Phaeosphaeria nodorum
  CDS (1)..(900)
atgtcatcaagcaaaggacaattcgagcagggccaccagcccgaggtccagcaccagaaggtcccaggatggcagacagtaatggaccctccaccccaagtcgaccatcttcccaccgccgaaggcggccgcgaactctacaaagccgccgggaagctcaagggcaagaaagcactcatcaccggcggcgactctggaatcggccgctcaatcgccgtcctttacgccatggagggtgccgacagcttcatcgcctacctgcccgaagaagaagaagacgacgcgaaagagacagtcaagctcgtggaagagaaaggagcaagatgctacacataccccactgacctcaccagccgtgacaactgcaagaaggttgtcgaggcggcggtcaagcagatgggcggcattgacatcctcgtaaacaaccacgcgtatcagatgatggttgaggatatcaaggatctttctgaggaccagtgggagcgcacgttcaacaccaacatccacccgttcttctacttgtcaaagtataccctgccacatatgaagaagggatcgacgatcatcaacaacgcttccatcaacgcgtacattggtcgtccggatcttctcgactacacctcgaccaagggtgcgattgtttcgtttacccgtggtctgtcgaatcagtatgttggtcgaggtattcgtgtcaatgctgttgcgcccgggccagtttggacacctcttattccagcgacgatgaacgatgaggcgatcaagcagttcacttcgccgatgggcaggccggctcagccaagtgagatcgcgacttgctttgtcttcttggctagcagtgacagcagctgcatcagtggacagaccatccatgcaaacggcggcactattgtgaatggctaa

SEQ ID NO: 1858 - protein, 299 aa, Phaeosphaeria nodorum
MSSSKGQFEQGHQPEVQHQKVPGWQTVMDPPPQVDHLPTAEGGRELYKAAGKLKGKKALITGGDSGIGRSIAVLYAMEGADSFIAYLPEEEEDDAKETVKLVEEKGARCYTYPTDLTSRDNCKKVVEAAVKQMGGIDILVNNHAYQMMVEDIKDLSEDQWERTFNTNIHPFFYLSKYTLPHMKKGSTIINNASINAYIGRPDLLDYTSTKGAIVSFTRGLSNQYVGRGIRVNAVAPGPVWTPLIPATMNDEAIKQFTSPMGRPAQPSEIATCFVFLASSDSSCISGQTIHANGGTIVNG

SEQ ID NO: 1859 - DNA, 744 bp, Phaeosphaeria nodorum
  CDS (1)..(744)
atgaaagacaaagtcgtcgttgtcacgggcgcggcctcaggcattgggctcgagaccgcgcgacttctcgcaagcaaaggcgccaaactttctctcgcggatgtgcaggaagatttattgaaagagttggaagctgaactcaaacaatcaggagctgatgttgtaacccacgtggtggatatcagggaccgcaaggctgtcgaagcttggatcgctgcaacggtcgaaaagtttggcaagctggatggtgccgccaatcttgcaggtgtcacaggaaagcaatccaacgccgttgagattgaggatattgacgacgatgattgggacttggtcatggacgtgaacgtcaccggccttcgcaactgtctccgagctcaggtgacgcagttcaacgaaggagctgcgattgtgaatgcttccagtatcctcggcgtgataggcgcacccaagaacttggcgtattgtgcgtcaaaacatgctgttgttggtatgaccagagttgcggcgaaggagcttgggccaaaaaagattcgcgtcaactgcatctgcccagggccgattgacacgcctatgctgcgaaacgcgtctgcgattcaaggccatgcgacagacttcagtttccttccacttggacgaaaggcgcaccagaaagaagtgccgccactcatcgagttcttgttgtccgatgcgtcgtcctttataacaggaaatgcgatgcagattgatggaggatggttttgctag

SEQ ID NO: 1860 - protein, 247 aa, Phaeosphaeria nodorum
MKDKVVVVTGAASGIGLETARLLASKGAKLSLADVQEDLLKELEAELKQSGADVVTHVVDIRDRKAVEAWIAATVEKFGKLDGAANLAGVTGKQSNAVEIEDIDDDDWDLVMDVNVTGLRNCLRAQVTQFNEGAAIVNASSILGVIGAPKNLAYCASKHAVVGMTRVAAKELGPKKIRVNCICPGPIDTPMLRNASAIQGHATDFSFLPLGRKAHQKEVPPLIEFLLSDASSFITGNAMQIDGGWFC

SEQ ID NO: 1861 - DNA, 975 bp, Buchloe dactyloides
  CDS (1)..(975)
atgcaggcagcagccatgccggctctcgaccccctccccgagaagtcgcacgcgcaccagaccccgcaccacggctgggagagcaatggcggcgcagccgccgtcgtcgcgcccacgcccgcgccccggaagctggacgggaaggtggccattgtgacgggcggcgcgcgcgggatcggcgaggccatcgtgcggctgttcgcgaagcacggcgcgcgggtggtgatcgcggacatcgacgcggccgcgggggacgcgctggcggcggcgctgggcccgcaggtcagctgcgtgcggtgcgacgtgtccgtggaggacgacgtggggcgcgccgtggagtgggcggtggcgcggcacggccggctggacgtgctgtgcaacaacgcgggggtgctgggccggcagacgcgcgcggccaagagcatcctgtccttcgacgcggccgagttcgacgccgtgctccgcgtcaacgcgctgggcgccgcgctcgggatgaagcacgccgcgctcgccatggcgccgcgccgcgcgggcagcatcgtctccgtctccagcgtcgccggcgtgctcggcgggctgggcccgcacgcgtacaccgcctccaagcacgccatcgtcgggctcaccaagaacgccgcctgcgagctcggcgcgcacggcatccgcgtcaactgcgtctcgcccttcggcgtcgccacgaacatgctcatcaacgcgtggcgccagggccacgccgacggcggcggcggcgacgacgacgtcgacatcgacatcgccgtgcccagcgacgaggaggtggagaagatggaggaggtggtcagggggttcgccacgctcaagggacccacgctcaggcccagggacatcgcagaggccgtgctcttcctggccagcgacgagtccagatacgtctccggccacaacctcgtcgtggacggcggcgtcacgacctccagaaacctcatcggcttgtga

SEQ ID NO: 1862 - protein, 324 aa, Buchloe dactyloides
MQAAAMPALDPLPEKSHAHQTPHHGWESNGGAAAVVAPTPAPRKLDGKVAIVTGGARGIGEAIVRLFAKHGARVVIADIDAAAGDALAAALGPQVSCVRCDVSVEDDVGRAVEWAVARHGRLDVLCNNAGVLGRQTRAAKSILSFDAAEFDAVLRVNALGAALGMKHAALAMAPRRAGSIVSVSSVAGVLGGLGPHAYTASKHAIVGLTKNAACELGAHGIRVNCVSPFGVATNMLINAWRQGHADGGGGDDDVDIDIAVPSDEEVEKMEEVVRGFATLKGPTLRPRDIAEAVLFLASDESRYVSGHNLVVDGGVTTSRNLIGL

SEQ ID NO: 1863 - DNA, 810 bp, Aspergillus oryzae
  CDS (1)..(810)
atgctgaggctcgacggaaaggttgccctcattactgggcttggccaaaccagtgaagatggatggggaattggggcagcgattgcaatgcaactgtctcaacagggggcagtgatctacggtggcaatcgctcgttggcctcggctgaaagaacgaaagcgcggatcgaacgagagggaggcgtgtgtgacgtccaggaaaccgacgtgaccgattcagcatccgtgaaggctctggtcgacggctgcatccaacgacatggtcgcattgatattctgatcaataatgtcggcaagtccgagcctggatgtccggcggagatgagggaagaaatctgggatcaacaggtcgatttgaatctgaaaagcatatacttgacgtgtcactacgttctacccattatggagaaacaagagacgggcggatcagttgtcaatgtttccagcattgcaggactacgatatatcggaaagccccaagtggcttactcggctacaaaggctgcgattatgcagttcaccaaggccacggccgtgatctatgcgccaaagaatgtccgactgaacacgatagtacctgggttgatctatacgccgtatactcaagcgctcgccaagcgatatgctccgggaggtaatgaggaggagtatatgaagatgcgtgatgcccaggttcctatgggacggatgggagacgcttgggatgtggcccacgccgcccttttccttgtctctgatgcggcacagtatataacggggcaggagctggtggtggatggtggaatcacatcgtctacagggagaacataa

SEQ ID NO: 1864 - protein, 269 aa, Aspergillus oryzae
MLRLDGKVALITGLGQTSEDGWGIGAAIAMQLSQQGAVIYGGNRSLASAERTKARIEREGGVCDVQETDVTDSASVKALVDGCIQRHGRIDILINNVGKSEPGCPAEMREEIWDQQVDLNLKSIYLTCHYVLPIMEKQETGGSVVNVSSIAGLRYIGKPQVAYSATKAAIMQFTKATAVIYAPKNVRLNTIVPGLIYTPYTQALAKRYAPGGNEEEYMKMRDAQVPMGRMGDAWDVAHAALFLVSDAAQYITGQELVVDGGITSSTGRT

SEQ ID NO: 1865 - DNA, 882 bp, Aspergillus oryzae
  CDS (1)..(882)
atgcccgaaggtccagtagtaaatggcctcttccgccataacaacactacccctccagcgcaggagagtgttatggctctcttctcgctcaaggggaaaactgccgtcgtcaccggcgcagcatcgggtatcgggttgagcgtcgcacatgcactcgcggaggctggcgccaacgttgccatctggtataacagaaacagtaaagccgttgaggaggctgcaaacatcgagtctaaatatggcgttaagtgccgtgcataccaaataaacatccgcgaaagcgaaaaggttgaagagctgttgaatacatgcgtccgcgaattgaacggtcgcctggacattttcatcgccaactccgggattccgtggactcaaggacccatgatcgatgctccgcttgaccactacagagacgtgacacaaaccgatctagatggaacattctattgtgccagagccgctggcgctcattggagaaggcagaagaccgagggtacagatatttttggcaatcctctacaaggcttcacatacggtagtttcgttgcgactgcttccatgagtggacacattgtcaatataccacagctccaagctgcgtataatgcggctaaggccggagtgatccatttgtgtaaatcacttgccgtggaatgggttcagtttgcgcgcgcgaatacagtctcgcctggatacattattactgatatttccacgtttgttcctgacgagacaaaggatatttggaaaggtaaaattccgatgggtcgggaagctctgccacatgagctcaaaggtgcctatctgtatctggcttcggatgcgtcaagttatactaccggtgcggatcttgttgtggatggaggttatactctaccctga

SEQ ID NO: 1866 - protein, 293 aa, Aspergillus oryzae
MPEGPVVNGLFRHNNTTPPAQESVMALFSLKGKTAVVTGAASGIGLSVAHALAEAGANVAIWYNRNSKAVEEAANIESKYGVKCRAYQINIRESEKVEELLNTCVRELNGRLDIFIANSGIPWTQGPMIDAPLDHYRDVTQTDLDGTFYCARAAGAHWRRQKTEGTDIFGNPLQGFTYGSFVATASMSGHIVNIPQLQAAYNAAKAGVIHLCKSLAVEWVQFARANTVSPGYIITDISTFVPDETKDIWKGKIPMGREALPHELKGAYLYLASDASSYTTGADLVVDGGYTLP

SEQ ID NO: 1867 - DNA, 816 bp, Aspergillus oryzae
  CDS (1)..(816)
atggacgtccccggcatagccctaataacaggcgcagcatccggcatcggccgcgcctgcgcccatacattcgcgcgcgatggcgcaagcggcatcgccctcctcgacctggacaaaacagccctagagaccgtgcaagccgagatcaactcccaatcaagccaagacaaaacagcccgctgccgcgtagaaatctacccggtcaacgtaaccgacgaaaaccgggtagacgaagtcatcaacagcgcagcgcaaaccttcagccgattagactacgtggtcaacgcggccggaatagcaatgaagcaccaaggcggagcggcattcgccgaaacctccgactggcaacgcatccttgacgtcaatctcacggggacgttcttcgtcctgcgggctgcggctcggattatgttgagccaggagccgatccggtcgagtattgatggacggccgttgcagcgggggtcgattgtgaatttctcgagtattcagggagtcgcagggattccgttgtcgactgcttataccgcgacgaagcatgcggttattgggttgacgaggacggcgtcggaggactatgccaaggacgggttgaggattaatgcgatttgtcctgggtatacagagacgccgatgacgacaaagtcaccgttggttttgcaggccatgcaggagagggtggcgactgctgtgccaatgcagcggatgggagagccgcgagagattgcggatggagtggtttatctttctggggggaggagttcgtttgttacggggacggcgcttttcgtggatggggggtacacgcagcgttag

SEQ ID NO: 1868 - protein, 271 aa, Aspergillus oryzae
MDVPGIALITGAASGIGRACAHTFARDGASGIALLDLDKTALETVQAEINSQSSQDKTARCRVEIYPVNVTDENRVDEVINSAAQTFSRLDYVVNAAGIAMKHQGGAAFAETSDWQRILDVNLTGTFFVLRAAARIMLSQEPIRSSIDGRPLQRGSIVNFSSIQGVAGIPLSTAYTATKHAVIGLTRTASEDYAKDGLRINAICPGYTETPMTTKSPLVLQAMQERVATAVPMQRMGEPREIADGVVYLSGGRSSFVTGTALFVDGGYTQR

SEQ ID NO: 1869 - DNA, 732 bp, Aspergillus oryzae
  CDS (1)..(732)
atggcatcctttgaaggcaaagtgatcgctataaccggcgcagcctccggcatgggacttgcaacagcaaagttgctcgcatcccgtggagcaattatctcgctcgccgatataaacgaagcggcagtcaaggaggcaacagcgtcattgaccggaagcgataagcacatgtacaccgtggtcgatgtgcgtagcagccagtcagttgactcatggatcaaatcaacagtggaaaggttgggcaaactcgacggcgcggtcaatatggctggggtcatcacacctaccaaaccaattaccgaagaaaccgacgatacttgggacttcaattttgctgtgaatacacgaggtgtcttcttctgcctgagggcccagttgaaggccatgacagctggtggtagcattgtttctgcggctagtgcatttggccagatgggctcgcctggggttgcgccgtactgcgccagtaaagcagctgtgatcggattgacgagaacagcggcgaaagaaaaccagcatataagggtcaactgcgttgcaccaggttccgttaacacccccatgtctcagggggagaaccccgaggatgtgaagcgcggcctgcaagcaacggtgcaaaagcgaagggctgaggctagtgagatagctactgtgattgtgcatttgttgagcgacgaggcatctttcgtgacgggtaccgtttataatgttgatggcggttggctttgctga

SEQ ID NO: 1870 - protein, 243 aa, Aspergillus oryzae
MASFEGKVIAITGAASGMGLATAKLLASRGAIISLADINEAAVKEATASLTGSDKHMYTVVDVRSSQSVDSWIKSTVERLGKLDGAVNMAGVITPTKPITEETDDTWDFNFAVNTRGVFFCLRAQLKAMTAGGSIVSAASAFGQMGSPGVAPYCASKAAVIGLTRTAAKENQHIRVNCVAPGSVNTPMSQGENPEDVKRGLQATVQKRRAEASEIATVIVHLLSDEASFVTGTVYNVDGGWLC

SEQ ID NO: 1871 - DNA, 1131 bp, Aspergillus oryzae
  CDS (1)..(1131)
atgttcaagtcaccagccgcccgtcaagccgtcaaggctctcagtatcaacacacgccctgctgcagtaacagcagcatcccgaccagcggtggccaatactttcttccgaggtctctcatcgacagctccccgtgccaacgatgagaagtcgaaggcagcaaaggaccccatcttggctgccaccaacaaagctcctgagggtgccttggactcagagggccgtttcgcccgtgtcgacgagagtttgcagatcgaataccccgatgatgagaacatgcctcgtagtcctatcgtccagggccgcggaggaatgcacttcaaacgtaccctggctcaattctccctagagaacaaggtcaccctggttaccggaggtgcccgtggtctcggtttggtcatggctcaggcgatcgttgcatcgggatcggaccttgcaattgtcgatcttaacaaggcggaagctgaggagcaagcccagaagttggtggaacagtttaggaaggagaaccccggtttggaacaaatgcccaacgtcaccgcccactacgctgatgtttccgaccctaactccgtcaacgatgccctctccgatattatctccaagcacggcaagatcgacaacctggtcacctccgccggattcacggaaaacttcgatgccatctcctaccctcacgaccgtctgcaaaagctttggggcgttaatgtcgatggaacataccttttcgccaccggtgtcgccaagcacctcatggagcgcaaggttccgggcagcattgtcatgattggtagcatgtctggtgctatcgtcaacgtgccgcagccccaggctccttacaacgccgccaaggccgctgttcgtcaacttgccgcgtccttcgccgtcgaatgggccggtcacgacatccgggtgaactgcatcagccctggatacatgcttactgccctgacccgcaagattttggatgagaaccccgaattgcgggacaagtggatctcgctcatccccaccggcaagatgggtactcccgaggacctgatgggtcccgttaccttcctgctcagtgatgcctccaagtacatgactggtgccgatatccgcgttgacggtggctacaccctcacctag

SEQ ID NO: 1872 - protein, 376 aa, Aspergillus oryzae
MFKSPAARQAVKALSINTRPAAVTAASRPAVANTFFRGLSSTAPRANDEKSKAAKDPILAATNKAPEGALDSEGRFARVDESLQIEYPDDENMPRSPIVQGRGGMHFKRTLAQFSLENKVTLVTGGARGLGLVMAQAIVASGSDLAIVDLNKAEAEEQAQKLVEQFRKENPGLEQMPNVTAHYADVSDPNSVNDALSDIISKHGKIDNLVTSAGFTENFDAISYPHDRLQKLWGVNVDGTYLFATGVAKHLMERKVPGSIVMIGSMSGAIVNVPQPQAPYNAAKAAVRQLAASFAVEWAGHDIRVNCISPGYMLTALTRKILDENPELRDKWISLIPTGKMGTPEDLMGPVTFLLSDASKYMTGADIRVDGGYTLT

SEQ ID NO: 1873 - DNA, 780 bp, Aspergillus oryzae
  CDS (1)..(780)
atggtcgcagaccccagaccccaaacactagccggcaaagtcgccattgtgacaggcgcaacgagaggaatcggcgccgggctggctgaagaattagcccgtcgaggagccaaagtcttgatcacatacacatcagcgagcagcgaacccatcgctgataaactaatcgagaaaatcaaaaacttcaacaacggctccaaggcagccaaagtccgcgccgatctccgcgatctatcagctggagaaacgatcgtcgaagcctcaatccaagcattcggccccaacatcgatatcctggttaacaacgccggcgtggaagtagtgaagcccctttcagatctcacggtggaagactacaacctcgtttacgacctgaacgtccgcggggctatctttctgacgcaggctgttctcccgcatctacgtgcacccggtcggatcatcaatatcagttcagttggtgcacgggcgggattcgctaatttgtcgatttattgctcgtccaaggcggccttggagggcttgacgcgatgctgggctgcggagttgggtgatgctgggcatacggtgaatgctgttaatccggggccagtgcagacggctttgctggagaatattccgaaggagttggtggagatgcagaagtctgctacgccggttgagcatcgggtggggacgattgatgatgttgcgcaggtggtggcgtggcttgcttctgaggagagtcggtgggtttctgggcaggcgattgctgcttctggggggtttgcgatgtattga

SEQ ID NO: 1874 - protein, 259 aa, Aspergillus oryzae
MVADPRPQTLAGKVAIVTGATRGIGAGLAEELARRGAKVLITYTSASSEPIADKLIEKIKNFNNGSKAAKVRADLRDLSAGETIVEASIQAFGPNIDILVNNAGVEVVKPLSDLTVEDYNLVYDLNVRGAIFLTQAVLPHLRAPGRIINISSVGARAGFANLSIYCSSKAALEGLTRCWAAELGDAGHTVNAVNPGPVQTALLENIPKELVEMQKSATPVEHRVGTIDDVAQVVAWLASEESRWVSGQAIAASGGFAMY

SEQ ID NO: 1875 - DNA, 822 bp, Aspergillus oryzae
  CDS (1)..(822)
atgacagatcacattggtacattccccgagctcaagggcaaggttgccctcgtcactggcattggccaaatgggcgatcctcaaatgtggggaaatggtgctgcaacagcacgagtgttaagtcgcaacggtgccaaaatatttggttgcgatctacaactcgagtctgccttgcacactaaaaagcgtcttgaggccgagggcggcgtgtgtgaggtaacaacagcgaatgttacatcttctgaagatgtgaagcgcatggtcgaggtgtgtgtcgcgaagtttggtcgtatcgatatcctgatcaacaatgttggccgctcagagccaggtgggcctgccgagatgacagagaaagtctgggatgcccagactgatataaatctgaaatctgtctatctttcctgccacgaagtcctcccgatcatggaaaagcagggcggtggtgccattgttaatgtggcctcgattgccggaattcgttatattggcaaaccccaggttgcatactccgccgccaagtccgctgttatccagttcaccaaagctaccgctgtcatctacgctaatcgtaacattcggcttaacgtggttgtgccagggctgatgcacacgccattggtcagttatcttgcagacaagtacgcaggtggggatctagaaggattcatcgcgaaaaggaacaaggcagtgccaatgggtcgcatgggtgactccttcgacgttgctaactgtgctgctttcctgctctcggactctgctcgctacatcaccgggcagaagattgttgttgatggaggtattacctcttctactggttga

SEQ ID NO: 1876 - protein, 273 aa, Aspergillus oryzae
MTDHIGTFPELKGKVALVTGIGQMGDPQMWGNGAATARVLSRNGAKIFGCDLQLESALHTKKRLEAEGGVCEVTTANVTSSEDVKRMVEVCVAKFGRIDILINNVGRSEPGGPAEMTEKVWDAQTDINLKSVYLSCHEVLPIMEKQGGGAIVNVASIAGIRYIGKPQVAYSAAKSAVIQFTKATAVIYANRNIRLNVVVPGLMHTPLVSYLADKYAGGDLEGFIAKRNKAVPMGRMGDSFDVANCAAFLLSDSARYITGQKIVVDGGITSSTG

SEQ ID NO: 1877 - DNA, 954 bp, Aspergillus oryzae
  CDS (1)..(954)
atgcgctctgccttatcccagatgctgttccaagcaagccgttcatggcaaccaagcacaaccctccgcccactcacacgactctcatattccacaactactactacccatggagcgcatcacattcaaacgcggatgcctccaaaggaatcaatcaagaacgggcatcgttttaaggagttcgacctcaatgaccgcgtctacgccatcaccggcggtggaagaggacttggtttagccatggccgaagccctaatggaagccggcgccaaagtctactgcctcgaccgcctcgaaaacccccacccagacttcatggccgcaaaagagcactcggaaaccaactacggcggcagcctggagtactaccgaatcgacgtccgcgatgatgcagaagtaaacaacgtgttcgccgaaattgccggccagaacaagcgtcttgatggtctgatcgccgccgccggaatcaaccatctccagagcgccctcgagcactcccaaaccgccatgaacgaagtcatgcagatcaactacaacggagtgttcaactccgccaccgctgccgcccgccagatgttcaactaccagcagaagggctccatcctgcttatcgcgagcatgagcggtctcatcgccaacaagggcatgacttcccctgtctacaactcctccaaagcggccgtcattcagctggctcgctcgctcgcaatggaatggggccgccacggtatccgtgtgaacagtctctgccctggtcacatcatcacccccatggtcgagcaggtgtttcagcagaacccggcctctcgggctgtctgggaggcagagaacatgcttgggcggttggcgtaccctgaggaattcagaggtgctgccctcttcgctctcagtgatgctagcagcttcatgacgggcagcacgatgctcattgatggtggccacaccgcgtggtaa

SEQ ID NO: 1878 - protein, 317 aa, Aspergillus oryzae
MRSALSQMLFQASRSWQPSTTLRPLTRLSYSTTTTTHGAHHIQTRMPPKESIKNGHRFKEFDLNDRVYAITGGGRGLGLAMAEALMEAGAKVYCLDRLENPHPDFMAAKEHSETNYGGSLEYYRIDVRDDAEVNNVFAEIAGQNKRLDGLIAAAGINHLQSALEHSQTAMNEVMQINYNGVFNSATAAARQMFNYQQKGSILLIASMSGLIANKGMTSPVYNSSKAAVIQLARSLAMEWGRHGIRVNSLCPGHIITPMVEQVFQQNPASRAVWEAENMLGRLAYPEEFRGAALFALSDASSFMTGSTMLIDGGHTAW

SEQ ID NO: 1879 - DNA, 786 bp, Aspergillus oryzae
  CDS (1)..(786)
atgacgggaaacgagcagaaattctcgctccagggcaaggttgccattgtgaccggtgctgggtccggaattggaagagaaacggcattgtgtctcgccaatgctggggcaaatgtagtcgtggctgaagctaatgaaacgacgggcaaggagactgcggccaaggtttccgcacaaacaggcagtcgaggcctgtttatcctgaccgatgtgtctcggagcgaaagcgtccaggccatggtcatcgccaccatcgaggcctttgggcgtctcgatattgcagtgaacaacgccgccctgcacccagacgcatcccctatcgcagaactccacgaggatcactggcagaagatcatcggggtgaaccttgtgggcgtcgcattctgtctcaagtgggaacttcagcagatgatccagcaagggggtggtggctccattatcaacatcagctctgccacaatcaaccggccccaagaaaaaatgtcagcgtacatcgccgcgaagcacggtatcactggtttgactcagacggctgctgtcgagaatggacgacacggaattcgggttaatgcgctcgccccagggggggtggccactgatctgacgatggcgaccatgcaggaattagggctcaccgaggaaaacgaggcggcccggagtagcctcttcaaacgattcgcgaagcccgaagaaatcgcgcaatcggtactttggctagcatcagatgctgcttcgtacgttactggggccactattgccgtggattcaggactgtcgttgatttga

SEQ ID NO: 1880 - protein, 261 aa, Aspergillus oryzae
MTGNEQKFSLQGKVAIVTGAGSGIGRETALCLANAGANVVVAEANETTGKETAAKVSAQTGSRGLFILTDVSRSESVQAMVIATIEAFGRLDIAVNNAALHPDASPIAELHEDHWQKIIGVNLVGVAFCLKWELQQMIQQGGGGSIINISSATINRPQEKMSAYIAAKHGITGLTQTAAVENGRHGIRVNALAPGGVATDLTMATMQELGLTEENEAARSSLFKRFAKPEEIAQSVLWLASDAASYVTGATIAVDSGLSLI

SEQ ID NO: 1881 - DNA, 927 bp, Aspergillus oryzae
  CDS (1)..(927)
atgcaagattacacagaaagagccgctcgcggtactgaatcccagtttcaaacaggccatcaaattcccgttcaacatcagaagaaacccgggctacaagaagagctggaggacccaaagccagtatcaacctacataccgaccgaagaaggcggttatacgacatataaggcagcgggaaagcttgttgggaaaagagccatcatcacaggtggtgactctggcatcggccgcgccgttgccttattgtttgcaatggaaggagcatctagcttgatcgtctacttacccgaagaagaaaaagacgcacaagagacaaaaagaagggtccaaggcacaggacatgactgtcactgcttggctgtggatgtgcgcaagaaggagaattgtcgaaaagtggttgataccgccgtgcaatgtatgggtggcatagacatcctggtgaataatgcgggattccagaacatgattggggacattagtggccttgaagaggatcaatgggagcgtacattcgataccaacatccatccattcttctatctttcgaagtacgcgcttccgcacatgaagagtggctcaactataataaactgtgggtctgtcaatgcatacatcggtcgacctgacctccttgactacactgcaaccaagggtgcaatcgttgcattcaccaggggcttgtctaatcaacaagttggaagaggtatacgggtgaattgtgtttgtcctggcccaatttggacacctctgatcccatcaactatgactagctctgcaatggaccaattcagcagtgtgccaatgggccgtccgggacaacccagtgaagtggcgacttgtttcgtcttcctagcgagccaagacagcagctatatctcgggacaatcattgcatcccaatggaggtgttgttgttaatgggtag

SEQ ID NO: 1882 - protein, 308 aa, Aspergillus oryzae
MQDYTERAARGTESQFQTGHQIPVQHQKKPGLQEELEDPKPVSTYIPTEEGGYTTYKAAGKLVGKRAIITGGDSGIGRAVALLFAMEGASSLIVYLPEEEKDAQETKRRVQGTGHDCHCLAVDVRKKENCRKVVDTAVQCMGGIDILVNNAGFQNMIGDISGLEEDQWERTFDTNIHPFFYLSKYALPHMKSGSTIINCGSVNAYIGRPDLLDYTATKGAIVAFTRGLSNQQVGRGIRVNCVCPGPIWTPLIPSTMTSSAMDQFSSVPMGRPGQPSEVATCFVFLASQDSSYISGQSLHPNGGVVVNG

SEQ ID NO: 1883 - DNA, 867 bp, Aspergillus oryzae
  CDS (1)..(867)
atgtctgtctccattgaaacccacgacattgcccccgccgctcccaccacacaggcggccccctgcctcggatttaagaacagaatgcctgagttcagcttggctggaaaggtcgtctgtgtttctggtgctgcccgtggtcttggtctaactcaggctgaagcgcttttggaggccggggccaaggtatatgctttggaccgcctggaggaaccctcccctgaattcttcgaaatccaaaaacgtgccaaggaagagctgggaacggagctgcaataccgtcgcattgatgtccgtgacaccgaacttctcgacagtactatcgaagccatcgccgattccgagggtcgcttggatggcttgattgctgcggcaggcattcaacaggaaactccagccctcgagtatacggcccaggacgccaacacgatgttcgaagtcaacgtcactggtgtgttcatgacttccaaggccgttgctaagcaaatgattcgcttcggcaatggaggtagcatcgcactaattgcgagcatgagtggtactattgccaatcggggtcttatctgccctgcttacaatgctagcaaggctgcagtgcttcaacttgcccgtaacctcgccatggagtggggcccgtacaacattcgagtcaacaccatctcgcccggctacattgttactgccatggttgagaagctcttcgttgagttccctgagcgtcgcgaggaatggcccaaacataacatgctgggacgtctgtctacccctaacgagtaccgtggcgctgccgtcttccttctcagtgacgccagcagcttcatgactggaagcgatctacgtatggacggaggtcacgccgcttggtag

SEQ ID NO: 1884 - protein, 288 aa, Aspergillus oryzae
MSVSIETHDIAPAAPTTQAAPCLGFKNRMPEFSLAGKVVCVSGAARGLGLTQAEALLEAGAKVYALDRLEEPSPEFFEIQKRAKEELGTELQYRRIDVRDTELLDSTIEAIADSEGRLDGLIAAAGIQQETPALEYTAQDANTMFEVNVTGVFMTSKAVAKQMIRFGNGGSIALIASMSGTIANRGLICPAYNASKAAVLQLARNLAMEWGPYNIRVNTISPGYIVTAMVEKLFVEFPERREEWPKHNMLGRLSTPNEYRGAAVFLLSDASSFMTGSDLRMDGGHAAW

SEQ ID NO: 1885 - DNA, 822 bp, Aspergillus oryzae
  CDS (1)..(822)
atggccaacttcccaaaataccctgaccttcaaggcaaagtcgccctgataatgggtgccggccaaacacatgtaccaggctccgaagcacggggtaacggagcagccatcgctcaatgcctcgcccaaaacggtgtccaagtattcggctgcgacgtgaatctccaggctgcagagcttactgcttcaaggatccaagcagaaggcgggaaatgcgacattgcccaagccgatgtgacctcggaaaaggacgtgaggagagtcgtggacgccgtgatgtcaaagtatggccgaattgatatcttaatcaacaacgtaggcgccacagtggccggtgatccagccagcatgccttccgacgtatgggacaaacaaatcgatctcaatttaaaaagcgtctacctcgcctgccatgtggtgcttccgataatggaaaagcaagggtcggggtgcgtcgtcaacaatgcgtctattgcgggcttgaggtatattggaaagccacaggttgcgtattctgcggcaaaggctgcggtgattcagtttacgaaggttacagcggtcatgtacgcgccaaaaggtgttcgattgaatacggtagtaccgggcttcattcacacgcctttggtggataacttcaaattcaacggtcagaaagaagtttatgataagattacacgacagcctgtccccttggggcgcatgggagatgcgtttgatgtagctaattctacggtgtttttggctagcgatgcggccaagtatatcactgggcagattttggtggtggatggtggatttacaagttccgctgcgtctctatag

SEQ ID NO: 1886 - protein, 273 aa, Aspergillus oryzae
MANFPKYPDLQGKVALIMGAGQTHVPGSEARGNGAAIAQCLAQNGVQVFGCDVNLQAAELTASRIQAEGGKCDIAQADVTSEKDVRRVVDAVMSKYGRIDILINNVGATVAGDPASMPSDVWDKQIDLNLKSVYLACHVVLPIMEKQGSGCVVNNASIAGLRYIGKPQVAYSAAKAAVIQFTKVTAVMYAPKGVRLNTVVPGFIHTPLVDNFKFNGQKEVYDKITRQPVPLGRMGDAFDVANSTVFLASDAAKYITGQILVVDGGFTSSAASL

SEQ ID NO: 1887 - DNA, 873 bp, Aspergillus oryzae
  CDS (1)..(873)
atgcctcctgccgcgaccgagaatgttccagctccggctccagctgcagctgcagctcctaagcctgaagcacagccatatctcagcacgatgccttcttcggacttcagctggcagattaccctcgcgaacaaagtaatcgcaattacgggcgccaaccgcggaatcggtttgggaatcgcggaggtctgtctcgcgaactcggccaagttcgtatactctttcgacctgatggagcctggagaggactttgcggagctccagaagagatacagcaacttccgctatattcaaactgatgtgacgagcgaagaaagtattgagaatgctatcaacaaagtgattgaggaaacgggtcggatcgatggcttggtggccaacgctggaatgaccaagcatcagcctgcactcaagtttgaccgtgaacaattggataaactcttcaatctcaatgtttttggtgcatacttctgcgctcaaattgtcgcacgcaaattcattgagcttggcatcaaggggtctatcgtcatgacttccagtatgacttcttatcgaccaaatagggctgccccttctgccccttacggtgcgaccaaggccgcagtccggaatatgtgtcacacactggccatggagtggagccaacatggcatccgcgtcaacagcatttctcccggcttcgttcgtaccgcaatgacatactacgttgagaagtctccggactgggatctcaagatgcaatactacggtggtatgcctcgtctggccgacccacgggagcttggtggagcgtacgtgtacctcctcagcgacgcgagctcctacacaactggtattgatatcccaatcgctggaattgtgggtgcgtggtaa

SEQ ID NO: 1888 - protein, 290 aa, Aspergillus oryzae
MPPAATENVPAPAPAAAAAPKPEAQPYLSTMPSSDFSWQITLANKVIAITGANRGIGLGIAEVCLANSAKFVYSFDLMEPGEDFAELQKRYSNFRYIQTDVTSEESIENAINKVIEETGRIDGLVANAGMTKHQPALKFDREQLDKLFNLNVFGAYFCAQIVARKFIELGIKGSIVMTSSMTSYRPNRAAPSAPYGATKAAVRNMCHTLAMEWSQHGIRVNSISPGFVRTAMTYYVEKSPDWDLKMQYYGGMPRLADPRELGGAYVYLLSDASSYTTGIDIPIAGIVGAW

SEQ ID NO: 1889 - DNA, 816 bp, Aspergillus oryzae
  CDS (1)..(816)
atgacgtcatcgacccgtcaagacgaacaaggtggatgcaaggtttttgctgtgacgggcggagcacgggggctggggttgtctatggccgaggccttggtcgaagcgggtggacaagtctactgcctggacagactacctgaaccagacggggaattccgcgcggccgaagcacgcgccaacccggacttcgggggctcactacactaccgctgcatggacgtgacggacgatgcaaacaccgaagctgtcatcgccgacattggagcgcagcagaaccgtctcgacggcctgattgcagccgcgggtataaaccacgtcgctagcgcaattgaccaccgacccaagaacgttgacgacgtcatccacatcaactacacgggcgtctttcgcagtgcggtttcagccgcgaaggtaatgctagaccggaaatgccacggctcgattctcctcgtggcaagtatgagcggcatcgttgccaacaagggcatggcgtctgctatctataattcgtcaaaagcggcagtcatccagttgacgcgtagtctggccatggagtggtctgaagccaaagaagatggcacagggggaatccgtgtaaactgtctttgtcccgggcatattgaaacaccgatggcaaagatggtgatggagaaggatccagatacacgggcgctttgggagtccgaaaacatgatgaagaggttagcaaggccggaggagtttagaggcatcactttgttacttatgagcgatgcttcgagcttcatgactggcagcactgtggtggttgatgggggtcatacggcctggtag

SEQ ID NO: 1890 - protein, 271 aa, Aspergillus oryzae
MTSSTRQDEQGGCKVFAVTGGARGLGLSMAEALVEAGGQVYCLDRLPEPDGEFRAAEARANPDFGGSLHYRCMDVTDDANTEAVIADIGAQQNRLDGLIAAAGINHVASAIDHRPKNVDDVIHINYTGVFRSAVSAAKVMLDRKCHGSILLVASMSGIVANKGMASAIYNSSKAAVIQLTRSLAMEWSEAKEDGTGGIRVNCLCPGHIETPMAKMVMEKDPDTRALWESENMMKRLARPEEFRGITLLLMSDASSFMTGSTVVVDGGHTAW

SEQ ID NO: 1891 - DNA, 774 bp, Streptomyces natalensis
  CDS (1)..(774): transl_table=11
atgactcatcagcacggtctgctttccggcaaggtttccctgatcacaggagccagtagtgggattggcgcggcaaccgcgaggctttttgcgcgagaaggtgcggcggtggtgcttgcggcccgccgggtggaccgcctccgcgctcttgtgtcggagatacgtcggaccggagccgaggcggcgtacatcgcgacggatgtgtctcaggaggaggacgtgagacgtgccgtggaattcactgtggagaagtacgggcgcctggatctggcattcaacaacgcgggcgtcggctgtgatcacgagtccatgcacttgatgcaacaggatacgtacgacgacgtgatgggaaccaatgtccgtggtgtgtggcattgcctgcaacacgagatttccgcgatgctgcacaacggcgtgggcggttccatcgtcaacaacagcagtgtcgccggactgcaggcgatccctgccggggcgccttacatcgcctccaagcacgccgtcatcgggctgaccaaggcggctgcggccgaatacgcgccgcagggcatccgcgtcaactccgtggcgcccgggacgacccgtaccgagatcattgccggttggttcgatcggaaccccgggctggaggagcagttgcaccgtgcgacgccgcaggcccgtaccgccgaacccgaggagatagcccaggccgtcgcctggttgtgcagcgaccggtcttccttcgtcacgggtgcggtgctgcccgtggacggcgggtacaccctggtgtga

SEQ ID NO: 1892 - protein, 257 aa, Streptomyces natalensis
MTHQHGLLSGKVSLITGASSGIGAATARLFAREGAAVVLAARRVDRLRALVSEIRRTGAEAAYIATDVSQEEDVRRAVEFTVEKYGRLDLAFNNAGVGCDHESMHLMQQDTYDDVMGTNVRGVWHCLQHEISAMLHNGVGGSIVNNSSVAGLQAIPAGAPYIASKHAVIGLTKAAAAEYAPQGIRVNSVAPGTTRTEIIAGWFDRNPGLEEQLHRATPQARTAEPEEIAQAVAWLCSDRSSFVTGAVLPVDGGYTLV

SEQ ID NO: 1893 - DNA, 939 bp, Ixodes scapularis
  CDS (1)..(939)
atgttaaagattcgccaatgtgttttctcgcttctcctttgctgcataattacgggacgtgcgtcgaatgctgatgattctgctgattcacctccgtcggagtcacgcgcgaaaagtggaaatgaaaaaagtgagtcaagcaaaaagtcacaatacgatcctggaacctcctccctggaactgcaaggtcggctggcacttgtgactgggggagctagcggcattggccgtagcgtcgccatggtcctcgcacgtgagaacgtcaccgtcattgtagctgacatcaatcagaccggaggagcgcaaactatcaaatatctaaacctgttaagcagtcacctcaaacacaaggcgatctacgtggatgttcgaaattcaacttcggtagaatttctcatcaaatgcatagagctggagtacagcaatatgaccatcagcattgtagtgaacagcgctggcattttgcatgagattacaccagtcgtcaatctagctgacgaaacattcaatgacgtcatcagcaccaatcttaagggtacttttctggtgaccaaagaagcggtgaagcacatgctagctcggaatgtcaccggagcagctatcgtgaacattgcgagcatactcggcaagggtggctttccaggactctccgcctacacagcctccaagggtggtgtcgttgcgttcaccaaggccgtcgccgttgaactggctacaaggggtatccgggttaatgcgattctgcccggccttaccaacactcccatgattcgaaagtacggaaacgatactataagggagaggctggcgaagatgattcctctgcagcgtattgcggagccactcgaaatctcggaaacaattgtgttcatgtgcagcgtgaaagcatcctacatgactggatctacagtggatgttgcgggaggaagcatgctatga

SEQ ID NO: 1894 - protein, 312 aa, Ixodes scapularis
MLKIRQCVFSLLLCCIITGRASNADDSADSPPSESRAKSGNEKSESSKKSQYDPGTSSLELQGRLALVTGGASGIGRSVAMVLARENVTVIVADINQTGGAQTIKYLNLLSSHLKHKAIYVDVRNSTSVEFLIKCIELEYSNMTISIVVNSAGILHEITPVVNLADETFNDVISTNLKGTFLVTKEAVKHMLARNVTGAAIVNIASILGKGGFPGLSAYTASKGGVVAFTKAVAVELATRGIRVNAILPGLTNTPMIRKYGNDTIRERLAKMIPLQRIAEPLEISETIVFMCSVKASYMTGSTVDVAGGSML

SEQ ID NO: 1895 - DNA, 786 bp, Streptomyces chartreusis
  CDS (1)..(786): transl_table=11
atgacggacaacattgagcggacagccatcgtcaccggcgcgagcaatgggatcggccgggcgatcgccgccacactggcggcggaaggcgtacgcgtacatatctgcggcagggacgccgaaaccgtcgagaagacggtgaccgaactgcgggcggacagaggccaggtcagtggccaggcgtgcgacgtcaccaagcccgaccaggtgaccgcgttggtggcggactgcgtcgcacggtacggaccggtggacatcctggtgaacaacgccggccggcccggcggaggaatcaccgcgaacatcgacaacgaattgtggtacgccaccatcgacaccaatctcaacggtgttttcctgatgtccaaatccgtgctgaacgaagggcgcatgacggagcggcagaacggccgcatcatcaacatcgcctcggtgtggggaaaacagggaacgatcggaggcgcgccctacgcggccgccaaacacggcgtcatcggattcagccgctgcctcgcgctggaactcgcgaagaccgggatcacggtcaatgctgtgtgccccggatatgtcgagaccccgatgtcggtcaacgtacgcgcctgccaggcgggcatctggcaggtggacgaggaggaggccctgcgccgcctggcctccgacatccccatcggccggtacagcgagccggaggaggtcgcctggatggtctcctacctcgcctcgtccaaggccgcctcggtcaccggccaggcgctcaacgtgtgcggcggcttcggtgtccactga

SEQ ID NO: 1896 - protein, 261 aa, Streptomyces chartreusis
MTDNIERTAIVTGASNGIGRAIAATLAAEGVRVHICGRDAETVEKTVTELRADRGQVSGQACDVTKPDQVTALVADCVARYGPVDILVNNAGRPGGGITANIDNELWYATIDTNLNGVFLMSKSVLNEGRMTERQNGRIINIASVWGKQGTIGGAPYAAAKHGVIGFSRCLALELAKTGITVNAVCPGYVETPMSVNVRACQAGIWQVDEEEALRRLASDIPIGRYSEPEEVAWMVSYLASSKAASVTGQALNVCGGFGVH

SEQ ID NO: 1897 - DNA, 780 bp, Digitalis purpurea
  CDS (1)..(780)
atgtcgtcaaagccaaggttggatggtaaagtggcaatcatcaccggagctgctagcggcatcggcgaggaggcggcaagattgttcgtggagcatggcgcttcagtggtggtggcggacgtccaggacgaattgggtcgccaggtcgtcgcttccgtaaactctgacgacaagataagttaccaccactgcgacgtcagagatgaaaaacaagtggaggccaccgtccgctacgcggtggagaaatacgggcgcctcgacgtcatggtgagcaacgccggagtcttcggggccttgatgacgaccgtaatcgatctcgacatggttgactttgaaaatgtattggcgactaacgtgcgcggggttgccaatactataaagcacgcggcacgcgccatggtggaggggaatgtcaaggggtccatcatttgcaccgccagcgtgtcggcgagtcttggaggcatgggcccgcccgcttacacggcttccaaacacgccgttctgggcctggtcaaggcggcttgcgccgagttgggggtgcacgggatccgagtcaactcggtggcgccgtacggtgtggcgaccccgatgccgtgcagtgcttacggaatgacaccgagtcagatggaggacgccaactgctccagggctaatttgaagggggtggttttgaaggctaagcatgtagctgaggcggctctcttccttgcttccgatgagtcggcttatgtcagtgggcaaaacttggctgtcgacggcggcttcaccgtcgtgcgttag

SEQ ID NO: 1898 - protein, 259 aa, Digitalis purpurea
MSSKPRLDGKVAIITGAASGIGEEAARLFVEHGASVVVADVQDELGRQVVASVNSDDKISYHHCDVRDEKQVEATVRYAVEKYGRLDVMVSNAGVFGALMTTVIDLDMVDFENVLATNVRGVANTIKHAARAMVEGNVKGSIICTASVSASLGGMGPPAYTASKHAVLGLVKAACAELGVHGIRVNSVAPYGVATPMPCSAYGMTPSQMEDANCSRANLKGVVLKAKHVAEAALFLASDESAYVSGQNLAVDGGFTVVR

SEQ ID NO: 1899 - DNA, 780 bp, Digitalis thapsi
  CDS (1)..(780)
atgtcgtcaaagccaaggttggagggtaaagtggcaatcatcaccggggccgctagcggcatcggcgaggaggcggcaagattgttcgtggagcatggcgcctcagtggtggtggcggacgtccaggacgaattggggcgccaggtcgtcgcttccgtaaactctgacgacaagataagttactaccactgcgacgtcagagatgaaaaacaagtggcggccaccgtccgctacgcggtggagaaatacgggcgcctcgacgtcatgatgagcaacgccggagtcttcggtgccttgatgacgaatgtaatcgatctcgacatggttgactttgaaaatgtattggcgactaacgtgcgcggagttgccaacactataaagcacgcggcacgagccatggtggaggggaaggtcaaggggtccatcatttgcaccgccagcgtgtcggcgagccttggaggcatgggcccgcccgcttacacggcttccaaacacgccgtcctgggcctagtcaagggcgcttgcgccgagttgggggtgcacgggatccgagtcaactcggtggcgccgtacggtgtggcgaccccgatgccgtgcagtgcttacggaatgacaccgagtcagatggaggaggccaataactccagggctaacttgaagggggtggttttgaaggctaagcatgtagctgaggcggctctcttcttggcttccgatgagtcggcttatgtcagtgggcaaaacttggctgtcgacggcggcttcaccgtcgtgcgttag

SEQ ID NO: 1900 - protein, 259 aa, Digitalis thapsi
MSSKPRLEGKVAIITGAASGIGEEAARLFVEHGASVVVADVQDELGRQVVASVNSDDKISYYHCDVRDEKQVAATVRYAVEKYGRLDVMMSNAGVFGALMTNVIDLDMVDFENVLATNVRGVANTIKHAARAMVEGKVKGSIICTASVSASLGGMGPPAYTASKHAVLGLVKGACAELGVHGIRVNSVAPYGVATPMPCSAYGMTPSQMEEANNSRANLKGVVLKAKHVAEAALFLASDESAYVSGQNLAVDGGFTVVR

SEQ ID NO: 1901 - DNA, 780 bp, Digitalis parviflora
  CDS (1)..(780)
atgtcgtcaaagccaaggttggagggtaaagtggcaatcatcaccggggccgctagcggcatcggcgaggaggcggcaagattgttcgtggagcatggcgcctcagtggtggtggcggacgtccaggacgaattggggcgccaggtcgtcgcttccgtaaactctgacgacaagataagttactaccactgcgacgtcagagatgaaaaacaagtggcggccaccgtccgctacgcggtggagaaatacgggcgcctcgacgtcatgatgagcaacgccggagtcttcggtgccttgatgacgaatgtaatcgatctcgacatggttgactttgaaaatgtattggcgactaacgtgcgcggagttgccaacactataaagcacgcggcacgagccatggtggaggggaaggtcaaggggtccatcatttgcaccgccagcgtgtcggcgagccttggaggcatgggcccgcccgcttacacggcttccaaacacgccgtcctgggcctggtcaaggcggcttgcgccgagttgggggtgcacgggatccgagtcaactcggtggcgccgtacggtgtggcgaccccgatgccgtgcagtgcttacggaatgacaccgagtcagatggaggacgccaataactccagggctaacttgaagggggtggttttgaaggctaagcatgtggctgaggcggctctcttcttggcttccgatgagtcggcttatgtcagtgggcaaaacttggctgtcgacggcggcttcaccgtcgtgcgttag

SEQ ID NO: 1902 - protein, 259 aa, Digitalis parviflora
MSSKPRLEGKVAIITGAASGIGEEAARLFVEHGASVVVADVQDELGRQVVASVNSDDKISYYHCDVRDEKQVAATVRYAVEKYGRLDVMMSNAGVFGALMTNVIDLDMVDFENVLATNVRGVANTIKHAARAMVEGKVKGSIICTASVSASLGGMGPPAYTASKHAVLGLVKAACAELGVHGIRVNSVAPYGVATPMPCSAYGMTPSQMEDANNSRANLKGVVLKAKHVAEAALFLASDESAYVSGQNLAVDGGFTVVR

SEQ ID NO: 1903 - DNA, 780 bp, Digitalis grandiflora
  CDS (1)..(780)
atgtcgtcaaagccaaggttggagggtaaagtggtaatcatcaccggagccgctagcggcatcggcgaggaggcggcaagattgttcgtggagcatggcgcctcggtggtggtggcggacgtccaggacgaattggggcaccaggtcgtcgcttccgtaaactctgacgacaagataagttaccaccactgcgacgtcagagatgaaaaacaagtggcggccaccgtccgctacgcggtggagaaatacgggcgcctcgacgtcatgatgagcaacgccggagtcttcggggccttgatgacgaacgtaatcgatctcgacatggttgactttgaaaatgtattggcgactaacgtgcgcggagttgccaacactataaagcacgcggcacgagccatggtggaggggaaggtcaaggggtccatcatttgcaccgccagcgtgtcggcgagccttggaggcatgggcccgcccgcttacacggcttccaaacacgccgtcctgggcctggtcaaggctgcttgcgccgagttgggggtgcacgggatccgagtcaactcggtggcgccgtacggtgtggcgaccccgatgccgtgcagtgcttacggaatgacaccgagtcagatggaggacgccaatagctccagggctaacttgaagggcgtggttttgaaggctaagcatgtagctgaggcggctctcttcttggcttccgatgagtcggcttatgtcagtgggcaaaacttggctgtcgacggcggcttcaccgtcgtgcgttag

SEQ ID NO: 1904 - protein, 259 aa, Digitalis grandiflora
MSSKPRLEGKVVIITGAASGIGEEAARLFVEHGASVVVADVQDELGHQVVASVNSDDKISYHHCDVRDEKQVAATVRYAVEKYGRLDVMMSNAGVFGALMTNVIDLDMVDFENVLATNVRGVANTIKHAARAMVEGKVKGSIICTASVSASLGGMGPPAYTASKHAVLGLVKAACAELGVHGIRVNSVAPYGVATPMPCSAYGMTPSQMEDANSSRANLKGVVLKAKHVAEAALFLASDESAYVSGQNLAVDGGFTVVR

SEQ ID NO: 1905 - DNA, 783 bp, uncultured bacterium
  CDS (1)..(783): transl_table=11
atgctgaagaacaagaccgccatcgtgaccggctcgaccagcgggatcggcctgggtatcgcccgcgcgctcggcggtgcgggcgccaacctgatgctcaacggcttcggcgaggcgcaggagatcgaacgcctgcgtgcggcgctggcggccgaattcaaagtgaacgtcgcctacagcggcgccgacatgtccaagccggcgcagattcaggacatggtgcgcatggcgacgaaggaactggggtcggtcgacattctcgtcaacaacgccggcatccagcacacggcgtcggtcgaagagtttccggacgatcgctgggatgccgtgatcgccatcaacctgtcgtccaactttcatgcgatcaaggcggtgctgccgcagatgaagagccgcaactggggccggatcgtcaacatcgcttcggtgcacggactggtcgcctcgacacacaaggccgcctacgtcgctgccaagcacggtgtggttgggttgaccaaggtagtggccctggaaatggccaggacaggcatcacctgcaacgccatctgccccggctgggtgctgacgccgctcgtgcaaaagcagatcgacgaccgggccaaggccgaaagcattgcggccgacaaggcgaaggcggaactgctggccgaaaagcagccttccggcgaattcgccacgcccgagcagatgggcgccctgtgcgtgttcctgtgctcggaggccgcggcgcagatgcgcggcgtggcgctgccggtcgacggcggctggctggcgcaatag

SEQ ID NO: 1906 - protein, 260 aa, uncultured bacterium
MLKNKTAIVTGSTSGIGLGIARALGGAGANLMLNGFGEAQEIERLRAALAAEFKVNVAYSGADMSKPAQIQDMVRMATKELGSVDILVNNAGIQHTASVEEFPDDRWDAVIAINLSSNFHAIKAVLPQMKSRNWGRIVNIASVHGLVASTHKAAYVAAKHGVVGLTKVVALEMARTGITCNAICPGWVLTPLVQKQIDDRAKAESIAADKAKAELLAEKQPSGEFATPEQMGALCVFLCSEAAAQMRGVALPVDGGWLAQ

SEQ ID NO: 1907 - DNA, 780 bp, Streptomyces griseoruber
  CDS (1)..(780): transl_table=11
atgtcccgtccccagaccgccttcgtcaccggggtcagcagcggaatcggcctggcggtcgcccgcaccctcgccgcccgggggatcgccgtctacggatgcgcccgggacgccaagaacgtctcggccgcggtcgacggcctgcgcgccgccggtcacgacgtcgacgggtcctcctgcgacgtcacgtcgaccgacgaggtgcatgccgccgtcgcggccgccgttgagcgcttcggccccatcggcattctggtcaacagcgccggccgcaacggcggcggggagaccgccgacctcgacgacgccctctgggcggacgtcctcgacaccaacctgaccggtgtcttccgggtcacccgggaggtgctgcgggccgggggcatgcgcgaggcgggctggggcaggatcgtcaacatcgcctccaccgggggcaagcagggagtgatgtacgccgccccctacacggcctcgaagcacggtgtcgtcggcttcaccaagtccgtcggcttcgaactggccaagacgggcatcaccgtcaacgccgtctgccccggttacgtggagacgccgatggcggagcgggtccgcgagggctacgcacggcactggggcgtgaccgagcaggaggtccatgagcgcttcaacgccaagatcccgttgggccgttactccacccctgaggaggtggcgggcctcgtgggctacctggtcacggacgccgccgcctccatcacggcgcaggccctgaacgtctgcggcggcctgggcaactactga

SEQ ID NO: 1908 - protein, 259 aa, Streptomyces griseoruber
MSRPQTAFVTGVSSGIGLAVARTLAARGIAVYGCARDAKNVSAAVDGLRAAGHDVDGSSCDVTSTDEVHAAVAAAVERFGPIGILVNSAGRNGGGETADLDDALWADVLDTNLTGVFRVTREVLRAGGMREAGWGRIVNIASTGGKQGVMYAAPYTASKHGVVGFTKSVGFELAKTGITVNAVCPGYVETPMAERVREGYARHWGVTEQEVHERFNAKIPLGRYSTPEEVAGLVGYLVTDAAASITAQALNVCGGLGNY

SEQ ID NO: 1909 - DNA, 885 bp, Oryza sativa subsp
  CDS (1)..(885)
atggtgatggggcaagaacagagcagggttgacgatgttgactggattcgtcaacagtttctcctctgtgtcaagacccgaaaggtttacacgttggctggaaaggtggccgtgatcaccggtggcgcaagcggcatcggcgaggcgacggccaaggagttcatccgcaatggcgccaaggtcatcatcgccgacgtacaagacgatctcggccacaccgtcgctgccgagctcggcccgggctcggcctacacccgctgcgacgtcaccgacgaggcgcagatcgcggcgaccgtggaccttgccgtggcgcgccacggccaccttgacatcctgtacaacaacgccgggatcacaagctcctctgtggggcaccttgcctccctcgacctcgccgacttcgaccgcgtcatggcggtgaacgcccgggcggtgctcgccggcatcaagcacgccgcgcgcgtgatggcaccacgacgcaccggctccatcctctgcacggccagcgtggcgggcatgatgggcggcgagatgccccacgcgtacaacgtctccaaggcggcggtcataggtgtggtgcggtccgccgccggcgagctggcacgccacggcgtgcggctgaacgcgatctcgccgctcggcatcgcgacgccactggcgatgcgcgggttcggcgacatgctggcgtgggcggacgccgagcgggtgaggcggctcatcgaggaggacatgaacgagctagagggcgcgacgctggaggcggaggacatcgcgagggcggcggtgtacctcgcctccgacgaggccaagtacgtcaccgggcataacctcgtcgtcgacggcgggttcaccgtcgggaagcggctcaacgtggcgcgtgcttga

SEQ ID NO: 1910 - protein, 294 aa, Oryza sativa subsp
MVMGQEQSRVDDVDWIRQQFLLCVKTRKVYTLAGKVAVITGGASGIGEATAKEFIRNGAKVIIADVQDDLGHTVAAELGPGSAYTRCDVTDEAQIAATVDLAVARHGHLDILYNNAGITSSSVGHLASLDLADFDRVMAVNARAVLAGIKHAARVMAPRRTGSILCTASVAGMMGGEMPHAYNVSKAAVIGVVRSAAGELARHGVRLNAISPLGIATPLAMRGFGDMLAWADAERVRRLIEEDMNELEGATLEAEDIARAAVYLASDEAKYVTGHNLVVDGGFTVGKRLNVARA

SEQ ID NO: 1911 - DNA, 738 bp, Neurospora crassa
  CDS (1)..(738)
atggatctcactggttcggcattcgtcatcggagcaagcggtattggcaaggcatgcgcgttggcctttgcccggtatggcgttcgaggcatcgtcatagcagatctcacgctcgaagctgcttctgcggtggcagcagagtcaattgcatacgcacatcaggtcctcggtcggatcgactacgcagtgaacagcgctggtgtcggagtccaattggccaatgaaatcgccgaagccagcgtctccgagtttgaaaagatgttcaaggtcaacgtaactggcaccttcatcgtcacccgcgctctctccgccctcatgaagacccaagaccccgttcccgttgacgaagccgttcccgcgcggggtgtctcacggggtagcattgtcaacgtggggtcagcttcggggtttgttgctaccccaggcatggttcaatacacagccgccaagcatgcagtcgttggaatcaccaagaatgctgcacttgataacgccaaacatggtatccgggtcaatagtgtgtgtccatcctgggtcgatacacccatgatccgcaaggccatggatgacatccctgaactcggagagatgatccagaaagccgttccgctcggaaggattgcgctagccgaggaagttgccgatgcggtcatgttcctctctagtccgaaagcgagttatgctacggggtgcaacatgatcttggatgggggtacaacgcttgctgctcatgtctga

SEQ ID NO: 1912 - protein, 245 aa, Neurospora crassa
MDLTGSAFVIGASGIGKACALAFARYGVRGIVIADLTLEAASAVAAESIAYAHQVLGRIDYAVNSAGVGVQLANEIAEASVSEFEKMFKVNVTGTFIVTRALSALMKTQDPVPVDEAVPARGVSRGSIVNVGSASGFVATPGMVQYTAAKHAVVGITKNAALDNAKHGIRVNSVCPSWVDTPMIRKAMDDIPELGEMIQKAVPLGRIALAEEVADAVMFLSSPKASYATGCNMILDGGTTLAAHV

SEQ ID NO: 1913 - DNA, 777 bp, Sinorhizobium sp
  CDS (1)..(777): transl_table=11
atgacgaaaacagcggtcataacgggttcgacgagcggcatcggcctggcaatcgccaaggcatttgcgaagaccggggccaatatcgtgctgaatggtttcggttcggccgacgagatcaggacggtgacggacgaggtggcgggtctcggcgccggcacggtgctgcaccatccggccgacatgacgaagccggccgagatcgccgacctgatggcgaccgccgtcgcgcgcttcggcggtgccgatatcctcgtcaacaatgccggcgtacagttcgtcgaaaagatcgaggattttccggtcgagcaatgggaccggatcatcgccatcaacctctcctcctccttccacacgatccgggcggcgattcccgccatgaaacagaagggctggggccgcatcgtcaacatcgcctcggcgcatggcctcgtcgcctcacccttcaaatccgcctatgtggcggccaagcatggtatcatgggcctcacgaagaccgtggcgctcgaggtggcggaaaacggcatcaccgtgaactcgatctgccccggctatgtgctgacgccgcttgtcgaaaagcagataccggaccaggcgaggacgcgcggcatcaccgaggaacaggtgatcaacgaggtgatgctcaagggtcagccgaccaagaaattcataaccgtcgagcaggtcgcctcgctggcgctctatctcgccagcgacgaggcggcgcaaatcaccggcacgcatgtctcgatggacggcggctggacggcgcaatag

SEQ ID NO: 1914 - protein, 258 aa, Sinorhizobium sp
MTKTAVITGSTSGIGLAIAKAFAKTGANIVLNGFGSADEIRTVTDEVAGLGAGTVLHHPADMTKPAEIADLMATAVARFGGADILVNNAGVQFVEKIEDFPVEQWDRIIAINLSSSFHTIRAAIPAMKQKGWGRIVNIASAHGLVASPFKSAYVAAKHGIMGLTKTVALEVAENGITVNSICPGYVLTPLVEKQIPDQARTRGITEEQVINEVMLKGQPTKKFITVEQVASLALYLASDEAAQITGTHVSMDGGWTAQ

SEQ ID NO: 1915 - DNA, 936 bp, Oryza sativa subsp
  CDS (1)..(936)
atggccgcggctgcggagacctcggcgaaggtgggggcgccgagaagatggtctcttcaagggaagacggcgctcgtcaccggcggcacccgcggaatcgggcgtgcggtggtggaggagctggcggcgctgggggccaccgtgcacacatgctcccggaaggaggaggagctgagcgagcgcctcaaggagtgggaggcccggggattccgcgtcaccacctccgtctgcgatctctcggttcgggaccagcgtgagcgcctcctccgccaagtcgctgacctcttcggcggcaagctcgatatcctcgtaaacaatgtggggacaaacataaggaagccaaccactgaattttctgccgaggaatactcttttatgatggcgactaatcttgaatctgcgtatcatctgtgccaactttcgcatcctcttctgaaagcatctgggtcagggagcattgttttcatatcatcagtctgtggattggtagctgtatttagtggttctctctatgctatgacaaaaggtgcaatcaaccaattaaccaagaacctagcatgcgaatgggcgagagacaacatacgatccaactctattgccccgtggtatatcaggacttcacttaccgaaggagtaaagcttttgcttatcaaccatcctgatttatcatgtttggatacttgtcattttaagtcagaacatgtagtcaagtattcaactaattgtcaggatacgcttttggcaaataaggactttgaaggtgctgtggtgagccgaactccacttaggcgtgttggagaacctgaagaagtatcatcgctggttgcttttctttgcatgcctggttccagttacattactggccagacgatctcggttgatggaggcaaccggtacaagtcgagcgtaagcatgatggttctcgcagagcaataa

SEQ ID NO: 1916 - protein, 311 aa, Oryza sativa subsp
MAAAAETSAKVGAPRRWSLQGKTALVTGGTRGIGRAVVEELAALGATVHTCSRKEEELSERLKEWEARGFRVTTSVCDLSVRDQRERLLRQVADLFGGKLDILVNNVGTNIRKPTTEFSAEEYSFMMATNLESAYHLCQLSHPLLKASGSGSIVFISSVCGLVAVFSGSLYAMTKGAINQLTKNLACEWARDNIRSNSIAPWYIRTSLTEGVKLLLINHPDLSCLDTCHFKSEHVVKYSTNCQDTLLANKDFEGAVVSRTPLRRVGEPEEVSSLVAFLCMPGSSYITGQTISVDGGNRYKSSVSMMVLAEQ

SEQ ID NO: 1917 - DNA, 831 bp, Streptomyces atroolivaceus
  CDS (1)..(831): transl_table=11
atgagcggacggctcacgggccggaccgcgatcgtcaccggcgccgggcggggcgtcgggcgtgcctgcgccacggcgttcgccgcgcagggcgccgacctggtcctggtcgacatcgccgccgacctcccgcacgtcccctaccccgcggccaccccgagccagctcgatcacaccgcccggctgtgccgcgagcagggggccgccgtgctcaccgcacgcgcggacgtgcgggacgcggcggcctgcgagcgggtggtggccgatgccgtggaccgcttcggttcgctggacgtgctggtcaacaacgcggggatcgcgggtccttcgggccggatcgtgcacgaggtcaccgaggacgagtgggcggtgatgatcgacgtcaacctcaacggcgcctggcggatgctgaaggccgcgggggcgtcgatggtggcggcccgctccggctccatcgtcaacatcgcctccaccgccggactggtgggataccgcaacttcgccggctacgtggcgtccaagcacggcctggtcggcctgacgaaggccgccgccctcgactacgcgccctaccgggtgcgggtgaacgcggtctgccccggctcggtgcgcgacggcgaggcgtgggagggccggatgctggtggagatcggccgcagcatcgggatcgaaccggccgaccacgaagccgagttcatcacgcagatgcccatgaacacgctggtggaggcggacgatgtggcgggggccgccctgtggctcgcctccgaggagtcccgtcactccaccggcggtgtgatcaccgtcgacgccggctacagcgcccgttga

SEQ ID NO: 1918 - protein, 276 aa, Streptomyces atroolivaceus
MSGRLTGRTAIVTGAGRGVGRACATAFAAQGADLVLVDIAADLPHVPYPAATPSQLDHTARLCREQGAAVLTARADVRDAAACERVVADAVDRFGSLDVLVNNAGIAGPSGRIVHEVTEDEWAVMIDVNLNGAWRMLKAAGASMVAARSGSIVNIASTAGLVGYRNFAGYVASKHGLVGLTKAAALDYAPYRVRVNAVCPGSVRDGEAWEGRMLVEIGRSIGIEPADHEAEFITQMPMNTLVEADDVAGAALWLASEESRHSTGGVITVDAGYSAR

SEQ ID NO: 1919 - DNA, 825 bp, Phaseolus lunatus
  CDS (1)..(825)
atggcacatgtttctgctgtctcagctgctgttaaaaggcttgaggggaaagtggccattatcactggtggtgccagcggtattggtgcggccactgcaagactcttctctgagcatggagctcatgtggtgatagctgatattcaagacgatttgggtctttctgtttgcaatgaattgaaatctgctgtgtatgttcattgtgatgtgacaaaggaagaagacgttgaaaagtgcgtgaacgtaacagtttccaagtatgggaagctggacatcatgcttaataacgctggtacatgccatgagctcaaagatagcatagtggacaacatcacgtctgagtttgagagagtgatcagtgtgaacgtggttggtccatttctgggaacaaagcacgcagcaagggtaatgattcctgctaaaaggggttgcataattaacacatctagtattgctggatgcaggggtacagggtctccacatgcgtacgtcgtctcaaagcatggactagagggactgacgaaaaacacagcggtggagcttggacaattcggtattcgggtgaactgtgtgtctccttatttggttgccacaccgatgttgaagaagtatttcaatcttgatgaagaaggagttcgtgaggcttattccaacctaaaaggttcttatctagtgcccaacgatgtggccgaagctgctcttttcttggcaggtgatgagtctaattatgttagtggtcacagtcttctgttagatggaggctacaccattacaaatgcaggcttttctccaaatgcaggcttttctcctggccagtctgagtaa

SEQ ID NO: 1920 - protein, 274 aa, Phaseolus lunatus
MAHVSAVSAAVKRLEGKVAIITGGASGIGAATARLFSEHGAHVVIADIQDDLGLSVCNELKSAVYVHCDVTKEEDVEKCVNVTVSKYGKLDIMLNNAGTCHELKDSIVDNITSEFERVISVNVVGPFLGTKHAARVMIPAKRGCIINTSSIAGCRGTGSPHAYVVSKHGLEGLTKNTAVELGQFGIRVNCVSPYLVATPMLKKYFNLDEEGVREAYSNLKGSYLVPNDVAEAALFLAGDESNYVSGHSLLLDGGYTITNAGFSPNAGFSPGQSE

SEQ ID NO: 1921 - DNA, 951 bp, Oryza sativa subsp
  CDS (1)..(951)
atgggccgcgcagcctggcacggcctgctcaacggccgggtcgagcaacgccagcccacttgcagggggaagagcatagctgctcaggtgttctccaacggcttggccgatcgcctcttctcctcgtcgtcaagctccagaaagttggatggcaaagtggccgtgatcaccggcgcggcgagcggcatcggcgaggccacggcgaaggagttcgtcaggaacggcgccaaggttatcattgccgatatccaggacgacctcggccgcgccgtggccgccgagctcggcgccgacgccgcgtcgtacacgcactgcgacgtcaccgtcgagaaggatgtcgccgcggccgtcgacctcgccgtggcgcgccacggccgcctcgacgtcgtctacagcaacgccggcgtcataggagcaccggctccggcctcgctcgcggcgctcgacctcgacgagtacgaccgcgtcatggccgtcaacgcccggtcgatgttggcgtgcgtcaagcacgcggcgcgcgtcatggcgccgcgccgcgccggctgcatcctctgcacggccagctcggcggcggtgctcggcggcgtggcgtcgccggtgtactccatgtcgaaggcggccatcgtcggcatggtgcgcgcggtggcgaggcagctggcgcgcgacggcgtgcgggtgaacgccatctcgccgcacgccatcccgacgccgatggcgctaggcatcatcgccgagacgttcccggcggccaccgcggaggaggtgaggaggatggtgacgagggagatgcaggagctggaagggacatcgctggaggtggaagacgtggcgagggcggccgtgttcttggcgtccgacgaggccaagttcgtcaccggccacaacctcgtcgtcgacggcggcttcacggtgggcaaagacctcctccgaaatccaccgagctctacttga

SEQ ID NO: 1922 - protein, 316 aa, Oryza sativa subsp
MGRAAWHGLLNGRVEQRQPTCRGKSIAAQVFSNGLADRLFSSSSSSRKLDGKVAVITGAASGIGEATAKEFVRNGAKVIIADIQDDLGRAVAAELGADAASYTHCDVTVEKDVAAAVDLAVARHGRLDVVYSNAGVIGAPAPASLAALDLDEYDRVMAVNARSMLACVKHAARVMAPRRAGCILCTASSAAVLGGVASPVYSMSKAAIVGMVRAVARQLARDGVRVNAISPHAIPTPMALGIIAETFPAATAEEVRRMVTREMQELEGTSLEVEDVARAAVFLASDEAKFVTGHNLVVDGGFTVGKDLLRNPPSST

SEQ ID NO: 1923 - DNA, 951 bp, Oryza sativa subsp
  CDS (1)..(951)
atggggtcacttcacaaatatgccgtacaagcatcaatccataatggaatttacaaatgtttactgctgttcttgacaccacaaaacacagggaagagcatagctgctcacgtattcttctcctcgtcgtcaagatccagaaagttggatggcaaagtggccgtgataaccggcgcagcgagcggcatcggcgaggccacggcgaaggagttcgtcaggaatggcgccaaggttatcattgccgatatcaaggatgatctcggccgcgccgtggccggcgagctcggcgccgacgccgcgtcgtacacgcactgcgacgtcaccgtcgagaaggatgtcgcctcggccgtcgacctcgccgtggcgcgacacggccgcctcgacgtcgtgtacagcaacgccgccatcgcgggtggcgcgcctccggccacgctcgcggcgctcgacctcgacgagtacgaccgcgtcatggccgtcaacgccaggtccatgttggcgtgcgtcaagcacgcggcgcgcgtcatggcgccccgccgcgccggttgcatcctctgcacggccagcacggcggcggtgctcggcggcatggcggcgccggcgtactccatgtcgaaggcggccgtcgtcggcatggtgcggacggtggcgaggcagctggcgcgcgacggcgtgcgggtgaacgccatctcgccgcacgcagtcccgacgccgatggcgataggtctcttctccgagacgttcccggcggcgaccgcggaggaggtgaggaggatggtgacgagggagatgcaggagctggaaggggcgtcgctggaggtggaagacgtggcgagggcggccgtcttcttggcgtccgacgaggccaagttcatcaccggccacaacctcgtcgtcgacggcgggttcacggcaggcaaggtgctcgtccgggatcctccgggctctgcttga

SEQ ID NO: 1924 - protein, 316 aa, Oryza sativa subsp
MGSLHKYAVQASIHNGIYKCLLLFLTPQNTGKSIAAHVFFSSSSRSRKLDGKVAVITGAASGIGEATAKEFVRNGAKVIIADIKDDLGRAVAGELGADAASYTHCDVTVEKDVASAVDLAVARHGRLDVVYSNAAIAGGAPPATLAALDLDEYDRVMAVNARSMLACVKHAARVMAPRRAGCILCTASTAAVLGGMAAPAYSMSKAAVVGMVRTVARQLARDGVRVNAISPHAVPTPMAIGLFSETFPAATAEEVRRMVTREMQELEGASLEVEDVARAAVFLASDEAKFITGHNLVVDGGFTAGKVLVRDPPGSA

SEQ ID NO: 1925 - DNA, 921 bp, Oryza sativa subsp
  CDS (1)..(921)
atgatgagcgtagcagccaacaaaattctcgggaggagcagaggtgttcgtccgatgttctcttccggcttggccgatcgcctcttctcctcgtcggcgtcaagctccaaaaggttggaagggaaagtggccgtgatcaccggcgcggtgggcggcatcggcgaggccacggcgaaggagttcgtcaggaatggcgccaaggtcatcctcgccgatatccaggacgaccttggccgcgccatggccgccgagctcggcgcggacgccgcgtcgtacacgcactgcgacgtcaccgtcgaggcggacgtcgccgcggccgtcgacctcgccgtggcgcgccacggccgcctcgacgtcgtctacagcaacgccggcatcgccggcgccgcggccccgcccacgctctcggcgctcgacctcgacgactacgaccgcgtcatggccgtcaacgcccggtccatggtggcctgcctcaagcacgcggcgcgcgtcatgtccccgcgccgcgccggctgcatcctctgcacggcgagctccacggcgctgatcggcgacctggcggcgccggcgtactgcatctcgaaggcggccgtcgtcggaatggtgcggacggtggcaaggcagctggcgcgcgacggcgtgcgcgtgaacgccatctcgccgcacatcatcccgacggcgctggtgacgcgcgtcatctccgagacgttcccggcggccaccgcggaggaggtgaggaggatggtgacgagggacatgcaggagctggaaggggcgtcgctggaggtggaggacgtggcgagggcggccgtcttcttggcgtccgacgaggccaagttcgtcaccggccacaacctcgtcgtcgatggcggcttcacggtcggcaaggacctcctccggaatccaccgagctttgcttga

SEQ ID NO: 1926 - protein, 306 aa, Oryza sativa subsp
MMSVAANKILGRSRGVRPMFSSGLADRLFSSSASSSKRLEGKVAVITGAVGGIGEATAKEFVRNGAKVILADIQDDLGRAMAAELGADAASYTHCDVTVEADVAAAVDLAVARHGRLDVVYSNAGIAGAAAPPTLSALDLDDYDRVMAVNARSMVACLKHAARVMSPRRAGCILCTASSTALIGDLAAPAYCISKAAVVGMVRTVARQLARDGVRVNAISPHIIPTALVTRVISETFPAATAEEVRRMVTRDMQELEGASLEVEDVARAAVFLASDEAKFVTGHNLVVDGGFTVGKDLLRNPPSFA

SEQ ID NO: 1927 - DNA, 930 bp, Oryza sativa subsp
  CDS (1)..(930)
atggagataagaagcagaagagacagatcaaagatcaagatgttcagagcattgcagatcgtcctcaggggtaagagccgaggatttgtcagtcacttctcctccacggcttcaaattctgaaaggttggctgggaaggtggcggtgatcaccggcgcggcgagcggcatcggcaaggcgaccgcggcggagttcgtcaggaatggcgccaaggtcatcctcgccgacgtccaggacgacgtcggccgcgccgtcgcctcggagctcggcgcggacgcggcgtcgtacacccgctgcgacgtcaccgacgaggcgcaggtcgcggcggccgtggacctcgccgtggcgcggcacgggcagctcgacgtcatggtcaacaacgccggcatcgtgggctccctgtcgcgccccccgctcggcgccctcgacctcgccgacttcgacgccgtcatggcggtgaacacgcgcggcgtcctcgcgggcgtcaagcacgccgcgcgcgtcatggcgccgcgccgccgcggcagcatcatctgcgtggcgagcgtcgccggggtgctcggcagcgtgacgccgcacccgtacagcgtgtccaaggccgccgtgctcggcgcggtccgcgccgccgccggcgagatggcgcgctccggcgtgcgcgtgaacgccatctcccccaactacatccccacgccgctggtgatgcgcatcatggcggagtggtaccccggggcgagcgccgacgagcaccgccgcgtcgtggagcgggagatcaacgagatggagggcgcgacgctggagcccgaggacatcgcgagggcggcggtgtacctggcctccgacgaggccaagtacgtgaacggccacaacctcgtcgtcgacggcgggtacaccgtcggcaaggcgcccaacctgccggcgccgccgcaataa

SEQ ID NO: 1928 - protein, 309 aa, Oryza sativa subsp
MEIRSRRDRSKIKMFRALQIVLRGKSRGFVSHFSSTASNSERLAGKVAVITGAASGIGKATAAEFVRNGAKVILADVQDDVGRAVASELGADAASYTRCDVTDEAQVAAAVDLAVARHGQLDVMVNNAGIVGSLSRPPLGALDLADFDAVMAVNTRGVLAGVKHAARVMAPRRRGSIICVASVAGVLGSVTPHPYSVSKAAVLGAVRAAAGEMARSGVRVNAISPNYIPTPLVMRIMAEWYPGASADEHRRVVEREINEMEGATLEPEDIARAAVYLASDEAKYVNGHNLVVDGGYTVGKAPNLPAPPQ

SEQ ID NO: 1929 - DNA, 786 bp, Azospirillum brasilense
  CDS (1)..(786): transl_table=11
atgaccttgactcagaaggtcgcggtggtcaccggctcgaccagcgggatcggcttgggcatcgcgcgggcgttggccggagccggggcggacgtggtgctgaacggtttcggcgacgcggccgccatcgaggagctgcgcgccggtctggcggcggagttcggcgtgcgcgtcggctatcacggcgccgacctgtccaagccggcggagatcgccgcgctgatcggccacgcggaggagacgttcggttcggtcgatgtgctggtgaacaacgccggcatccagcacgtcgccccggtggaggacttcccggccgaccgctgggacgcggtgatcgcgctcaacctgtccgccgtcttccacggcacccaccacgctctgccgggtatgaagcggcgcggctgggggcgcatcctcaacatcgcctccgtgcacggccatgtcgcgtcggtcaataagtcggcctacgtcgcggccaagcacggcgtggtcgggctgaccaagacggtggcgctggaaacggcgagcaccggcgtcacctgcaacgccatctgtccgggctgggtgctgaccccgctggtgcagaagcagatcgacgcgatcgcctcgaccaagaacatcccggagccgcaggcgaaggcggaactgctcggcgccaagcagccctccggcgccttcgtgacgccggacgagctgggcgggctggcggttttcctgtgctccgattcagcggcgcagatgaccggcgccagcctgctgatggacggcggctggaccgcgcagtaa

SEQ ID NO: 1930 - protein, 261 aa, Azospirillum brasilense
MTLTQKVAVVTGSTSGIGLGIARALAGAGADVVLNGFGDAAAIEELRAGLAAEFGVRVGYHGADLSKPAEIAALIGHAEETFGSVDVLVNNAGIQHVAPVEDFPADRWDAVIALNLSAVFHGTHHALPGMKRRGWGRILNIASVHGHVASVNKSAYVAAKHGVVGLTKTVALETASTGVTCNAICPGWVLTPLVQKQIDAIASTKNIPEPQAKAELLGAKQPSGAFVTPDELGGLAVFLCSDSAAQMTGASLLMDGGWTAQ

SEQ ID NO: 1931 - DNA, 780 bp, Digitalis lanata
  CDS (1)..(780)
atgtcgtcaaagccaaggttggagggtaaagtggcaatcatcaccggagccgctagcggcatcggcgaggagacggcaagattgttcgtggagcatggcgcctcagtggtggtggcggacgtccaggacgaattggggcgccaggtcgtcgcttccgtaaactctgacgacaagataagttactaccactgcgacgtcagagatgaaaaacaagtggcggccaccgtccgctacgcggtggagaaatacgggcgcctcgacatcatgctgagcaacgccggagtcttcggggccttgatgacgaacgtaatcgatctcgacatggttgactttgaaaatgtattggcgactaacgtgcgcggagttgccaacactataaagcacgcggcacgagccatggtggaggggaaggtcaaggggtccatcatttgcaccgccagcgtgtcggcgagccttggaggcatgggcccgcccgcttacacggcttccaaacacgccgtcctgggcctagtcaagggcgcttgcgccgaattgggggtgcacgggatccgagtcaactcggtggcgccgtacggtgtggcgaccccgatgccgtgcagtgcttacggaatgacaccgagtcagatggaggaggccaataactccagggctaacttgaagggggtggttttgaaggctaagcatgtagctgaggcggctctcttcttggcttccgatgagtcggcttatgtcagtggacaaaacttggctgtcgacggcggcttcaccgtcgtgcgttag

SEQ ID NO: 1932 - protein, 259 aa, Digitalis lanata
MSSKPRLEGKVAIITGAASGIGEETARLFVEHGASVVVADVQDELGRQVVASVNSDDKISYYHCDVRDEKQVAATVRYAVEKYGRLDIMLSNAGVFGALMTNVIDLDMVDFENVLATNVRGVANTIKHAARAMVEGKVKGSIICTASVSASLGGMGPPAYTASKHAVLGLVKGACAELGVHGIRVNSVAPYGVATPMPCSAYGMTPSQMEEANNSRANLKGVVLKAKHVAEAALFLASDESAYVSGQNLAVDGGFTVVR

SEQ ID NO: 1933 - DNA, 921 bp, Arabidopsis thaliana
  CDS (1)..(921)
atggcggccatagtactgatcagatctatcgtcagaaactttaaacggccagccaccgcagcctcagccgcttactcgacaggtggtggtggcggcggttgtacttgtacgagtaaaaagctagaaggcaaagtagctctcataactggtggtgctagcgggctcggtaaggccacggccagcgagtttctccgccatggtgcccgagtcgtgatcgccgacttagacgcggaaaccgggacaaaaaccgctaaagaactaggctcggaggcagagtttgtgcggtgtgatgtcacggtggaggctgatatcgctgggacggtggaaataacggtggagcggtatgggaagctagacgtgatgtacaataacgctgggattgttggacctatgactccagcgagcatatcgcagcttgatatgacagaattcgagagagtaatgaggattaatgtttttggtgttgtctccggcatcaaacacgccgctaagtttatgattccggctaggtctggatgcattttgtgcacatcaagcgttgcaggcgtgactggagggttggctccacattcatacacaatctcaaagttcacaactcccggaatagtcaagtcggcagcaagcgagctctgcgaacacggcgtgcgtataaactgtatctcaccgggtacggtggctacaccgctcactctcagttaccttcagaaagtgtttccgaaggtatcggaggagaagctacgcgaaacagtgaaaggaatgggtgagttaaaaggagctgagtgtgaagaagctgacgtggctaaggctgctttgtatttggcttccaacgacggtaaatacgttactggccataacttggtcgtggatggtggcatgactgctttcaaaatagctggttttccttttccttcggattcatga

SEQ ID NO: 1934 - protein, 306 aa, Arabidopsis thaliana
MAAIVLIRSIVRNFKRPATAASAAYSTGGGGGGCTCTSKKLEGKVALITGGASGLGKATASEFLRHGARVVIADLDAETGTKTAKELGSEAEFVRCDVTVEADIAGTVEITVERYGKLDVMYNNAGIVGPMTPASISQLDMTEFERVMRINVFGVVSGIKHAAKFMIPARSGCILCTSSVAGVTGGLAPHSYTISKFTTPGIVKSAASELCEHGVRINCISPGTVATPLTLSYLQKVFPKVSEEKLRETVKGMGELKGAECEEADVAKAALYLASNDGKYVTGHNLVVDGGMTAFKIAGFPFPSDS

SEQ ID NO: 1935 - DNA, 810 bp, Ophiostoma floccosum
  CDS (1)..(810)
atgtctcctgcaactgtcaaggacgccgcccgccctcttgctggcaaggttgccatcatcactggtgctggccgtggtattggtcgcggtattgccaccgagcttggccgtcgtggcgcaaatgttattgtcaactacggtagcagcagtgccgctgctgaggaagttgttgccgacctcaaagctcttggcactgacgctgtcgccatgcaggccgatatcagcaagcccgatgaagttgtcaagctgttcgaccgtgcagttgcccactttggcggaattgacattgtcgtctccaactctggcatggaggtctggtcctcggagcttgacgtcacccaggagctttttgacaaggtcttcaacctgaactgccggggccagttctttgttgcccagcaaggcctcaagcactgccgtcgtggtggcagcatcatcctgacctcatcagtcgctgcgtcgctcagcggtatccccaaccacgctctatacgcaggctcaaaggctgctgtcgagggcttcacgcgtgccttctccgttgactgcggcgagaagggcgtcactgtcaatgccattgccccgggcggtgtcaagacggacatgtacgacgagaactcgtggcactacgttcccggtggctacaagggcatgtcgcaagatgtcatcgacgagggcattctcaaggcttgcccgctcaagcgcgtcggtaccccgagcgacatcggcaaggctgttgctctgcttgttagcgaggagggagaatggatcaacggccagattatcaagctgtctggcggttctgccgtttga

SEQ ID NO: 1936 - protein, 269 aa, Ophiostoma floccosum
MSPATVKDAARPLAGKVAIITGAGRGIGRGIATELGRRGANVIVNYGSSSAAAEEVVADLKALGTDAVAMQADISKPDEVVKLFDRAVAHFGGIDIVVSNSGMEVWSSELDVTQELFDKVFNLNCRGQFFVAQQGLKHCRRGGSIILTSSVAASLSGIPNHALYAGSKAAVEGFTRAFSVDCGEKGVTVNAIAPGGVKTDMYDENSWHYVPGGYKGMSQDVIDEGILKACPLKRVGTPSDIGKAVALLVSEEGEWINGQIIKLSGGSAV

SEQ ID NO: 1937 - DNA, 771 bp, Pseudomonas putida
  CDS (1)..(771): transl_table=11
atgaccctcaaaggcaagaccgcactcgtcaccggttccaccagcggcatcggcctgggcattgcccaggtgctggcccgcgcaggcgccaacatcgtgctcaacggcttcggcgaccctgccccggcgctggccgagatagcccggcacggggtaaaggcagtccatcacccggccgacctgtcggacgtggcccagatcgaagcgctgttcgccctggccgagcgcgagttcggcggcgtcgacatcctggtcaacaacgccggtatccagcacgtggcgccggtggagcagttcccgctggaaagctgggacaagatcatcgccctcaacctgtcggccgtgttccatggtacgcgcctggccctgcccggcatgcgagcgcgcaactgggggcgcatcatcaacatcgcctcggtgcacggcctggtcggctccaccggcaaggcggcctatgtggcggccaagcacggcgtggtcggcctgaccaaggtggtgggcctggaaaccgccaccagcaacgtcacctgcaatgccatctgcccaggctgggtgttgaccccgctggtgcagaaacagatcgacgatcgtgctgccaacggtggcgatccgctgcaagcgcaacacgatctgctggcagaaaaacagccatcgttggccttcgtcacccccgaacacctgggtgagctggtactattcctgtgcagcgaggccggtagccaggttcgcggtgccgcctggaacgtcgatggtggctggttggcccagtga

SEQ ID NO: 1938 - protein, 256 aa, Pseudomonas putida
MTLKGKTALVTGSTSGIGLGIAQVLARAGANIVLNGFGDPAPALAEIARHGVKAVHHPADLSDVAQIEALFALAEREFGGVDILVNNAGIQHVAPVEQFPLESWDKIIALNLSAVFHGTRLALPGMRARNWGRIINIASVHGLVGSTGKAAYVAAKHGVVGLTKVVGLETATSNVTCNAICPGWVLTPLVQKQIDDRAANGGDPLQAQHDLLAEKQPSLAFVTPEHLGELVLFLCSEAGSQVRGAAWNVDGGWLAQ

SEQ ID NO: 1939 - DNA, 852 bp, Candida magnoliae
  CDS (1)..(852)
atggctaagaacttctccaacgtcgagtaccccgccccgcctccggcccacaccaagaacgagtcgctgcaggtccttgacctgttcaagctgaatggcaaggttgccagcatcactggctcgtccagcggtattggctacgctctggctgaggccttcgcgcaggtcggcgctgacgtcgccatctggtacaacagccacgacgctactggcaaggctgaggccctcgccaagaagtacggcgtcaaggtcaaggcctacaaggcgaacgtgagcagctctgacgccgtgaagcagacgatcgagcagcagatcaaggacttcggccacctcgacattgtcgtggcgaacgccggcattccctggacgaagggtgcctacatcgaccaggacgacgacaagcacttcgaccaggtcgttgacgtcgatctgaagggtgttggatacgtcgcgaagcacgctggccgtcacttccgcgagcgcttcgagaaggagggcaagaagggcgcccttgtgttcacggcctccatgtctggccacattgtgaacgtgccccagttccaggccacgtacaacgcggccaaggctggcgtgcgccacttcgcgaagtcgctggccgtcgagttcgcgccgttcgcgcgcgtgaactctgtgtcgccgggctacatcaacacggagatctcggacttcgtgccccaggagacgcagaacaagtggtggtcgctcgtgccccttggccgcggcggagagacggccgagctcgttggcgcctacctgttccttgcatctgacgccggctcgtacgccactggtacggacatcattgttgacggtggctacacgcttccctaa

SEQ ID NO: 1940 - protein, 283 aa, Candida magnoliae
MAKNFSNVEYPAPPPAHTKNESLQVLDLFKLNGKVASITGSSSGIGYALAEAFAQVGADVAIWYNSHDATGKAEALAKKYGVKVKAYKANVSSSDAVKQTIEQQIKDFGHLDIVVANAGIPWTKGAYIDQDDDKHFDQVVDVDLKGVGYVAKHAGRHFRERFEKEGKKGALVFTASMSGHIVNVPQFQATYNAAKAGVRHFAKSLAVEFAPFARVNSVSPGYINTEISDFVPQETQNKWWSLVPLGRGGETAELVGAYLFLASDAGSYATGTDIIVDGGYTLP

SEQ ID NO: 1941 - DNA, 741 bp, Rhodococcus erythropolis
  CDS (1)..(741): transl_table=11
gtgagttacgcactcgagggcaaggttgctgtggttaccggtggcggatccggtatcggcgcagcatgtgtgcgccagctttgtgcgctcggcgccagcgttgtcgttgccgacatcgtcttcgacaacgccactttggtggcgaaggaattcggcgaccgagctgtagctgtcgaagtggacgtggcgcgtgtcgaggacgccgaacggatggttgagacggcggtggcgcacttcggtggactcgacatcgctgtcaacaatgccggtgtgggagtaccggtcaaggcctccgtgggagatacagggttcgaagaatggcgacgtgtgctcgacgtcaacctcgatggcgcattcttctgtatgcgggccgaattgcgacgaatgaggaagggtggttcggtggtcaatctcgcctccgtgatgggcgcggtggcagcggaaggctcgagtagctatgtcgcttccaaacatgctctggtcgggttgaccaaaacggcggccctcgattacgcgacggccggaatccgagtgaacgcggtgggcgctgggttcgtcgataccccgctgatggccgggcgggaccctgaatggcttgccgccgtggcggccagtcaccccttgggcaggttggctcaaccggacgaaattgcatcagtagtagcctttttggcttcgtcggcggcatcgttcgtcactggtgcattcatcccagtcgatggaggttacctcgcccgctga

SEQ ID NO: 1942 - protein, 246 aa, Rhodococcus erythropolis
MSYALEGKVAVVTGGGSGIGAACVRQLCALGASVVVADIVFDNATLVAKEFGDRAVAVEVDVARVEDAERMVETAVAHFGGLDIAVNNAGVGVPVKASVGDTGFEEWRRVLDVNLDGAFFCMRAELRRMRKGGSVVNLASVMGAVAAEGSSSYVASKHALVGLTKTAALDYATAGIRVNAVGAGFVDTPLMAGRDPEWLAAVAASHPLGRLAQPDEIASVVAFLASSAASFVTGAFIPVDGGYLAR

SEQ ID NO: 1943 - DNA, 822 bp, Streptomyces antibioticus
  CDS (1)..(822): transl_table=11
gtgaatcagccctggcccgcgacccgggcagaccgaccgaacatttgcagggaaggagcacgaatgagcctcggggccgacaccgtcgcgatcgtcaccggagccggacggggcatcggcgccgccacggcgcagcggctcgccgcggagggcgcgaccgtggcagtcgtcgaccggaccgaggcggacacggccgacaccgtggcgtcgatccgggcggccggtggccgcgccctcggcatcgggtgcgacgtgacagtcaccgacctggtcgaggcggcggtcgaccgcacggtcgcggagttcggtcgtctggacgtcctcgtcaacaacgccggggtaacccgggacagcctcgtcttcatgatgggcgacgaggactgggatacggtcatcgacgtgcacctgaacggcgccgcccggaccgtccgcgcggcacggcgccagatggtgcgtcaaggttccgggcggatagtgaacttgagctcgatcgcggctctgggcaaccaggggcaggccaactacgccactgccaaggccgcgatccagggctacacccgcaccctggccgtggaacttggcccgcacggtattacggtcaatgcgatcgcgcctgggttcatcgccacgaccatgacggacgacacggctcgccggatgggctccgatccggtggcgctgcggaaggcggtggcgtcgcgggtgccgatgcgcagggttggcaggccggaggacatcgccggcctggtggccttcctggccgggcctgatgcgagctatctcacagggcagacgatctacgtcgacggcggaccgcagtga

SEQ ID NO: 1944 - protein, 273 aa, Streptomyces antibioticus
MNQPWPATRADRPNICREGARMSLGADTVAIVTGAGRGIGAATAQRLAAEGATVAVVDRTEADTADTVASIRAAGGRALGIGCDVTVTDLVEAAVDRTVAEFGRLDVLVNNAGVTRDSLVFMMGDEDWDTVIDVHLNGAARTVRAARRQMVRQGSGRIVNLSSIAALGNQGQANYATAKAAIQGYTRTLAVELGPHGITVNAIAPGFIATTMTDDTARRMGSDPVALRKAVASRVPMRRVGRPEDIAGLVAFLAGPDASYLTGQTIYVDGGPQ

SEQ ID NO: 1945 - DNA, 768 bp, Pseudomonas sp
  CDS (1)..(768): transl_table=11
atgctcaatggaaagaccgctctgatcaccggctcgaccagcgggatcggcctcggcatcgccgaggtgctggcgcgcaacggcgccagcgtcattctcaacggtttcggcgactggcaggccgcggccgaacagctggcgcgccacgagggacgcgtcggctaccacgccgccgacctcgccgacccggcgcagatcgaggcgctgttcgactacgcccggcgcgagttcggccgcgtcgatatcctggtcaacaatgccggcatccagcatgtcgcgccgctgcaggacttcccggccgaacgctgggacgccatcctcgcgctcaacctcagcgcggtattccattgcacgcgcctggccctgccggacatgcgcgcgcaggactgggggcgcatcatcaacatcgcctcggtgcacggcagcatcggctcgctcggcaaggcggcctatgtcgcggccaagcacggcgtgctcggcctgaccaaggtggtggcgctggaaaccgccctgagcggggttacctgcaatgccatctgtcccggctgggtgctcacgcccctggtgcagcggcagatcgacgcgcgcatcgccgcaggcgaatcgcccgagcaggcgcgcacggcgctgctggcggagaagcagccatcgcaggccttcgtcaccccgcagcagctcggcgagctggcgctgtttctgtgcagttcggcggcgcagcaggtgcgtggcgcagcatggaacatcgatggtggctggctggcgcagtga

SEQ ID NO: 1946 - protein, 255 aa, Pseudomonas sp
MLNGKTALITGSTSGIGLGIAEVLARNGASVILNGFGDWQAAAEQLARHEGRVGYHAADLADPAQIEALFDYARREFGRVDILVNNAGIQHVAPLQDFPAERWDAILALNLSAVFHCTRLALPDMRAQDWGRIINIASVHGSIGSLGKAAYVAAKHGVLGLTKVVALETALSGVTCNAICPGWVLTPLVQRQIDARIAAGESPEQARTALLAEKQPSQAFVTPQQLGELALFLCSSAAQQVRGAAWNIDGGWLAQ

SEQ ID NO: 1947 - DNA, 825 bp, Streptomyces griseus subsp
  CDS (1)..(825): transl_table=11
atgaccagcggcttcgcacccaccctgctccagggcaggaccacctttctgaccggcgccagcagcgggatcggcgcggtcctggcgacgatgctcgccgcccacggctccagcgtggcgctcatggcccgcagcgagaaggagctccggctgctggccgagcggatcgaggcggacggcgggcgggcggtggcggtccccggtgacctcaccgacggcgacagtgtgcgcgccgccgtccgcgaggccgaggaacagctcggcccgatcgaccggctggtgcactgcgcgggcgaggcccgcaaccaggcgttcctgtgcgaccaggacgaggagcagtggacggccaccctcgacatcaacctgctgggggccttccgggtcgcccgtgcggtggtgccggggatgatggagcgccgcgagggcaacatcgtgatggtctcctccatcgccgggaagcgcgggctgcccgccaacacctcgtactgcgcctcgaagttcgggctcaacggcatgacgcaggcgctcgcctccgagctgggctccttcggcgtgcgggtcaacgcggtctgccccgggctcaccgacagccccgccgccacggacggcggacggtacggcgacgccttcatggccgccatcgccaagcaccacggccccccggacctgacctgggagcggtacctcaggcgcgcggtcaacagcaccatcctgcggcgcctggtgcgccccgaggagatcgccgcccaggtcctgttcctgctctccgacctctccggcgggatgaccggacaggccgtcaacgtggacgcgggggctctgtga

SEQ ID NO: 1948 - protein, 274 aa, Streptomyces griseus subsp
MTSGFAPTLLQGRTTFLTGASSGIGAVLATMLAAHGSSVALMARSEKELRLLAERIEADGGRAVAVPGDLTDGDSVRAAVREAEEQLGPIDRLVHCAGEARNQAFLCDQDEEQWTATLDINLLGAFRVARAVVPGMMERREGNIVMVSSIAGKRGLPANTSYCASKFGLNGMTQALASELGSFGVRVNAVCPGLTDSPAATDGGRYGDAFMAAIAKHHGPPDLTWERYLRRAVNSTILRRLVRPEEIAAQVLFLLSDLSGGMTGQAVNVDAGAL

SEQ ID NO: 1949 - DNA, 738 bp, Rhizobium leguminosarum
  CDS (1)..(738): transl_table=11
atgctcgatctttccggccgcaaggctctcgtcacaggcgcatcgggcggtatcggcgaggaaatcgcccgccttcttcataggcagggcgccatcgtcggcctgcatggcacccgcgtcgagaaactggaagcgctggccgccgatctcggcgagcgcgtcaagatcttcccggcgaacctttcagaccgcgatgaggtcaaggcgctcggccagaaggccgaggccgatctcgaaggcgtcgacatcctcgtcaacaatgccggcatcacccgcgacggcctgttcgtgcgcatgagcgacgaggactgggacagcgtcatcgaagtgaacctgacggcgaccttccgcctgacgcgcgaattgacgcatccgatgatgcgtcgccgctatggccgcatcatcaatatcacctcggtcgtcggcgtcaccggcaatccgggccaggccaattactgcgcctccaaggccggcatgatcggcttcaccaagtccctggcgcaggaaattgccacccgcaacgtgacggtcaattgcgtggcgcccggtttcatcgaaagcgccatgaccggcaagctgaacgacaagcagaaggaagcgatcatgggagcgattccgatgaagcgcatgggcacaggcggcgaggtcgcttcggcggtcgcttaccttgcgtcctccgaggctgcttatatgacgggccagacgctgcacgtaaacggcggcatggcgatgatctga

SEQ ID NO: 1950 - protein, 245 aa, Rhizobium leguminosarum
MLDLSGRKALVTGASGGIGEEIARLLHRQGAIVGLHGTRVEKLEALAADLGERVKIFPANLSDRDEVKALGQKAEADLEGVDILVNNAGITRDGLFVRMSDEDWDSVIEVNLTATFRLTRELTHPMMRRRYGRIINITSVVGVTGNPGQANYCASKAGMIGFTKSLAQEIATRNVTVNCVAPGFIESAMTGKLNDKQKEAIMGAIPMKRMGTGGEVASAVAYLASSEAAYMTGQTLHVNGGMAMI

SEQ ID NO: 1951 - DNA, 774 bp, Streptomyces virginiae
  CDS (1)..(774): transl_table=11
atgactgatcgacaagggcttctgacagacaggatcgcactgataacgggagccagcagcggcatcggcgcggcgcagcgcgggttgttcgccagggagggcgcggcggtggtggtcaccgcccgccgcgaggagcggctggccgggctggtggacgagttgcgggcgcagggcgcccgagccgcatacgtggtcgccgacgtgacccggtccgaggacgcggtacgtgccgtcgagttcacggtggaacgtttcggcaggctcgatgccgcgttcaacaaacgccggcacggggccggccgcacaccgctgcacctgatggacgacccggtctacgacgacatcatggacaccaacgtgcgcggggtgttcaactgcctgcgcccggagatcgcggcgatgctcgcatccggagcaggcggttcgatcgtcaacaccagcagcaccggcggcttggtcgccactccggtcgccgcgccgtacgtggtgtccaagcacgcggtgctcggtctgaccaaagggcctgccgccgagtacggcgcccacggcattcgggtcaacgcgatagcccccggcacgacccgcagcgagatggtggcggactggttcgcgcagaacccggatgccgaggagctgctgcaccgggccacgccgcagccccgtaccgccgaaccccaggagatcgccgaggccgctgcgtggctgtgcagcgagcgggcgtccttcgtcaccgggtcgaccctggtggtcgacggcgggttcaccatcctctga

SEQ ID NO: 1952 - protein, 257 aa, Streptomyces virginiae
MTDRQGLLTDRIALITGASSGIGAAQRGLFAREGAAVVVTARREERLAGLVDELRAQGARAAYVVADVTRSEDAVRAVEFTVERFGRLDAAFNKRRHGAGRTPLHLMDDPVYDDIMDTNVRGVFNCLRPEIAAMLASGAGGSIVNTSSTGGLVATPVAAPYVVSKHAVLGLTKGPAAEYGAHGIRVNAIAPGTTRSEMVADWFAQNPDAEELLHRATPQPRTAEPQEIAEAAAWLCSERASFVTGSTLVVDGGFTIL

SEQ ID NO: 1953 - DNA, 828 bp, Rhodococcus erythropolis
  CDS (1)..(828): transl_table=11
atgacacagggttcagttcgttcgctcgaaggtcgcgttgctttcatcaccggcgcagcgcgcggtcaaggacgtgcgcacgcggtcaagatggcgcgcgagggagcagcgatcatcgcagtcgacgtgtgcgcgtcggtggcgtcggacaattcttacgacgcagcaacttccgaggactttgccgagacgatacgtctggtcgaagcggagggtgggaagatcctcgcccgcgaggtagatgtccgtgacggcgcacggctcaccgcggtggtcaaggacggtgtcgagcagttcggacgccttgacatcgtggtcgccaatgccggggtctgtaactggaatcgattctgggaaatgtcggacgagcagtgggaaaccctgatcgacatcaacctgaccggagtctggaaaaccctcaaggcatcggtgccggcgatcatcgaaggtgggcgcggtggatcgatcatcgtggtcagttcggtggccggactcaaggcgctgcccggacaggcgcactacgcgagcgccaagttcggtctcgtcggtctgacgcaggccgcggcaaaggaactgggggagtacaagatcagggtcaactcgatccacccttacggagtaaatacgccgatgggggtcgaccagggcgcgctcgaggtatttgcaaagtttccgcagtaccttcccaacttcactccgatcctctcggacatcgcgttcgccgaacccgacgagatcgccgataccgttctgtggctcgcgggtgacggttcacgcaccgtcacggcaagtcatatcgctctcgatcagggaaactccaaggtctga

SEQ ID NO: 1954 - protein, 275 aa, Rhodococcus erythropolis
MTQGSVRSLEGRVAFITGAARGQGRAHAVKMAREGAAIIAVDVCASVASDNSYDAATSEDFAETIRLVEAEGGKILAREVDVRDGARLTAVVKDGVEQFGRLDIVVANAGVCNWNRFWEMSDEQWETLIDINLTGVWKTLKASVPAIIEGGRGGSIIVVSSVAGLKALPGQAHYASAKFGLVGLTQAAAKELGEYKIRVNSIHPYGVNTPMGVDQGALEVFAKFPQYLPNFTPILSDIAFAEPDEIADTVLWLAGDGSRTVTASHIALDQGNSKV

SEQ ID NO: 1955 - DNA, 852 bp, Arabidopsis thaliana
  CDS (1)..(852)
atgttaattgttagctttctgtcgggttatgaagatggtattggtaggaagctagaaggtaaagtagcactcatcactggaggagcaagtgggattggcaaagcaacagccggaaaattcatcagtcatggagccaaagttatcattgccgatatccaaccgcagattgggcgagaaaccgagcaagaactcggtcccagttgtgcttacttcccatgcgatgtgaccaaagaatcagacattgctaacgcagttgacttcgctgtctcgctccatacaaagctcgacattatgtacaacaatgctggtattccctgcaaaacgcctcctagtatcgttgatcttgatctcaatgttttcgacaaggtaatcaacacaaatgtccgtggagtcatggcaggaatcaaacatgctgctcgtgtgatgatcccgcgtaactctggatccatcatttgtgcagggagtgtcacggggatgatgggcggtttagcccaacatacttacagcgtctcaaaatccgctgttatcggaattgtaagatcaacagcttcagaactatgcaagcacaggatccgggtcaactgcatttctccttttgcgatcacaacatcattcgtgatggatgagatgcgacagatttaccccggtgttgatgactcaaggctgatccagatagtgcagagtacaggagtgttaaatggagaggtttgtgaaccaaccgatgtagctaatgcagcggtgtatctcgcttccgatgattcaaagtatgtaaatgggcataatctggtggtagatggaggattcacaactgtaaagacgttagatttccctgcacctgaccaagtgaagtaa

SEQ ID NO: 1956 - protein, 283 aa, Arabidopsis thaliana
MLIVSFLSGYEDGIGRKLEGKVALITGGASGIGKATAGKFISHGAKVIIADIQPQIGRETEQELGPSCAYFPCDVTKESDIANAVDFAVSLHTKLDIMYNNAGIPCKTPPSIVDLDLNVFDKVINTNVRGVMAGIKHAARVMIPRNSGSIICAGSVTGMMGGLAQHTYSVSKSAVIGIVRSTASELCKHRIRVNCISPFAITTSFVMDEMRQIYPGVDDSRLIQIVQSTGVLNGEVCEPTDVANAAVYLASDDSKYVNGHNLVVDGGFTTVKTLDFPAPDQVK

SEQ ID NO: 1957 - DNA, 858 bp, Arabidopsis thaliana
  CDS (1)..(858)
atgtcaacgaacactgaatcttcttcttattcttctcttcctagtcaaaggcttttgggtaaagtggcattgatcactggaggagccacagggataggtgagagcattgttcgtctgttccacaagcacggtgccaaagtctgcattgttgatctgcaagatgatctcggaggtgaggtgtgtaaaagtctgcttcgtggtgagtccaaggagacggcttttttcatccatggcgatgttagagtggaagatgacattagcaatgcggttgactttgcagtcaaaaattttgggacgcttgatatacttatcaacaatgcaggattatgtggagcaccgtgccctgatattcgtaattatagtttgagtgagttcgagatgacctttgatgtgaatgtgaaaggagcttttctaagcatgaaacatgcagctcgtgtaatgataccggagaagaaagggtcgatagtttccttatgtagtgtgggaggtgttgtgggaggcgttggtccacattcttatgttggttccaagcatgctgttctaggcttgactaggagtgttgcagcggagcttggacagcacgggatacgtgtgaactgtgtttcgccttacgcggttgcaactaaactcgctttggctcatttgccggaggaagaaagaacggaggatgcatttgttggtttcaggaattttgctgctgcaaacgcgaatctaaaaggggtggaactgacggttgatgatgtagcgaacgctgttctgtttttggctagcgatgactcgcggtacataagcggagataatttgatgattgatggaggattcacttgcactaaccactcctttaaagtcttcagatga

SEQ ID NO: 1958 - protein, 285 aa, Arabidopsis thaliana
MSTNTESSSYSSLPSQRLLGKVALITGGATGIGESIVRLFHKHGAKVCIVDLQDDLGGEVCKSLLRGESKETAFFIHGDVRVEDDISNAVDFAVKNFGTLDILINNAGLCGAPCPDIRNYSLSEFEMTFDVNVKGAFLSMKHAARVMIPEKKGSIVSLCSVGGVVGGVGPHSYVGSKHAVLGLTRSVAAELGQHGIRVNCVSPYAVATKLALAHLPEEERTEDAFVGFRNFAAANANLKGVELTVDDVANAVLFLASDDSRYISGDNLMIDGGFTCTNHSFKVFR

SEQ ID NO: 1959 - DNA, 768 bp, Bacillus subtilis
  CDS (7)..(768): transl_table=11
atgatcatgaacctcaccgataaaaccgtcctcatcacaggaggcgcatcaggcattggttatgctgcggttcaggcttttttgggccagcaggccaatgtggttgtggcggatattgatgaagcgcaaggagaagcaatggtacgaaaagaaaataatgacaggctgcactttgtgcaaacggacatcacagacgaagctgcctgccagcacgcagttgaatcggcggttcatacatttggcgggctcgatgtcttgattaataatgcaggcatcgaaatcgtggcgcctattcacgagatggagctcagcgattggaacaaggtgctgcaagtcaatttgaccggcatgtttttaatgagcaaacatgcactcaagcatatgctggccgccggcaagggcaacatcattaatacgtgctctgtcggcggactcgtggcatggcctgatattcctgcttataacgccagcaaaggcggggttttgcagctgactaaatcaatggccgttgattatgcgaaacatcaaattcgggtgaactgcgtatgcccggggatcatcgacacaccgctgaatgaaaaatcattccttgaaaataatgaaggcacacttgaagagattaaaaaagaaaaagcgaaggtaaatccgctgctgaggcttgggaaacctgaagaaatcgcaaatgtgatgctgtttttagcctcggatttatcaagctatatgaccggaagcgccatcaccgcagacggaggatacaccgcacaatag

SEQ ID NO: 1960 - protein, 253 aa, Bacillus subtilis
MNLTDKTVLITGGASGIGYAAVQAFLGQQANVVVADIDEAQGEAMVRKENNDRLHFVQTDITDEAACQHAVESAVHTFGGLDVLINNAGIEIVAPIHEMELSDWNKVLQVNLTGMFLMSKHALKHMLAAGKGNIINTCSVGGLVAWPDIPAYNASKGGVLQLTKSMAVDYAKHQIRVNCVCPGIIDTPLNEKSFLENNEGTLEEIKKEKAKVNPLLRLGKPEEIANVMLFLASDLSSYMTGSAITADGGYTAQ

SEQ ID NO: 1961 - DNA, 777 bp, Rhizobium meliloti
  CDS (1)..(777): transl_table=11
atgaccaagactgcggtgataacgggttccacgagcggcatcggattggcgatcgcccggaccctggcgaaggccggtgccaatatcgtcctgaacggcttcggtgcgccggacgagatcaggaccgtcacggatgaagtcgcaggcctgagctccggtacggtgcttcatcacccggccgacatgaccaagccctccgaaatcgccgacatgatggcgatggttgccgatcgcttcggcggcgccgatatcctcgtcaacaatgccggcgtgcagttcgttgaaaagatcgaggattttccggtcgagcaatgggaccggatcatcgccgtcaatctctcctcctcctttcacaccattcgtggcgccattccgccgatgaagaagaagggctggggccggatcatcaatatcgcgtccgctcatggcctcgtggcctcccccttcaagtccgcctatgtcgccgccaagcatggtatcatggggttgacgaagactgtggcgctggaggtggcggagagcggtgtcaccgtgaactcgatctgccccggctacgttctgacgccgctcgtcgaaaagcagataccggatcaggcgagaacgcgcggcatcaccgaggaacaggtgatcaacgaggtgatgctcaagggacagccgacgaaaaagttcatcaccgtcgaacaggttgcctccctggcgctctatcttgcaggcgacgatgccgcccagatcaccgggacgcatgtttcgatggatggcggctggacggcgcagtag

SEQ ID NO: 1962 - protein, 258 aa, Rhizobium meliloti
MTKTAVITGSTSGIGLAIARTLAKAGANIVLNGFGAPDEIRTVTDEVAGLSSGTVLHHPADMTKPSEIADMMAMVADRFGGADILVNNAGVQFVEKIEDFPVEQWDRIIAVNLSSSFHTIRGAIPPMKKKGWGRIINIASAHGLVASPFKSAYVAAKHGIMGLTKTVALEVAESGVTVNSICPGYVLTPLVEKQIPDQARTRGITEEQVINEVMLKGQPTKKFITVEQVASLALYLAGDDAAQITGTHVSMDGGWTAQ

SEQ ID NO: 1963 - DNA, 777 bp, Bacillus subtilis
  CDS (1)..(777): transl_table=11
atgtacaaagatttaaccggaaaaacagcgattgtgacagggtcttcaaaaggaatcgggaaagccattgcggaacggttcggaaaggagaaaatgaatgttgttgtaaattaccacagcgacccgtctggagcagatgaaactctggaaatcattaagcagaacggagggaaagccgtctcagttgaggcggacgtgtcaaaagaagaggggattcaggcgctcttggacacagctttagagcatttcggcacgctcgatgtgatggtaaacaactccggttttaacggcgttgaggcgatgccgcatgagatgagtcttgaagattggcagagagtgattgatgtcaatgttaccggaacctttctgggagcgaaagcagcacttaaccacatgatgaaaaacaatatcaagggcaatgtgctgaatatctcaagtgttcatcagcagattccgcgccctgtaaacgttcagtattccacatccaaaggcggcatcaagatgatgacggaaacgctggcgctcaattatgcggataagggaatccgcgtcaatgcgatagcgcccggcaccattgccacagaatcaaatgttgatacgaaaaaggaagagagcaggcaaaaacaattgaaaaaaatcccgatgaaagccttcggaaagcctgaagaagtggcggcagcagcagcttggctcgtatctgaggaagcaagctatgtgaccggcgcaacacttttcgtcgacggcggaatgacactttatccatctcagcttgaatag

SEQ ID NO: 1964 - protein, 258 aa, Bacillus subtilis
MYKDLTGKTAIVTGSSKGIGKAIAERFGKEKMNVVVNYHSDPSGADETLEIIKQNGGKAVSVEADVSKEEGIQALLDTALEHFGTLDVMVNNSGFNGVEAMPHEMSLEDWQRVIDVNVTGTFLGAKAALNHMMKNNIKGNVLNISSVHQQIPRPVNVQYSTSKGGIKMMTETLALNYADKGIRVNAIAPGTIATESNVDTKKEESRQKQLKKIPMKAFGKPEEVAAAAAWLVSEEASYVTGATLFVDGGMTLYPSQLE

SEQ ID NO: 1965 - DNA, 786 bp, Streptomyces cinnamonensis
  CDS (1)..(786): transl_table=11
atgacacagtccacctcccgcgtcgcgctcgtcaccggcgccaccagcggcatcggcctggccaccgcccggctgctggccgcccagggccacctggtcttcctgggcgcgcgcaccgagagcgacgtcatcgcgaccgtcaaggccctgcgcaacgacggcctggaggccgagggccaggtgctcgatgtgcgcgacggcgcctccgtcaccgccttcgtccaggccgccgtcgaccggtacggccgcatcgacgtcctggtcaacaacgccggccgctccggcggcggcgtcaccgcggacctcaccgacgagctgtgggacgacgtgatcgacaccaacctcaacagcgtcttccgcatgacccgcgcggtgctcaccaccggcggcatgcgcacccgggagcggggccgcatcatcaacgtcgcctccaccgcgggcaagcagggcgtcgtgctcggcgccccctactccgcctccaagcacggcgtcgtcggcttcaccaaggcactcggcaacgaactggcccccaccggcatcaccgtcaacgccgtctgccccggctatgtcgagacgccgatggcccagcgggtgcgccagggctacgccgccgcctacgacaccaccgaggaggcgatcctcaccaagttccaggccaagatccccctcggccgctacagcacccccgaggaagtcgccggcctgatcggctacctggcctccgacaccgccgcctccatcacctcccaggcgctcaacgtctgcggcggcctcggcaacttctga

SEQ ID NO: 1966 - protein, 261 aa, Streptomyces cinnamonensis
MTQSTSRVALVTGATSGIGLATARLLAAQGHLVFLGARTESDVIATVKALRNDGLEAEGQVLDVRDGASVTAFVQAAVDRYGRIDVLVNNAGRSGGGVTADLTDELWDDVIDTNLNSVFRMTRAVLTTGGMRTRERGRIINVASTAGKQGVVLGAPYSASKHGVVGFTKALGNELAPTGITVNAVCPGYVETPMAQRVRQGYAAAYDTTEEAILTKFQAKIPLGRYSTPEEVAGLIGYLASDTAASITSQALNVCGGLGNF

SEQ ID NO: 1967 - DNA, 741 bp, Bacillus subtilis
  CDS (1)..(741): transl_table=11
atgcttaatgataaaacggctattgtcactggcgcatcccgcggaatcggccgctcaatcgcccttgatctggcaaaaagcggagcaaatgttgtcgtgaactactccggcaatgaagcgaaagcaaatgaagtggtagatgaaatcaaatcaatgggcagaaaagcaattgctgtaaaagcggatgtatcaaatcccgaagatgtacaaaacatgataaaagaaacattgtctgttttttctacgattgacattctggttaataatgcgggaattacaagagacaatctcatcatgagaatgaaagaagacgaatgggatgacgtcattaacattaacctgaagggtgttttcaactgcacaaaagctgttacaagacaaatgatgaaacagcgttcaggccgcattattaacgtatcgtctatcgtcggcgtcagcggaaaccctggacaagccaactacgtggctgcaaaagccggcgtcatcggtttaaccaaatcttctgctaaagagctcgccagccgaaatattacggtaaacgcaatagcgccaggatttatctcaactgatatgacagataaacttgcaaaagacgttcaagacgaaatgctgaaacaaattccgctcgcgcgctttggtgaacctagcgatgtcagcagtgttgtcacgttcctagcttcagagggagctcgttatatgacaggccaaacgcttcatattgacggcggaatggtgatgtaa

SEQ ID NO: 1968 - protein, 246 aa, Bacillus subtilis
MLNDKTAIVTGASRGIGRSIALDLAKSGANVVVNYSGNEAKANEVVDEIKSMGRKAIAVKADVSNPEDVQNMIKETLSVFSTIDILVNNAGITRDNLIMRMKEDEWDDVININLKGVFNCTKAVTRQMMKQRSGRIINVSSIVGVSGNPGQANYVAAKAGVIGLTKSSAKELASRNITVNAIAPGFISTDMTDKLAKDVQDEMLKQIPLARFGEPSDVSSVVTFLASEGARYMTGQTLHIDGGMVM

SEQ ID NO: 1969 - DNA, 741 bp, Thermotoga maritima
  CDS (1)..(741): transl_table=11
atgaggcttgaagggaaagtgtgtctgatcacaggggctgcaagcgggatagggaaagccaccacgcttcttttcgcacaggaaggagctacggtgatcgctggcgatatctcgaaagaaaatctcgactctcttgtgaaagaggcagaaggacttccggggaaggttgatccctacgttttgaacgtgaccgacagggatcagataaaggaagttgtggaaaaagtcgttcaaaagtacggtcgaatcgatgttctggtgaacaacgcgggaataacaagggatgcgcttcttgtgaggatgaaagaagaagactgggatgcggtaataaacgtgaatctgaagggtgttttcaacgtgactcagatggtggtgccctacatgatcaaacagaggaacggttcgatcgtgaacgtctcctctgtcgttggaatatacgggaatcctggtcagacgaattacgcggcgtcgaaggcgggagtcataggaatgaccaagacgtgggcgaaggaactcgctggaagaaacatcagggtgaacgctgtggcacccggattcatagaaacccccatgaccgaaaaacttccagaaaaagcccgtgaaacggccctttccagaataccgctgggaaggtttgggaagccagaagaggtggcgcaggttatactcttcctcgcatcggacgagtcgagttacgtcaccggacaggtgataggaatagatgggggcctcgtgatctga

SEQ ID NO: 1970 - protein, 246 aa, Thermotoga maritima
MRLEGKVCLITGAASGIGKATTLLFAQEGATVIAGDISKENLDSLVKEAEGLPGKVDPYVLNVTDRDQIKEVVEKVVQKYGRIDVLVNNAGITRDALLVRMKEEDWDAVINVNLKGVFNVTQMVVPYMIKQRNGSIVNVSSVVGIYGNPGQTNYAASKAGVIGMTKTWAKELAGRNIRVNAVAPGFIETPMTEKLPEKARETALSRIPLGRFGKPEEVAQVILFLASDESSYVTGQVIGIDGGLVI

SEQ ID NO: 1971 - DNA, 738 bp, Rhizobium meliloti
  CDS (1)..(738): transl_table=11
atgttcgaattgaccgggcgcaaggcgctcgtcacgggcgcatcaggagccataggaggggctatcgcccgcgtgctgcatgctcagggcgctatcgtcggactgcacggcacccaaattgaaaaactggagacactggcaactgagcttggagaccgggtcaagctgttcccggctaatctggccaatcgagacgaagtcaaggcgcttggtcagagagcggaagccgatcttgaaggcgtcgacatcctggtcaacaatgctggcatcaccaaggatggattgttcttgcacatggcagaccccgactgggacattgtgctggaggtcaacctcaccgccatgttccgactgacccgcgagatcacccagcagatgatacgccgtcgaaatggccgcatcatcaatgtcacttcggtcgccggcgccatcggcaatccaggccagaccaattactgcgcctccaaggccggtatgatcggcttttccaagtcgctggcgcaggagatcgctacgcgaaacatcactgtcaactgcgtcgccccgggcttcatcgaatcggcaatgaccgataagctcaatcacaaacagaaggagaaaatcatggtggcgatcccgatccaccgcatgggcaccggtaccgaagtcgcgtccgccgttgcgtatctcgcttccgatcacgccgcctatgtcaccggacagaccattcacgtgaacggcggtatggcaatgatttga

SEQ ID NO: 1972 - protein, 245 aa, Rhizobium meliloti
MFELTGRKALVTGASGAIGGAIARVLHAQGAIVGLHGTQIEKLETLATELGDRVKLFPANLANRDEVKALGQRAEADLEGVDILVNNAGITKDGLFLHMADPDWDIVLEVNLTAMFRLTREITQQMIRRRNGRIINVTSVAGAIGNPGQTNYCASKAGMIGFSKSLAQEIATRNITVNCVAPGFIESAMTDKLNHKQKEKIMVAIPIHRMGTGTEVASAVAYLASDHAAYVTGQTIHVNGGMAMI

SEQ ID NO: 1973 - DNA, 846 bp, Candida albicans
  CDS (1)..(846): transl_table=12
atgagtgaagaaatcatttcatttacaaatcctgctttaggtccattaccaacaaaagctccacaattaccatcaaatgttcttgatttgttttctttaaaaggtaaagtcgcttccgtgacgggatcatctggaggaattggttgggctgtcgccgaagcatttgctcaagctggtgctgatgttgccatctggtataattcgaaaccagcagatgccaaagctgaatatttaactgaaaaatatggtgtcaaagccaaagcttataaatgtaatgtaactgatcctaatgatgtttctaaagtgattaatgaaattgaaaaagatttcggtactattgatatatttgttgctaatgctggagttgcatggactgatggaccagaaattgatgttcaaggctatgatcaatggaaaaagatcgttgattgtgatttaaatggagtttattattgtgctcataccgtgggacaaatctttaaaaagaataaatctggttcattaattattacttcatcaatgtcagggacaattgttaatatccctcaattacaagctccttataatgctgctaaagctgcatgtactcatttagccaaatcattgagtgtggaatgggctagttttggtgctagagtaaattcaatttctccagggtatatattgactgatattgctgattttgctgatccagaaatgaaaaagaaatggtggcaattgacacctttgggaagagaaggattaccacaagaattagtgggggcatatttatacttggcctcaaatgcatcaacttatactactggttcaaatattgctgttgatgggggttatacatgtccataa

SEQ ID NO: 1974 - protein, 281 aa, Candida albicans
MSEEIISFTNPALGPLPTKAPQLPSNVLDLFSLKGKVASVTGSSGGIGWAVAEAFAQAGADVAIWYNSKPADAKAEYLTEKYGVKAKAYKCNVTDPNDVSKVINEIEKDFGTIDIFVANAGVAWTDGPEIDVQGYDQWKKIVDCDLNGVYYCAHTVGQIFKKNKSGSLIITSSMSGTIVNIPQLQAPYNAAKAACTHLAKSLSVEWASFGARVNSISPGYILTDIADFADPEMKKKWWQLTPLGREGLPQELVGAYLYLASNASTYTTGSNIAVDGGYTCP

SEQ ID NO: 1975 - DNA, 1011 bp, Zea mays
  CDS (1)..(1011)
atgcacgctagcctcgcctcctacgccgcggcagctatgccggcgctggacctccgccccgagatagcgcacgcgcaccagcccgtcatgtcgccctctcaccacggctgggacggcaatggcgccacagccgtgcccacaccgatgcccaagaggctggacgggaaggtggccattgtgacgggcggcgcgcgcgggatcggcgaggccatcgtgcggctgttcgccaagcacggggcccgggtggtgatcgcggacatcgacgacgccgcgggggaggcgctggcgtcggcgctgggcccgcaggtcagcttcgtgcgctgcgacgtgtccgtggaggacgacgtccggcgcgccgtggactgggcgctgtcgcgccacggcggccgcctcgacgtctactgcaacaacgccggggtgctgggccgccagacgcgcgccgccaggagcatcctgtccttcgacgcggccgagttcgaccgcgtgctccgcgtcaacgcgctgggcgccgcgctcgggatgaagcacgcggcgcgcgccatggcgccgcgccgcgcggggagcatcgtctccgtcgccagcgtcgcggccgtgctgggcggcctcggcccgcacgcctacaccgcctccaagcacgccatcgtcgggctcaccaagaacgccgcctgcgagctgcgcgcgcacggggtccgggtcaactgcgtctcgcccttcggcgtcgccacgcccatgctcatcaacgcctggcgccagggccacgacgacgccaccgccgacgccgaccgagacctcgacctcgacctcgacgtcaccgtgcccagcgaccaggaggtggagaagatggaggaggtggtcaggggcctggccacgctcaagggccccacgctcaggcccagggacatcgccgaggcggtgctcttcctggccagcgacgaggccaggtatatatcgggccacaaccttgtcgtggacggcggcgtcaccacatccaggaacctcatcggcttgtga

SEQ ID NO: 1976 - protein, 336 aa, Zea mays
MHASLASYAAAAMPALDLRPEIAHAHQPVMSPSHHGWDGNGATAVPTPMPKRLDGKVAIVTGGARGIGEAIVRLFAKHGARVVIADIDDAAGEALASALGPQVSFVRCDVSVEDDVRRAVDWALSRHGGRLDVYCNNAGVLGRQTRAARSILSFDAAEFDRVLRVNALGAALGMKHAARAMAPRRAGSIVSVASVAAVLGGLGPHAYTASKHAIVGLTKNAACELRAHGVRVNCVSPFGVATPMLINAWRQGHDDATADADRDLDLDLDVTVPSDQEVEKMEEVVRGLATLKGPTLRPRDIAEAVLFLASDEARYISGHNLVVDGGVTTSRNLIGL

SEQ ID NO: 1977 - DNA, 792 bp, Escherichia coli
  CDS (1)..(792): transl_table=11
atgggtaaactcacgggcaagacagcactgattacgggcgcattgcagggaattggcgaaggaattgccagaacttttgcacgtcatggcgcgaacctaatcttgctggatatctcccctgagatcgaaaagctggcggacgaactgtgtggtcgtggtcatcgctgtacggcggttgtcgccgatgtgcgtgacccggcgtcggtagccgcagctatcaaacgcgcgaaggaaaaagaagggcgcattgatatcctggtgaataacgcaggcgtttgtcgtctgggcagtttcctcgatatgagcgatgacgatcgcgatttccatattgacatcaatattaaaggcgtatggaacgtcacgaaggcggtgctgccggagatgattgcccgcaaagatggtcgcattgtgatgatgtcttcagtcactggtgatatggtggccgatcctggcgaaacggcgtacgccttaacgaaagcggcgattgttggcctgacaaaatcgctggcggtggagtacgcgcagtctggtattcgcgttaacgccatttgcccgggatacgtgcgcacaccaatggcggaaagcattgcccgccagtcgaacccggaagatccagagtcggtgctgactgaaatggcgaaagcaatcccgatgcgtcgcctcgccgatccgctggaagtcggcgaactggcggccttcctcgcatcggatgaatccagctatttaaccggtacacagaatgtgattgatggcggcagcacactgccggagacggttagcgtcggtatctga

SEQ ID NO: 1978 - protein, 263 aa, Escherichia coli
MGKLTGKTALITGALQGIGEGIARTFARHGANLILLDISPEIEKLADELCGRGHRCTAVVADVRDPASVAAAIKRAKEKEGRIDILVNNAGVCRLGSFLDMSDDDRDFHIDINIKGVWNVTKAVLPEMIARKDGRIVMMSSVTGDMVADPGETAYALTKAAIVGLTKSLAVEYAQSGIRVNAICPGYVRTPMAESIARQSNPEDPESVLTEMAKAIPMRRLADPLEVGELAAFLASDESSYLTGTQNVIDGGSTLPETVSVGI

SEQ ID NO: 1979 - DNA, 792 bp, Salmonella typhi
  CDS (1)..(792): transl_table=11
atgggtaaactcacgggcaagacagcattgattacgggcgcatcgcagggcattggcgaagggatcgctcgcgtattcgcacgccacggcgcgaacttaatcttgctggatatctccgatgagattgaaaagctggcggatgagctgggcgggcgcgggcatcgctgtactgccgttaaagccgacgtcagagattttgcttcggtgcaggcggcggttgcgcgcgccaaagagactgaaggtagaattgatattttggtgaataacgctggcgtgtgccgtctgggcaacttcctcgatatgagtgaagaagatcgcgatttccacattgatattaatattaaaggtgtctggaacgtcaccaaagccgtcctgccggagatgatcaaacgtaaagatggccgcattgtgatgatgtcttccgtcacgggagatatggtggcggacccgggtgaaacggcctatgcgctgtcaaaagccgccattgtcggtttaaccaaatcgctggcggtagagtacgcgcagtccggtattcgtgtgaatgccatttgccccggttatgtaagaacgccgatggcggaaagcattgcccgtcagtctaaccctgacgatccggaatcggtattaacggaaatggcaaaagccattccgctacgccgtcttgccgatccgctggaagtaggggaactggcggcatttctggcttccgatgagtccagctatcttaccggaacgcaaaacgtcattgatggcggcagtaccctgcctgaaagcgtaagcgtaggcgtctga

SEQ ID NO: 1980 - protein, 263 aa, Salmonella typhi
MGKLTGKTALITGASQGIGEGIARVFARHGANLILLDISDEIEKLADELGGRGHRCTAVKADVRDFASVQAAVARAKETEGRIDILVNNAGVCRLGNFLDMSEEDRDFHIDINIKGVWNVTKAVLPEMIKRKDGRIVMMSSVTGDMVADPGETAYALSKAAIVGLTKSLAVEYAQSGIRVNAICPGYVRTPMAESIARQSNPDDPESVLTEMAKAIPLRRLADPLEVGELAAFLASDESSYLTGTQNVIDGGSTLPESVSVGV

SEQ ID NO: 1981 - DNA, 744 bp, Mycobacterium tuberculosis
  CDS (1)..(744): transl_table=11
atggcgtcattgctgaacgctcggactgccgtaattaccggcggtgcacaagggctggggttagctatcggccagcgattcgttgccgagggtgcacgggttgtgcttggtgatgtgaatctcgaagcgaccgaggtcgcagccaagcggctgggcggcgatgacgttgctctggcggtgcggtgcgatgtgactcaagccgacgacgtcgacatcctcatccggaccgctgtcgagcgtttcggcggtctggatgtcatggtcaacaacgccgggatcacccgcgacgcaacgatgcgcacgatgaccgaagagcagttcgatcaggtcatcgcggtgcatctgaagggaacatggaacggtacccggctggcggcggcaatcatgcgggaacgcaagcggggcgccattgtgaacatgtcttcggtgtcaggcaaggtcggtatggtcggccaaaccaactactcagcggccaaggccggcatcgtaggaatgaccaaggcggccgccaaagaacttgcacacctcggcattcgggtaaacgcaatagctccggggttgatccgttcagcgatgacagaagctatgccgcaacgcatttgggaccagaagcttgccgaagttccgatgggtcgcgccggcgagcccagcgaagtcgctagcgtggccgtgttcttggcttcggatctatcctcgtacatgaccggcaccgtgttggacgtgactggcggccggttcatatga

SEQ ID NO: 1982 - protein, 247 aa, Mycobacterium tuberculosis
MASLLNARTAVITGGAQGLGLAIGQRFVAEGARVVLGDVNLEATEVAAKRLGGDDVALAVRCDVTQADDVDILIRTAVERFGGLDVMVNNAGITRDATMRTMTEEQFDQVIAVHLKGTWNGTRLAAAIMRERKRGAIVNMSSVSGKVGMVGQTNYSAAKAGIVGMTKAAAKELAHLGIRVNAIAPGLIRSAMTEAMPQRIWDQKLAEVPMGRAGEPSEVASVAVFLASDLSSYMTGTVLDVTGGRFI

SEQ ID NO: 1983 - DNA, 756 bp, Thermotoga maritima
  CDS (1)..(756): transl_table=11
atgaatttccagggaaaagtggttttaataacaggagcaggttccggtattggaaagaaagcagccgttatgttcgcagaaagaggggcaaaagtagcgatcaacgatatctctgaagaaaaaggaaaagaaactgtggagctgataaagagcatgggaggagaagctgcgtttatcttcggagatgtagcgaaagatgcagaacagatagtgaagaaaacggtggaaacgttcggaaggctcgacatcctggtgaacaacgctggcatcgtaccttatggaaacatagaagagacttcggaggaagattttgataaaacaatggctgtgaatgtcaaagggccttttcttctctcaaaatatgccgttgagcagatgaaaaagcagggcggaggagtcattgtaaacgtttcctccgaagcaggactcataggaattccaagaaggtgtgtctacagtgtttcaaaagctgcactcctgggacttacaagatctcttgccgtcgattacgtcgattatggaatcagggtcaacgcggtgtgcccgggtaccactcagtctgagggactcatggcgagggtgaaggcttctccaaatccagaagaactcctgaaaaaaatgacctccaggatccctatgaagagactgggaaaagaggaggaaatcgccttcgcgatcctctttgcagcgtgtgacgaagccggatttatgacgggcagtatcataaacatagatggaggttctaccgctgtatga

SEQ ID NO: 1984 - protein, 251 aa, Thermotoga maritima
MNFQGKVVLITGAGSGIGKKAAVMFAERGAKVAINDISEEKGKETVELIKSMGGEAAFIFGDVAKDAEQIVKKTVETFGRLDILVNNAGIVPYGNIEETSEEDFDKTMAVNVKGPFLLSKYAVEQMKKQGGGVIVNVSSEAGLIGIPRRCVYSVSKAALLGLTRSLAVDYVDYGIRVNAVCPGTTQSEGLMARVKASPNPEELLKKMTSRIPMKRLGKEEEIAFAILFAACDEAGFMTGSIINIDGGSTAV

SEQ ID NO: 1985 - DNA, 822 bp, Bacillus subtilis
  CDS (1)..(822): transl_table=11
atgggaagacttgaaaacaaaacagcagttatcacaggcgccgcgacaggcattggtcaagcgacggcggaggtttttgccaatgaaggcgcgcgtgtgatcatcggagatatcaataaagatcaaatggaagaaacagttgacgcaatcagaaaaaacggaggacaggccgaatcctttcacctcgatgtgtcagatgaaaacagtgtgaaagcatttgctgatcaaatcaaggatgcatgcggaacgattgatattctgtttaataatgccggcgttgatcaggaaggcggaaaggtgcacgaatatccggttgacctgtttgaccgcattatcgccgtcgacctgcgcggcacattcctttgcagcaaatatttgattccgctcatgctcgaaaatggaggctccatcatcaacacctcctccatgtcaggccgtgccgcggaccttgaccgctccggctacaacgccgcaaaaggcggtatcaccaacctgacaaaggcaatggcaatcgactacgcacgaaacggcatccgcgtcaattccatttcaccgggcacgatcgaaacaccgctgattgacaaattagcaggcacaaaagaacaggaaatgggcgaacaattccgcgaagccaacaaatggatcacgccgctcggacgtcttggccagcccaaagaaatggcaacagtggcactgttcctcgcatcagacgacagctcatacgtcacaggagaagacatcaccgcagacggcggcatcatggcgtacacatggcctgggaagatgctgattgaggagaaatggaaggaagaaacgaaataa

SEQ ID NO: 1986 - protein, 273 aa, Bacillus subtilis
MGRLENKTAVITGAATGIGQATAEVFANEGARVIIGDINKDQMEETVDAIRKNGGQAESFHLDVSDENSVKAFADQIKDACGTIDILFNNAGVDQEGGKVHEYPVDLFDRIIAVDLRGTFLCSKYLIPLMLENGGSIINTSSMSGRAADLDRSGYNAAKGGITNLTKAMAIDYARNGIRVNSISPGTIETPLIDKLAGTKEQEMGEQFREANKWITPLGRLGQPKEMATVALFLASDDSSYVTGEDITADGGIMAYTWPGKMLIEEKWKEETK

SEQ ID NO: 1987 - DNA, 774 bp, Bacillus subtilis
  CDS (1)..(774): transl_table=11
atgagaaaacaagtcgctttggtgacaggggctgccggcggaatcagattcgaaatcgcaagagaattcgcccgggaaggtgccagcgtcatcgtttcagacctccgtccggaagcatgtgaaaaagcagcctccaagcttgcagaagaaggctttgacgcggcggccattccgtatgatgtgacaaaggaagcgcaagttgctgatacggtgaacgtcatccaaaaacaatacggccgcttggatattctggtgaacaatgccggtattcagcacgtcgctccgattgaagagtttccgacagacacctttgaacagctgatcaaggtcatgctgacggctccctttattgcaatgaagcatgtttttccgatcatgaaaaaacagcagtttggcagaatcattaatattgcgtctgttaatggattagtgggctttgcagggaaatccgcttataatagcgccaagcacggcgtcattggactcacaaaagtaggggcgctggaaggcgcgccccacggcataacagtcaatgcgctctgtccgggttatgtcgatacccagcttgtacgcaatcagcttagcgatctatcgaaaactagaaatgtcccttacgactctgtacttgaacaagtcatttttccgcttgtgccgcaaaagcgactgctttccgtcaaggaaattgcggattatgccgtgtttttggcaagcgagaaggcgaagggcgtcactgggcaggctgtcgtccttgatgggggctacaccgcacaatga

SEQ ID NO: 1988 - protein, 257 aa, Bacillus subtilis
MRKQVALVTGAAGGIRFEIAREFAREGASVIVSDLRPEACEKAASKLAEEGFDAAAIPYDVTKEAQVADTVNVIQKQYGRLDILVNNAGIQHVAPIEEFPTDTFEQLIKVMLTAPFIAMKHVFPIMKKQQFGRIINIASVNGLVGFAGKSAYNSAKHGVIGLTKVGALEGAPHGITVNALCPGYVDTQLVRNQLSDLSKTRNVPYDSVLEQVIFPLVPQKRLLSVKEIADYAVFLASEKAKGVTGQAVVLDGGYTAQ

SEQ ID NO: 1989 - DNA, 1002 bp, Oryza sativa
  CDS (1)..(1002)
atgcacactaccctcgcctcctacgcccaggatctcgccatgcctgccgccgcactcgacctcctccctgacaaggcgcaccagccgtccatggcgccgtcgctccacgcctgggactcccccaatggcgcccccactcccatgcccaagaggctggaagggaaggtggccattgtcaccggcggggcgagggggatcggggaggcgatcgtgaggctgttcgtgaagcacggggccaaggtggtgatcgcggacatcgacgacgcggcgggcgaggcgctggcggcggcgctggggccgcacgtcgggttcgtgcggtgcgacgtgtcggtggaggaggacgtggagcgcgccgtcgagcgcgccgtggcgcggtacgggcggttggacgtgctgtgcaacaacgccggggtgctgggccgccagacgcgcgccgccaagagcatcctgtcgttcgacgccggggagttcgaccgcgtgctccgcgtcaacgcgctgggcgccgcgctcggcatgaagcacgcggcgctcgccatgacccagcgccgcgccggcagcatcatctccgtcgccagcgtcgccggcgtgctcggcggcctcggcccgcacgcctacaccgcctccaagcacgccatcgtggggctcaccaagaacgccgcctgcgagctcggcgcccacggcatccgcgtcaactgcatctcccccttcggcgtcgccaccccgatgctcatcaacgcctggcgccagggccacgacgcctccaccgccgacgacgccgacgccgacatcgacctcgacatcgccgtgcccagcgaccaggaggtggagaagatggaggaggtggtcaggggcctcgccacgctcaagggcgcgacgctgagacccagggacatcgccgaggcggcgctcttcctcgccagcgacgactccagatacatttccggccacaacctcgtcgtcgacggcggcgtcaccacctccagaaacctaattggcctttga

SEQ ID NO: 1990 - protein, 333 aa, Oryza sativa
MHTTLASYAQDLAMPAAALDLLPDKAHQPSMAPSLHAWDSPNGAPTPMPKRLEGKVAIVTGGARGIGEAIVRLFVKHGAKVVIADIDDAAGEALAAALGPHVGFVRCDVSVEEDVERAVERAVARYGRLDVLCNNAGVLGRQTRAAKSILSFDAGEFDRVLRVNALGAALGMKHAALAMTQRRAGSIISVASVAGVLGGLGPHAYTASKHAIVGLTKNAACELGAHGIRVNCISPFGVATPMLINAWRQGHDASTADDADADIDLDIAVPSDQEVEKMEEVVRGLATLKGATLRPRDIAEAALFLASDDSRYISGHNLVVDGGVTTSRNLIGL

SEQ ID NO: 1991 - DNA, 960 bp, Oryza sativa
  CDS (1)..(960)
atgaccgccgtcgacttgatgcctgcagctgacgacgacaacaacaagcagtcatccaccggcctcctccaccaccaccagctccccgccgccgccgacaacgccatactacacaataccaggcggctggaggggaaggtggccatcgtcaccggcggctcgcgtggcatcggcgaagccatcgtaagggccttcgttcaccacggcgctctcgtcgtcgtcgccgacatcgacgacgccgggggccacgcgctggccgccgcgctcggcccgcacgcctgcacctacgtccactgcgacgtggccgaggaggccgacgtggaacgcgccgtcgccaccacgctggagcagcacggccgcctggacgtgctgtgcaacaacgccggggtgctgggccgccagacgcgcggcgccaagagcatcgcgtccctcgacgccgccgagttcgcccgcgtgctgcgcgtcaacgcgctgggcgccgccctcggaatgaagcacgcggcgcgtgccatggtgccccgccgctccgggagcatcgtgtcggtggcgagcgtggcgggcgtgctgggcggcctcggcccgcacgcgtacacggcctccaagcacgccctagtggggctcaccaagaacgccgcctgcgagctcggggagcacggcatccgcgtcaactgcatctcccccttcggcgtggcgacgccgatgctggtgaacgcgtggcggcaggggcagggaggagatcacgcggatgaggatcaggcggcggcgagcgaggaggaggaggtggagaagatggaggagatggtgcggaggctggcgacgctcaaggggccgacgctgcgggcaggcgacatcgcggaggcggcggtgttcctggccagcgacgagtccaggtacgtgtccggccacaacctcgtcgtcgacggcggcgtcaccacctccagaaacgtcatcggcctctga

SEQ ID NO: 1992 - protein, 319 aa, Oryza sativa
MTAVDLMPAADDDNNKQSSTGLLHHHQLPAAADNAILHNTRRLEGKVAIVTGGSRGIGEAIVRAFVHHGALVVVADIDDAGGHALAAALGPHACTYVHCDVAEEADVERAVATTLEQHGRLDVLCNNAGVLGRQTRGAKSIASLDAAEFARVLRVNALGAALGMKHAARAMVPRRSGSIVSVASVAGVLGGLGPHAYTASKHALVGLTKNAACELGEHGIRVNCISPFGVATPMLVNAWRQGQGGDHADEDQAAASEEEEVEKMEEMVRRLATLKGPTLRAGDIAEAAVFLASDESRYVSGHNLVVDGGVTTSRNVIGL

SEQ ID NO: 1993 - DNA, 897 bp, Oryza sativa
  CDS (1)..(897)
atgatgcttaacgcagcagccaaaaaacttgtcagggggaagagcatagctgctcacgtattcttctcctcgtcgtcaagatccagaaagttggatggcaaagtggccgtgataaccggcgcagcgagcggcatcggcgaggccacggcgaaggagttcgtcaggaatggcgccaaggttatcattgccgatatcaaggatgatctcggccgcgccgtggccggcgagctcggcgccgacgccgcgtcgtacacgcactgcgacgtcaccgtcgagaaggatgtcgcctcggccgtcgacctcgccgtggcgcgacacggccgcctcgacgtcgtgtacagcaacgccgccatcgcgggtggcgcgcctccggccacgctcgcggcgctcgacctcgacgagtacgaccgcgtcatggccgtcaacgccaggtccatgttggcgtgcgtcaagcacgcggcgcgcgtcatggcgccccgccgcgccggttgcatcctctgcacggccagcacggcggcggtgctcggcggcatggcggcgccggcgtactccatgtcgaaggcggccgtcgtcggcatggtgcggacggtggcgaggcagctggcgcgcgacggcgtgcgggtgaacgccatctcgccgcacgcagtcccgacgccgatggcgataggtctcttctccgagacgttcccggcggcgaccgcggaggaggtgaggaggatggtgacgagggagatgcaggagctggaaggggcgtcgctggaggtggaagacgtggcgagggcggccgtcttcttggcgtccgacgaggccaagttcatcaccggccacaacctcgtcgtcgacggcgggttcacggcaggcaaggtgctcgtccgggatcctccgggctctgcttga

SEQ ID NO: 1994 - protein, 298 aa, Oryza sativa
MMLNAAAKKLVRGKSIAAHVFFSSSSRSRKLDGKVAVITGAASGIGEATAKEFVRNGAKVIIADIKDDLGRAVAGELGADAASYTHCDVTVEKDVASAVDLAVARHGRLDVVYSNAAIAGGAPPATLAALDLDEYDRVMAVNARSMLACVKHAARVMAPRRAGCILCTASTAAVLGGMAAPAYSMSKAAVVGMVRTVARQLARDGVRVNAISPHAVPTPMAIGLFSETFPAATAEEVRRMVTREMQELEGASLEVEDVARAAVFLASDEAKFITGHNLVVDGGFTAGKVLVRDPPGSA

SEQ ID NO: 1995 - DNA, 855 bp, Brassica napus; identical to SEQ ID NO: 1180
  CDS (1)..(855)

SEQ ID NO: 1996 - protein, 284 aa, Brassica napus; identical to SEQ ID NO: 1181

SEQ ID NO: 1997 - DNA, 903 bp, Brassica napus; identical to SEQ ID NO: 1182
  CDS (1)..(903)

SEQ ID NO: 1998 - protein, 300 aa, Brassica napus; identical to SEQ ID NO: 1183

SEQ ID NO: 1999 - DNA, 789 bp, Brassica napus
  CDS (1)..(789)
atggatagccggtggagtcttcgaggtatgacaggtcttgtaaccggtggaaccaagggaattgggtatgcgatagtggaggaacttgctggttttggtgcaagagttcacacgtgtgccagagaccaaactctgcttgatgaatgcttaaatgaatggaaagccaaagggtatcaagtcactggctcagtctgtgatgtttcctctcgacctcagagagatgagttgatgaagactgtctcttctctattcagtggcaaactcaacatccttatcaacaatgttggtacccttacgtcaaagccggctacagagtttacagcacaagatttctcaagtcaaatagctaccaatttggagtctgcttatcatttatctcaattggcccatcctttacttaaggcatctggatttggtagcattgtgttcatgtcttcagtatgtggggttgtatcagccggtaccgtatccatatacagcttaacaaaaggaggcatgaatcaattggcaagaaacttggcatgtgaatgggcaagtgatggcataagggctaactctgtagctccttgggtgactagaactcctcttgcccaagatcgtcttgatgacaagaaatatgctgaagctatctgctcaagaaccccattaggccgtacgtgtgagccgagtgaggttgcctcgctggttacgtttctttgtctccctgcagcttcttatataacaggacaaaccatttttattgatggtggtctcactgttaatggcttctcctacaagccagaagtttaa

SEQ ID NO: 2000 - protein, 262 aa, Brassica napus
MDSRWSLRGMTGLVTGGTKGIGYAIVEELAGFGARVHTCARDQTLLDECLNEWKAKGYQVTGSVCDVSSRPQRDELMKTVSSLFSGKLNILINNVGTLTSKPATEFTAQDFSSQIATNLESAYHLSQLAHPLLKASGFGSIVFMSSVCGVVSAGTVSIYSLTKGGMNQLARNLACEWASDGIRANSVAPWVTRTPLAQDRLDDKKYAEAICSRTPLGRTCEPSEVASLVTFLCLPAASYITGQTIFIDGGLTVNGFSYKPEV

SEQ ID NO: 2001 - DNA, 786 bp, Brassica napus
  CDS (1)..(786)
atgtcggaactaagactggatggcaagatcgtaattataacaggcggagccagcggtatcggagccgaggcggctaggctattcaccgaccacggagctaaagtggtcatagtcgatatacaagaggagctaggccaaaacgtcgccgtttccatcgggaaagagagagccagtttctaccgttgcgacgtaacagaggagacagaagtggagaacgccgtcaagttcaccgtcgagaagcacggaaagctcgacgttcttttcagcaacgccggcgtcttggacccgcggggaagcatcctcgacttggatcttgaccggttcgaccgcataatggcggttaacgtgcgcggcgcggctgcgtttatcaaacacgcggcacgtgcgatggtggagaaaggcacgcgtgggtctatcgtgtgtaccacgagcgtgtcgtcggagattggtggtgggagacgtcacgggtacacggcgtctaaacatggactgctcgggctgatcagaacggcgtgtggggagctggggaagtatgggattagagtcaacggtgtggcaccgtacgcgctcgcgacgccgttgactagccacgacgaggaaacggcgaggcaggtggaggaagaatttgcggccaagggggtgctcaagggtgtggtgcttaacgctcgccacgtggcgcaagtggctctgtttttggcttctgatgagtcggtttatgtcagtggtcagaatttggcggtggatggaggttatagtatgtgtcgttcaggcaatgttcaaatttag

SEQ ID NO: 2002 - protein, 261 aa, Brassica napus
MSELRLDGKIVIITGGASGIGAEAARLFTDHGAKVVIVDIQEELGQNVAVSIGKERASFYRCDVTEETEVENAVKFTVEKHGKLDVLFSNAGVLDPRGSILDLDLDRFDRIMAVNVRGAAAFIKHAARAMVEKGTRGSIVCTTSVSSEIGGGRRHGYTASKHGLLGLIRTACGELGKYGIRVNGVAPYALATPLTSHDEETARQVEEEFAAKGVLKGVVLNARHVAQVALFLASDESVYVSGQNLAVDGGYSMCRSGNVQI

SEQ ID NO: 2003 - DNA, 1044 bp, Brassica napus
  CDS (1)..(1044)
atggctacttcgagtggtttccatatctcttcctctccttttctcaggcttcgctcttcctccgtcgcatacgccgctcaacctccgtttctctccccttgtaacggtcgttcactagcagaaagcttcggtctcgcaactgtaactgtttcgcgccaaaacctctcggtttctccgccgtctgcggtggtggaagctcgcatttcggggacaagagagccgatgacgcctccctataacgtcttgatcactggctcgaccaaaggtataggacatgcgttagctagagagtttctgaaagcaggagacaacgttgtcatatgttccagatcagctgaacgagttgagtctgttgttaagagtcttaaggaagaatatggggagcatgtgtggggaactaagtgtgatgttagagaagggaaggatgtgaaggatcttgtatcttattgtcagaagaatcttaaatacattgatatttggattaataatgctggatctaatgcatacagctttaaacctttgtctgaggcctctgatgaggatcttattgaagttgtgaaaacaaacactcttgggctgatgttatgttgccgagaggcaatgaatatgatgctgacccaatctcggggtggtcatatcttcaatattgatggagctggctcagatgggagaccaacacccaggtttgctgcatatggtgcaacaaaacggagtgttgttcacctgacaaagtcattacaagcagagttgcagatgcaagatgtcaaaaatgttgtggtacacaatctatcgcctggaatggtcacaactgatctactcatgtctggagctacaactaaacaagccaaattcttcatcaatgttttggctgagccagctgaagtggttgctgagtatcttgtcccgaacattagagcaataccagctagtggatctatgaagccgacttacatccgtttcctaaccggaatcaaagcctataccaaaatattctcaagagttgcattgggagcaaggaagaatagatacgtgactgaagagtag

SEQ ID NO: 2004 - protein, 347 aa, Brassica napus
MATSSGFHISSSPFLRLRSSSVAYAAQPPFLSPCNGRSLAESFGLATVTVSRQNLSVSPPSAVVEARISGTREPMTPPYNVLITGSTKGIGHALAREFLKAGDNVVICSRSAERVESVVKSLKEEYGEHVWGTKCDVREGKDVKDLVSYCQKNLKYIDIWINNAGSNAYSFKPLSEASDEDLIEVVKTNTLGLMLCCREAMNMMLTQSRGGHIFNIDGAGSDGRPTPRFAAYGATKRSVVHLTKSLQAELQMQDVKNVVVHNLSPGMVTTDLLMSGATTKQAKFFINVLAEPAEVVAEYLVPNIRAIPASGSMKPTYIRFLTGIKAYTKIFSRVALGARKNRYVTEE

SEQ ID NO: 2005 - DNA, 777 bp, Brassica napus
  CDS (1)..(777)
atgtcaggaagcagaagattggatggcaaagtcgtgattataacaggcggagccagcgggattggagcagaatctgctaggctattcactgaccacggagctaaagtggttattgttgacatacaagaggagttaggccagaacgttgccgtttcaataggtaaagacaaagcaagttattacaaatgcgatatcacaaacgaaacagaggtagagaatgctgttaagttcaccgtcgaaatgcatggaaaactcgacgttctgttcagcaacgccggcgtcttagatacgccgggaagcatcctcgacttgaatctcgaacattttgaccgtgtaatgggggttaacgttcgcggtgcagctgcgtttatcaaacatgcagcacgtgccatggtgggtagtggcacacgtggttccattgtttgtacgactagcgttacggcggagattggtggtcagggacctcatggatacacagcgtcgaagcatgccctcctggggctgattaagtcagcttgtggtgagttggggaaacatggcattagagtaaacggcgtggcgccgtttgcggtggcgacgagtatgactagccgtgatgaggagacggcgaagcaggtggagggatattgtgaagccgtgggaattctgaagggtgttgcgttgaaacccaatcacgtggcgaaggctgctttgtttctagcttctgatgattctatttatattagtgggcataatctagttttggacggtggatttagcgtcgttaagcctctttaa

SEQ ID NO: 2006 - protein, 258 aa, Brassica napus
MSGSRRLDGKVVIITGGASGIGAESARLFTDHGAKVVIVDIQEELGQNVAVSIGKDKASYYKCDITNETEVENAVKFTVEMHGKLDVLFSNAGVLDTPGSILDLNLEHFDRVMGVNVRGAAAFIKHAARAMVGSGTRGSIVCTTSVTAEIGGQGPHGYTASKHALLGLIKSACGELGKHGIRVNGVAPFAVATSMTSRDEETAKQVEGYCEAVGILKGVALKPNHVAKAALFLASDDSIYISGHNLVLDGGFSVVKPL

SEQ ID NO: 2007 - DNA, 828 bp, Glycine max; identical to SEQ ID NO: 1186
  CDS (1)..(828)

SEQ ID NO: 2008 - protein, 275 aa, Glycine max; identical to SEQ ID NO: 1187

SEQ ID NO: 2009 - DNA, 987 bp, Brassica napus; identical to SEQ ID NO: 1188
  CDS (1)..(987)

SEQ ID NO: 2010 - protein, 328 aa, Brassica napus; identical to SEQ ID NO: 1189

SEQ ID NO: 2011 - DNA, 987 bp, Brassica napus; identical to SEQ ID NO: 1190
  CDS (1)..(987)

SEQ ID NO: 2012 - protein, 328 aa, Brassica napus; identical to SEQ ID NO: 1191

SEQ ID NO: 2013 - DNA, 897 bp, Glycine max
  CDS (1)..(897)
atggaatcaccgttcagaccagagattctgaagggaaaggttgctctaatcaccggtggagcctccggaatcggattcgaaatttccacccaattcggcaaacatggagcctcggtcgcgctcatgggccgccgcaagcaagttcttcagtccgctgtctccgttctccaatccctcgccattcccgcggttgggtttgagggggatgtgcggaagcaagaggatgcggtgagggtggtggaatcgactttcaagcattttggaaggattgatatacttgtgaatgctgcagctgggaactttctcgtttctgcagaggatttgtccccaaatggctttcggacagttctggacattgattctgttggcacattcacaatgtgccatgaagcactaaaatatctcaaaaaggggggagaaggaaggagcaactcttctagtgggggatcaataataaacattagtgctaccttgcattacacagcttcttggtatcaaattcacgtgtctgcagcaaaggctgcagttgatgccactacgagaaacttggcactagaatggggaacagactatgatattagagtcaatgggattgcaccaggtccaataagtgacacccctggcatgagtaaactggctcctgatgaaataagtagcaaagccagagattacatgccgctgtataaacttggggagaagtgggatattgccatggctgcacttttcctagtatcagatgcaggaaaattcattaatggcgacattatgattgttgacggaggactttggctgagtcggcctcgccatttagcaaaagaggctgtgaagcaggtatctcgatcagtagaaaacagatccagaaatgcatctgtcagtgttccaaaaagcaagctgtga

SEQ ID NO: 2014 - protein, 298 aa, Glycine max
MESPFRPEILKGKVALITGGASGIGFEISTQFGKHGASVALMGRRKQVLQSAVSVLQSLAIPAVGFEGDVRKQEDAVRVVESTFKHFGRIDILVNAAAGNFLVSAEDLSPNGFRTVLDIDSVGTFTMCHEALKYLKKGGEGRSNSSSGGSIINISATLHYTASWYQIHVSAAKAAVDATTRNLALEWGTDYDIRVNGIAPGPISDTPGMSKLAPDEISSKARDYMPLYKLGEKWDIAMAALFLVSDAGKFINGDIMIVDGGLWLSRPRHLAKEAVKQVSRSVENRSRNASVSVPKSKL

SEQ ID NO: 2015 - DNA, 816 bp, Glycine max; identical to SEQ ID NO: 1192
  CDS (1)..(816)

SEQ ID NO: 2016 - protein, 271 aa, Glycine max; identical to SEQ ID NO: 1193

SEQ ID NO: 2017 - DNA, 795 bp, Glycine max
  CDS (1)..(795)
atggctgaaacaaagttgagctttaaggacaaaagatggtcactccatgggatgactgctctagtcacaggagccacccgcggcatagggcatgccattgttgaagaattggcagaatttggggcagctgttcatatttgtgcacggaaccaagatgatattgataaatgtttggaagagtggaaaagcaagggacttactgtgacgagttcagtatgtgatttacaatgttctgaccaacgtataagattaatggaaattctttcctccatcttccacggaaagctcaatattttagtgaacaatgctgcgacaactataacaaagaaaataatagattacactgcagaagatatatcaaccataatgggtactaattttgagtccgtttatcatttgactcaacttgcacacccgcttctaaaagaatctggacaaggaagcatagtatctatttcgtccattgcaggtttaaaagcccttcccgttttctctgtttatgcagcttccaaaggagccatgaatcaattcaccaaaaacttagcattggaatgggcaaaggataatattcgtgcaaatgctgtggcacctggacctgttatgacaaaacttttggactctatcatgaattcttctggaggggatgagtctgtggatggaatagtgtctcaaacacttgttggtcgcatgggagaagctaaagagatatcagcattagttgcctttctttgccttccagctgcatcatacatcactggacaggttatatgtgctgatgggggtttcacaacttag

SEQ ID NO: 2018 - protein, 264 aa, Glycine max
MAETKLSFKDKRWSLHGMTALVTGATRGIGHAIVEELAEFGAAVHICARNQDDIDKCLEEWKSKGLTVTSSVCDLQCSDQRIRLMEILSSIFHGKLNILVNNAATTITKKIIDYTAEDISTIMGTNFESVYHLTQLAHPLLKESGQGSIVSISSIAGLKALPVFSVYAASKGAMNQFTKNLALEWAKDNIRANAVAPGPVMTKLLDSIMNSSGGDESVDGIVSQTLVGRMGEAKEISALVAFLCLPAASYITGQVICADGGFTT

SEQ ID NO: 2019 - DNA, 852 bp, Glycine max; identical to SEQ ID NO: 1194
  CDS (1)..(852)

SEQ ID NO: 2020 - protein, 283 aa, Glycine max; identical to SEQ ID NO: 1195

SEQ ID NO: 2021 - DNA, 810 bp, Glycine max; identical to SEQ ID NO: 1196
  CDS (1)..(810)

SEQ ID NO: 2022 - protein, 269 aa, Glycine max; identical to SEQ ID NO: 1197

SEQ ID NO: 2023 - DNA, 810 bp, Glycine max
  CDS (1)..(810)
atggctagtgtttcttcggttttagctccatttagaaggcttgatgggaaggtggcgattatcactggtggtgcgagtggtctaggtgcagccactgcaagactcttctctaagcatggagcatatgtagtcatagctgatattcaagacgacttgggtctctctgttgccaaagagttagaatctgcttcctatgtccattgcgatgtgacaaaggaagaggacgttgaaaactgcgtgaacacaacggtttccaagtatggcaaattagatatcatgtttaacaatgcaggtgtatctgatgagatcaaaacaagcattcttgacaacaacaagtctgattttgagagagtgataagtgttaacttggttggtccttttctgggaacaaagcatgctgcaagggtcatgattcctgctaaaaagggatgcataatcaacacagctagtgttgctggatgcataggtggaggtgctacacatgcctacacaagttcaaagcacgcactaattggactgacaaaaaacactgcggtggagcttggacaacatggtattagggtaaattgtttgtcaccttatcttgttgtcacaccgttaagtaagaaatatttcaatattgatgaagacaaaattcgtgagatatattcaaacctaaaaggtgctcatcttgtgcctaacgatgtggccgaagctgctctttacttggcaggtgatgagtccaagtatgttagtggtcacaatcttgtgatagatggagggtacactgatgtaaatgcaggatttaccgtgtttgggcagtctcagtaa

SEQ ID NO: 2024 - protein, 269 aa, Glycine max
MASVSSVLAPFRRLDGKVAIITGGASGLGAATARLFSKHGAYVVIADIQDDLGLSVAKELESASYVHCDVTKEEDVENCVNTTVSKYGKLDIMFNNAGVSDEIKTSILDNNKSDFERVISVNLVGPFLGTKHAARVMIPAKKGCIINTASVAGCIGGGATHAYTSSKHALIGLTKNTAVELGQHGIRVNCLSPYLVVTPLSKKYFNIDEDKIREIYSNLKGAHLVPNDVAEAALYLAGDESKYVSGHNLVIDGGYTDVNAGFTVFGQSQ

SEQ ID NO: 2025 - DNA, 915 bp, Triticum aestivum
  CDS (1)..(915)
atggcatcaaccatgccgttctccgctggcctcgtttctcttgggtctccgccgccgcagcgccacagctgcaggttccagcgatatcatcgaccgggcactctcatttcatcagctataaggcatggtcaggttaaagctatggctggagtgagcatggatggcttggcacagcctcaagccccagttgcagtggttaccggagcatcgagggggattgggcgagcgatagctgtggctcttggcaaagcagggtgcaaggtagttgtgaactatgccaagtcaggcatggaagctgaagaagtgtgcagagagatcatggagtccggtggcactgccatctccttttcagccgatgtctccattgaagccgaggttgaaaccatgatgagagcggtaattgatacttggggaacgctggacgtgatggtgaacaatgcagggatcacgcgagatgctctgctaatgcggatgaagaaggcgcagtggcaggaagtagtggacgtaaaccttaccggtgtttacctctgcgcccaggctgcggcggcagtgatgatgaagaggaagaagggaagaatcatcaacatcgcctcagttgccgggatgatcggcaacattggccaggccaactactgcgccgccaaggccggggtgattggattgaccaaggccatggcccgggaatacggtggcagaaacataaatgtgaatgcagtttccccgggctgggtcgcgtctgacatgaccgcaaaactaggcgacgacatcgaacgaaaggcgctcgagacaataccactaggacgattcggcaagccagaggagattgctggactggtggagttcttggctgttcatccggctgcaagctacatgaccgggcaggtgctcccagttgatggtggcctgtccatttga

SEQ ID NO: 2026 - protein, 304 aa, Triticum aestivum
MASTMPFSAGLVSLGSPPPQRHSCRFQRYHRPGTLISSAIRHGQVKAMAGVSMDGLAQPQAPVAVVTGASRGIGRAIAVALGKAGCKVVVNYAKSGMEAEEVCREIMESGGTAISFSADVSIEAEVETMMRAVIDTWGTLDVMVNNAGITRDALLMRMKKAQWQEVVDVNLTGVYLCAQAAAAVMMKRKKGRIINIASVAGMIGNIGQANYCAAKAGVIGLTKAMAREYGGRNINVNAVSPGWVASDMTAKLGDDIERKALETIPLGRFGKPEEIAGLVEFLAVHPAASYMTGQVLPVDGGLSI

SEQ ID NO: 2027 - DNA, 804 bp, Glycine max
  CDS (1)..(804)
atggctgaggcaagcattggcagcaaaagcagcagatggtctttacagggaatgacagctctcgtcaccggtggatccaaaggaatcggatatgctatcgtggaggagttggcacagcttggagccactgtgcacacttgcgctcggaacgaagctgaactcaatgaatccttaaatgaatggaacacaaaaggatacagagtaactggttccgtctgtgacgtggcgtctcgtgcagaaagacaagacctcattgctagactctccaatgagtttaatggcaaactcaatatccttgtaaacaacgtgggaacaaacgtaccgaaacatacccttgatgttacggaggaagacttctcatttctgataaatacgaatcttgaatctgcttaccacctaagccagcttgcacatcctctcctgaaagcttcagaggctgcaaacatcatttttatatcctccattgctggtgtgctatcaataggagtaggatccacttatggtgcaacaaaaggagcaatgaaccaactgactaaaaatttggcatgtgagtgggccaaagacaatataaggactaattgcgttgcaccagggccaatcaaaacccctctcggtgacaagcattttaaaaatgaaaaacttcttaatgctttcatttcgcaaaccccccttggacggattggagaagcagaggaagtgtcttcattggtggcattcctctgcttacctgcagcctcttacataacaggacagaccatttgtgttgatggtggattaacagtgaatggtctctatataaattag

SEQ ID NO: 2028 - protein, 267 aa, Glycine max
MAEASIGSKSSRWSLQGMTALVTGGSKGIGYAIVEELAQLGATVHTCARNEAELNESLNEWNTKGYRVTGSVCDVASRAERQDLIARLSNEFNGKLNILVNNVGTNVPKHTLDVTEEDFSFLINTNLESAYHLSQLAHPLLKASEAANIIFISSIAGVLSIGVGSTYGATKGAMNQLTKNLACEWAKDNIRTNCVAPGPIKTPLGDKHFKNEKLLNAFISQTPLGRIGEAEEVSSLVAFLCLPAASYITGQTICVDGGLTVNGLYIN

SEQ ID NO: 2029 - DNA, 951 bp, Zea mays
  CDS (1)..(951)
atggccaccgccgccgccaccgcagcagcagtagtctcctccccggctgccccacgcgccggggccgccgccgcctcccgccgggggttcgtcacgtttggtggaggcgccgcccgcttctctcccacgctgcggtccggccgtgggttctctggtgtgcaaacccatgttgccgctgttgaacaagcaattgtaaaagatgctaccaagctggaagctccagttgttgttgttacaggtgcatctagagggattggtaaggcaactgctctagcccttggaaaagcaggatgcaaggttctggtaaactatgcccggtcctcgaaagaggctgaagaggtctccaaagagattgaagcatctggtggtgaggctatcaccttcggaggagatgtttcaaaagaagctgatgtagagtctatgatgaaagcagctctagataaatggggaacaatagatgtgctggtaaataatgcagggattacacgagacacattgttgatgaggatgaagaaatctcagtggcaagacgtaattgatctgaatcttactggtgtcttcctttgtacacaggctgcaacaaaagtaatgatgaaaaagagaaagggaaaaattatcaacattgcatctgtagttggtcttactggcaatgttggccaagctaattatagcgcagccaaggctggagtgattggtttcacaaaaacagttgccagggagtatgcaagcagaaatatcaatgtgaatgctattgcaccagggttcattgcatctgatatgactgccgaacttggagaagagcttgagaagaaaatcttgtcaaccattccgttagggagatatggccaaccagaggaagttgcagggttggtcgagttcctggcccttaaccccgcagctagctatatgactggacaggtgcttacaattgacggagggatggtaatgtaa

SEQ ID NO: 2030 - protein, 316 aa, Zea mays
MATAAATAAAVVSSPAAPRAGAAAASRRGFVTFGGGAARFSPTLRSGRGFSGVQTHVAAVEQAIVKDATKLEAPVVVVTGASRGIGKATALALGKAGCKVLVNYARSSKEAEEVSKEIEASGGEAITFGGDVSKEADVESMMKAALDKWGTIDVLVNNAGITRDTLLMRMKKSQWQDVIDLNLTGVFLCTQAATKVMMKKRKGKIINIASVVGLTGNVGQANYSAAKAGVIGFTKTVAREYASRNINVNAIAPGFIASDMTAELGEELEKKILSTIPLGRYGQPEEVAGLVEFLALNPAASYMTGQVLTIDGGMVM

SEQ ID NO: 2031 - DNA, 969 bp, Linum usitatissimum
  CDS (1)..(969)
atggctgctagtaccggatccaccgccgtcgtattcaaatccgccggcttcgccacctcctccggcgaaaggagcattaaccagttccgccactggtctccggttcccgccagcctccactcctcccgcgctggcctccgctgtagatcgagaagctcggtatcctcttccggtgtgagagctcaggttgctgcagttgaaccagtcagcagtgagtcagttaagaaggtggaatctccagtagttattgtaactggagcttccagaggaatcgggaaagcgattgcattgtcgttggggaaagcaggttgcaaggttctggttaactatgcaaggtcatctaaggaggctgaggaagtctccaaagagattgaagcttccggtggtcaagctgtaacctttggtggtgatgtctctaaagaagaggatgtggaggccatgatgaaaactgctattgatgcttttggaacagttgacatactgataaacaatgcagggatcacaagggacactttgttgatgcggatgaagaaacagcagtggcaggatgttattgacctcaatcttactggtgtcttcctttgtacacaggctgcagccaagatcatgatgaagaaaagaaagggaaggattatcaatatcgcttcagttgttggtttggttggtaacgttgggcaagctaactacagtgctgcaaaggcaggagtcattggattcacaaagagtgtcgcaaaggaatattcaagcagaaatatcaacgtcaatgctgttgctcctggattcattgcatctgacatgactgccaagcttggggatgacattgaaaagaaaatcttggagacgattcctttagggcggtacggtcagccggaagaggtggccggattggtggaattcctcgctctgaacccagctgctggctacatgaccgggcaggtgcttaccatcgacggaggaatggtgatgtaa

SEQ ID NO: 2032 - protein, 322 aa, Linum usitatissimum
MAASTGSTAVVFKSAGFATSSGERSINQFRHWSPVPASLHSSRAGLRCRSRSSVSSSGVRAQVAAVEPVSSESVKKVESPVVIVTGASRGIGKAIALSLGKAGCKVLVNYARSSKEAEEVSKEIEASGGQAVTFGGDVSKEEDVEAMMKTAIDAFGTVDILINNAGITRDTLLMRMKKQQWQDVIDLNLTGVFLCTQAAAKIMMKKRKGRIINIASVVGLVGNVGQANYSAAKAGVIGFTKSVAKEYSSRNINVNAVAPGFIASDMTAKLGDDIEKKILETIPLGRYGQPEEVAGLVEFLALNPAAGYMTGQVLTIDGGMVM

SEQ ID NO: 2033 - DNA, 834 bp, Linum usitatissimum; identical to SEQ ID NO: 1200
  CDS (1)..(834)

SEQ ID NO: 2034 - protein, 277 aa, Linum usitatissimum; identical to SEQ ID NO: 1201

SEQ ID NO: 2035 - DNA, 870 bp, Linum usitatissimum
  CDS (1)..(870)
atggctagcgaggtgtcagcccagctggagccacggtgcaacttaccagacaaagtagtccttgtaaccggtgcttcttcaggtataggccgagagttctgccttgacctagccaaagctgggtgcaagattgtggcggctgctaggcgtattgaccgcctacaatctttgtgcaaagagatcaatatgattcagtttccgaccagtgcttcttcatctgccggagagctaagtggcacacgtgctgtggccgtggagctggatgtgtccgcagacggggttgcaattgataaggctgtgcagagctcttgggaagcatttggaaggatagatgtgttgatcaacaatgctggcattagtggtaactcgaagaactcgttagatttgtctgaagaggaatggaatcatttgatcaagacaaatttgaaaggaacttggttggtttccaagtcagttgggatacggatgcgtgatgcaaagcttggaggttccataatcaatatctcatcgatctttggtcttaatcgtggctatgcacccggagttgtcggttatgcttcttcgaagaccggtgtaaattccatgacgaaggtgatggctttggagttgggggtttacaagatcagagttaactctatatcacctggactgttcaaatccgagatcacagaaagtctcatgaataaaccctggatgactaccgttgctgagaagacggtcccactacgaacatttggaactgtagatccagcattgacatcactcgttcgatacctcatccatgattcaacccagtatgtgacgggcaatattttcattgtagatgccggaacaaccttatcaggtgtccctattttctcatcactctga

SEQ ID NO: 2036 - protein, 289 aa, Linum usitatissimum
MASEVSAQLEPRCNLPDKVVLVTGASSGIGREFCLDLAKAGCKIVAAARRIDRLQSLCKEINMIQFPTSASSSAGELSGTRAVAVELDVSADGVAIDKAVQSSWEAFGRIDVLINNAGISGNSKNSLDLSEEEWNHLIKTNLKGTWLVSKSVGIRMRDAKLGGSIINISSIFGLNRGYAPGVVGYASSKTGVNSMTKVMALELGVYKIRVNSISPGLFKSEITESLMNKPWMTTVAEKTVPLRTFGTVDPALTSLVRYLIHDSTQYVTGNIFIVDAGTTLSGVPIFSSL

SEQ ID NO: 2037 - DNA, 843 bp, Linum usitatissimum
  CDS (1)..(843)
atggctagcgaggtgtcagcccagctggagccatggtataacttggaagacaaagtggtctttgtaactggtgcttcttcaggtttgggcagagatttctgcctcgacctggcgaaagctgggtgcaagattgtggctgctgctaggcgtattgaccgcctacaatctttgtgcgatgaaatcaatctgactgctggagagccaagtggtttacgtgctgccgctgtggagctggatgtgtcggcagacggtgcttcgatcgacaaggctgtacagaccgcttgggaagcctttggaaagatagatgcgttgatcaacaatgctggagttagaggtagtgtgaagaccccattggatttttctgaagaagagtggaatcacacgatcaagacgaatctgacaggagtttggttggtttccaagtcagttgggattcggatgcgtgatgcgaagctgggaggttccataatcaatatttcatcgatagctggtctgaatcgtggtctattacctggagctgttggctatgcttcttcgaagactggagtaaacgccatgacaaaggtgatggcactggagttgggggttcacaagatcagagttaactctatatcacctggacttttcaaatctgagatcacgcaaggtcttatgcagaaagactggctcagtaacgttgctgagaagacggttcctctactaacatatggaactgcagacccagcattgacatcaatcgcccgatacctcatccacgattcatcccagtatgtgacgggtaatatcttcattgtggacgctggagccaccttacctggtgtccctattttctcatcgctctga

SEQ ID NO: 2038 - protein, 280 aa, Linum usitatissimum
MASEVSAQLEPWYNLEDKVVFVTGASSGLGRDFCLDLAKAGCKIVAAARRIDRLQSLCDEINLTAGEPSGLRAAAVELDVSADGASIDKAVQTAWEAFGKIDALINNAGVRGSVKTPLDFSEEEWNHTIKTNLTGVWLVSKSVGIRMRDAKLGGSIINISSIAGLNRGLLPGAVGYASSKTGVNAMTKVMALELGVHKIRVNSISPGLFKSEITQGLMQKDWLSNVAEKTVPLLTYGTADPALTSIARYLIHDSSQYVTGNIFIVDAGATLPGVPIFSSL

SEQ ID NO: 2039 - DNA, 819 bp, Hordeum vulgare
  CDS (1)..(819)
atggctgcggcggagacgtcgggatcgagccagccgggcgctccaggacggtggtctcttcacggcaaaacggctctcgtcaccggaggcacccgcgggatcgggcgtgcggtggtggaggagcttgccgcgctgggggcggccgtgcacacctgctcccggaaggaggcggagcttggcgagcgcctcaaggagtgggaggccaggggcttccgcgtcacaacctccgtctgcgacctctccgtccgggagcagcgggagcgcctgattggcgaggtcgccgaacgcttcggaggcaagctcaacatcctcgtaaataatgtggggacaaacataaggaaaccaactactgaattttctgctgaagattactcttttttgatggccactaaccttgaatctgcatatcatctgtgccaacttgcacatcctcttctaaaagcatctggtttgggcagcattgtttttgtatcatctgtctgtggattagtagccgtatttagcggctctatatatgctatgaccaaaggtgccatcaaccaattaaccaagaacctagcatgtgaatgggcgaaagatggcataagaacaaactctgttgctccatggtacataacaacgtcacttacagaaggacttttggctaacaaggaatttgaggcctccgttgtgagtcgaacaccacttgggcgtgtcggagaaccaggagaagtatcatcgctggttgcttttctttgcatgcctggtgccacttacataacaggccagacgatctcagtggatggaggtatgactgtcaatgggatgtatccagcataa

SEQ ID NO: 2040 - protein, 272 aa, Hordeum vulgare
MAAAETSGSSQPGAPGRWSLHGKTALVTGGTRGIGRAVVEELAALGAAVHTCSRKEAELGERLKEWEARGFRVTTSVCDLSVREQRERLIGEVAERFGGKLNILVNNVGTNIRKPTTEFSAEDYSFLMATNLESAYHLCQLAHPLLKASGLGSIVFVSSVCGLVAVFSGSIYAMTKGAINQLTKNLACEWAKDGIRTNSVAPWYITTSLTEGLLANKEFEASVVSRTPLGRVGEPGEVSSLVAFLCMPGATYITGQTISVDGGMTVNGMYPA

SEQ ID NO: 2041 - DNA, 984 bp, Hordeum vulgare
  CDS (1)..(984)
atgctcctcctcctcgctttcctcgccgccgccgccgccgccgccttcttcctcttcaagttcgtcaccgccgatggggatttcaccctcttgtcgtgcggccggccgcggcgggacaaagtggacggcaaggttgtgtggataacgggagcgagccgtgggattggggaggttctttcgatgcagtttgcgagtttaggagcaaagctcatactatctgcacgtaacaaggaggagcttgagagagtgaaacataacatcatgagcaagcatccagatagcaaagttgaagtgttacccatggatttatcatctgatgaaaaatctctgaaagaagttgtacattcagcggaatctctcttttccagtgctggcattgactatatgatgcacaatgcagcctttgagcgtccaaaaaggggagccctggaagaaaccgaggaaggtcttaaggctacttttaaggtcaatgtctttggaacaattactttgactcgccttcttgcacccttcatgttggatagagggatgggtcattttgttgtgatgagtagtgcagctggaaaggtgcccacacctggtcaggctctttactctgcttccaaacatgctctcaatgggtactttgcttctctgcgttctgagttatgtacgaaaggcattaaggtcactgttgtctgtcctggacctattgaaacaccagaatcttctggtgcaacttcttcatcacaaaggcattcgtccgagaaacgtgtttcagtggaaagatgtgctgaactgacaatagttgccgcaactcatggactaaaagaagcatggatatcatatcagcctgtgctggctgttatgtacgtggtgcaatacatgccaacaattggatgctggcttatggataaggttggtgcgaagcgagttgatgccgctgcaaagaaaggcaacgcctacagctggaatctcctcttcggtggcaaaaagtcggcttga

SEQ ID NO: 2042 - protein, 327 aa, Hordeum vulgare
MLLLLAFLAAAAAAAFFLFKFVTADGDFTLLSCGRPRRDKVDGKVVWITGASRGIGEVLSMQFASLGAKLILSARNKEELERVKHNIMSKHPDSKVEVLPMDLSSDEKSLKEVVHSAESLFSSAGIDYMMHNAAFERPKRGALEETEEGLKATFKVNVFGTITLTRLLAPFMLDRGMGHFVVMSSAAGKVPTPGQALYSASKHALNGYFASLRSELCTKGIKVTVVCPGPIETPESSGATSSSQRHSSEKRVSVERCAELTIVAATHGLKEAWISYQPVLAVMYVVQYMPTIGCWLMDKVGAKRVDAAAKKGNAYSWNLLFGGKKSA

SEQ ID NO: 2043 - DNA, 789 bp, Hordeum vulgare
  CDS (1)..(789)
atggcggccggcggcatgagcagggaggagaggtggagcctggccggcgcgacggcgctcgtcaccggcggcagcaaaggcatcggccaggcgatcgtggaggagctggcggggcacggggcgcgggtgcacacgtgcgccaggagcgcggcggagctggaggagtgccgccgccggtgggaggccaaggggctcccggtcaccgtctccgtctgcgacgtctccctgcgcgccagcagggagcagctcgtggagacggtcaagcaagtcttcggcggcaagctcgacatactggtgaacaacgcggcacagattcttgccaaggcggccgtggagtggacatcggaggagtactcgcacctcatggcgaccaatctagagtcgtgcttccacctcagccagctcgcgcaccccttgctcctcaacgcctccatcgctggaggtagcatcgtcaacatatcctcccttgggggcacacttggtttcacgggccttgcgctttacagtatgacaaaaggaggaataaaccagcttacaaggagccttgctactgaatgggcccagaacaagatccgggtgaattgcgtcgccccgggcgcgaccaagagtgacatgttaagcagtctcccactggagattagagagaacgagttggcgaggactccaatgcggcgggcaggcgagccagcggaggtggctgcaatggtgtcgttcctctgcatgccggcggcatccttcgtcaccggccaggtcatcgccgtcgacggtggtcggacaattagtgcttag

SEQ ID NO: 2044 - protein, 262 aa, Hordeum vulgare
MAAGGMSREERWSLAGATALVTGGSKGIGQAIVEELAGHGARVHTCARSAAELEECRRRWEAKGLPVTVSVCDVSLRASREQLVETVKQVFGGKLDILVNNAAQILAKAAVEWTSEEYSHLMATNLESCFHLSQLAHPLLLNASIAGGSIVNISSLGGTLGFTGLALYSMTKGGINQLTRSLATEWAQNKIRVNCVAPGATKSDMLSSLPLEIRENELARTPMRRAGEPAEVAAMVSFLCMPAASFVTGQVIAVDGGRTISA

SEQ ID NO: 2045 - DNA, 762 bp, Zea mays
  CDS (1)..(762)
atggatgtcaagtgccggcgtctggaggggaaggtggccatcgtgacggcgtccacgatggggatcggcctcgccatcgccgagcgcctcggtctggagggcgccgccgtggtcatctcctcccgcaagcagaagaacgttaacgaggcggtggaggggctcagggccaagggtatcaccgcggttggtgccctctgccacgtctccgacgcacagcagcgcaagagcctcatcgagacggccgtcaagagctttgggcacatagatatccttgtctccaatgctgccgcaaatccttctgtagatagcatacttgaaatgaaagagtctgttctcgataagctgtgggatattaacgtcaaggcttctatccttcttattcaggatgctgctcctcacctacggaaggggtcatctgtgattattatttcttcaattgctggttacaatccagaacaaggattgacaatgtatggtgtcacaaagactgctctctttggtctcacgaaggctcttgctggtgagatgggacccgatactcgtgttaactgtgtagcccctggttttgttcctacacggtttgctagtttcctcacagaaaatgagaccattaggaaagagcttaacgagaggaccaagcttaagagattgggtactgtggaagacatggctgcggctgcggcttttctggcgtctgacgacgcatcatacattacggctgaaaccattgttgttgctggaggggtgcagtctaggctgtaa

SEQ ID NO: 2046 - protein, 253 aa, Zea mays
MDVKCRRLEGKVAIVTASTMGIGLAIAERLGLEGAAVVISSRKQKNVNEAVEGLRAKGITAVGALCHVSDAQQRKSLIETAVKSFGHIDILVSNAAANPSVDSILEMKESVLDKLWDINVKASILLIQDAAPHLRKGSSVIIISSIAGYNPEQGLTMYGVTKTALFGLTKALAGEMGPDTRVNCVAPGFVPTRFASFLTENETIRKELNERTKLKRLGTVEDMAAAAAFLASDDASYITAETIVVAGGVQSRL

SEQ ID NO: 2047 - DNA, 792 bp, Brassica napus
  CDS (1)..(792)
atggagaataatgacaagagatggtccctcgccggaaaaaccgctctggtaaccggtggtactcgcggaatcgggcgagcggtcgtggaggagctagcgagattcggggcaacggttcatacatgttcaaggagccaggaggagctcaaatcatgcttggatgattggaagtccaatggtttagtggtaaccggttcggtttgcgatgcttcggatagggatcagagggagaagttgattcaggaggtttcgtctgcctttagcggcaagattaacatccttgtaaacaatgttggaactaatttaaggaagccaacggtcgagtattcgagtgaggattatgctaaaatcatgtcgaccaatttggaatccgctttccatttttcccaaattgcacatcctcttttaaaagcatctggggttgggagcattgtgttcatctcctctgtagctggcctggtgcatcttagtagtggatctgtctatggtgcaactaaaggagcacttaatcagcttacaaggaatctagcttgcgagtgggcaggagacaacattagaaccaattgtgtggcgccatggtacatcaagacctcacttgtgaaaccgctactcgagaagaaaggttttgaggaggcgatagtttcgcgtaccccacttgggcgcgttggagaaccagaggaagtctcgtcgctagtggctttcctctgccttcccgcagcgtcttacatcaccggtcaggtcatttctgttgatggaggattcacagtcaacggcttcagttacaccatgtaa

SEQ ID NO: 2048 - protein, 263 aa, Brassica napus
MENNDKRWSLAGKTALVTGGTRGIGRAVVEELARFGATVHTCSRSQEELKSCLDDWKSNGLVVTGSVCDASDRDQREKLIQEVSSAFSGKINILVNNVGTNLRKPTVEYSSEDYAKIMSTNLESAFHFSQIAHPLLKASGVGSIVFISSVAGLVHLSSGSVYGATKGALNQLTRNLACEWAGDNIRTNCVAPWYIKTSLVKPLLEKKGFEEAIVSRTPLGRVGEPEEVSSLVAFLCLPAASYITGQVISVDGGFTVNGFSYTM

SEQ ID NO: 2049 - DNA, 849 bp, Brassica napus
  CDS (1)..(849)
atgagcaatcatcaaaccacggtgttgaaacaactagagccatggtgtgagctaaacggcaaagtggttcttctgaccggagcttcttctggtataggaagtgaggtctgtctcgatctgggcaaagctggctgtaagattatcgcagcagctcgtcgcgtccaccgtctcgaatctctctgctccgaaatcaacagcttaagctcaaccgggatccaattagccgcaccgctcgagctagacgtttcatcagacgcagccaccattcaaaaagctgtcaaacaagcttgggacatctacggaaagatagatgtgttgatcaacaacgctggaatcagaggcaatgtcaagacgagtttagatctgactgaagacgagtggaacacagtgttcagaaccaacttaaccggaccttggttagtatccaaatacgtctgcagtctaatgcgtgacgcaaaacgcggcggctcagtaataaacgtctcctccatcgccggtctccaccgaggtttgttacccggtggagtcgcctatgcttgttccaaaggtggtgttgacaccatgacgaggatgatggctattgagttaggtgtatacaacatcagagtgaactcgatcgcaccggggcttctcaagtcagagatcacgcaaggtcttatgcaaaaagagtggctcaagaacgtgaccgagaggactatcccgttaaaggtgcaacagaccgtggatccggggcttacctcgctcgttcgctatctcagtcatgactcttctcaatatgtctccggcaacacatacatacttgactccggagctacaatacctggcctgcctattttttcttctctttga

SEQ ID NO: 2050 - protein, 282 aa, Brassica napus
MSNHQTTVLKQLEPWCELNGKVVLLTGASSGIGSEVCLDLGKAGCKIIAAARRVHRLESLCSEINSLSSTGIQLAAPLELDVSSDAATIQKAVKQAWDIYGKIDVLINNAGIRGNVKTSLDLTEDEWNTVFRTNLTGPWLVSKYVCSLMRDAKRGGSVINVSSIAGLHRGLLPGGVAYACSKGGVDTMTRMMAIELGVYNIRVNSIAPGLLKSEITQGLMQKEWLKNVTERTIPLKVQQTVDPGLTSLVRYLSHDSSQYVSGNTYILDSGATIPGLPIFSSL

SEQ ID NO: 2051 - DNA, 960 bp, Brassica napus
  CDS (1)..(960)
atggccaccaccgtcgcagcaacgaaactcacctccttgaaagccaccgccgggaagctcggttaccgtgagatctgccaggtccggcaatgggctccgcttaagtctgcgatgcctcatttcggtatgctgcgatgtgcgacatccactgttgtgaaagctcaagctcaagctcaagccacggctactgagcaaacaacagaagaagctgttccaaaagtggaatctccagttgtggttgtgactggtgcctctagaggcattggtaaagctattgctctttccttgggcaaagctggctgtaaggtcttggtgaactatgctaggtcggcaaaggaagctgaagaagtttccaaacagattgaggcatatggtggccaggctattacttttgggggtgatgtctccaaagaggctgatgtggatgccatgatgaaaaccgctgttgatgcatggggaaccattgatgtcgtcgttaacaatgcaggaattactcgggataccttgttgatacgaatgaagaagtcccaatgggatgaagtgattgatttgaatctcactggagtctttctctgtacccaggcagcaacaaagatcatgatgaagaagagaaagggaagaatcatcaacattgcgtcagttgttggtctcattggtaatattggccaagcaaactacgctgctgctaaagctggtgttattgggttctccaagactgccgccagagagggtgcgagcaggaatataaatgtcaatgtggtttgccctgggttcattgcatctgacatgactgccaagcttggagaagacatggaaaagaaaatcttgggaacaatcccattaggacgatatggacaacctgaagatgtggctggcttggtagaattcttggctctcagtcctgcagccagttacatcacaggacaggcattcaccattgatggaggtattgccatctag

SEQ ID NO: 2052 - protein, 319 aa, Brassica napus
MATTVAATKLTSLKATAGKLGYREICQVRQWAPLKSAMPHFGMLRCATSTVVKAQAQAQATATEQTTEEAVPKVESPVVVVTGASRGIGKAIALSLGKAGCKVLVNYARSAKEAEEVSKQIEAYGGQAITFGGDVSKEADVDAMMKTAVDAWGTIDVVVNNAGITRDTLLIRMKKSQWDEVIDLNLTGVFLCTQAATKIMMKKRKGRIINIASVVGLIGNIGQANYAAAKAGVIGFSKTAAREGASRNINVNVVCPGFIASDMTAKLGEDMEKKILGTIPLGRYGQPEDVAGLVEFLALSPAASYITGQAFTIDGGIAI

SEQ ID NO: 2053 - DNA, 849 bp, Brassica napus
  CDS (1)..(849)
atgagcaatcatcaaaccacggtgttgaaacaactagagccatggtgtgagctaaacggcaaagtggttcttctgaccggagcttcttctggtataggaagtgaggtctgtctcgatctgggcaaagctggctgtaagattatcgcagcagctcgtcgcgtccaccgtctcgaatctctctgctccgaaatcaacagcttaagctcaaccgggatccaattagccgcaccgctcgagctagacgtttcatcagacgcagccaccattcaaaaagctgtcaaacaagcttgggacatctacggaaagatagatgtgttgatcaacaacgctggaatcagaggcaatgtcaagacgagtttagatctgactgaagacgagtggaacacagtgttcagaaccaacttaaccggaccttggttagtatccaaatacgtctgcagtctaatgcgtgacgcaaaacgcggcggctcagtaataaacgtctcctccatcgccggtctccaccgaggtttgttacccggtggagtcgcctatgcttgttccaaaggtggtgttgacaccatgacgaggatgatggctattgagttaggtgtatacaacatcagagtgaactcgatcgcaccagggcttctcaagtcagagatcacgcaaggtcttatgcaaaaagagtggcttaagaacgtgaccgagaggactatcccgttaaaggtgcaacagaccgtggatccgggacttacctcgctggttcgctatctcattcatgactcttcccaatatgtctcaggcaacacatacattctcgactccggagctacaatacctggcctgcctattttttcttctctttga

SEQ ID NO: 2054 - protein, 282 aa, Brassica napus
MSNHQTTVLKQLEPWCELNGKVVLLTGASSGIGSEVCLDLGKAGCKIIAAARRVHRLESLCSEINSLSSTGIQLAAPLELDVSSDAATIQKAVKQAWDIYGKIDVLINNAGIRGNVKTSLDLTEDEWNTVFRTNLTGPWLVSKYVCSLMRDAKRGGSVINVSSIAGLHRGLLPGGVAYACSKGGVDTMTRMMAIELGVYNIRVNSIAPGLLKSEITQGLMQKEWLKNVTERTIPLKVQQTVDPGLTSLVRYLIHDSSQYVSGNTYILDSGATIPGLPIFSSL

SEQ ID NO: 2055 - DNA, 801 bp, Brassica napus
  CDS (1)..(801)
atggctggagaagagcaaagacgaagatggagccttcaaggcaaaaccgcacttgtcaccggtggaaccaaaggcattgggcatgctatagtagaggaacttgcaggatttggagcaataatacatacatgtgctcgagacgaagcacatctcaacgagtgtttaagcaactggaaaaataaagggtttcaagtcactggttcagtctgtgacgcatcgtcctggaccgaaagagagaagctgatgcaaactgtgtacactttgtttgatgccaagctcagtatcctcatcaacaacgttggcgcaatccggtcaaagccaacaattgaaaatacggcagaggatttctcgttccacatttccaccaacttggaatctgcataccattttagccagcttgcacatcctctgctcaagtcttcagggtgtggtaatatcgtcttcatatcctccattactggggtcgtctcacgtagcatcagctccatctacagtgccacaaaaggggcaatgaatcagctagcaaggaatttggcatgcgagtgggcgagcgacagcataagagctaattctgtagctcctacattcattgccactccactggttgataatgcgtttgatgatgaatttaaaaaagtggtagaatcaacaaatcccttggggcgcataggaaaaccagaggaggtagcatcggtggtggcatttctttgtatgcctgcagcttcttacataacgggtcagaccatttgcgttgatggaggtctttcggtcaatggcttctcgtatcagccacacgcttaa

SEQ ID NO: 2056 - protein, 266 aa, Brassica napus
MAGEEQRRRWSLQGKTALVTGGTKGIGHAIVEELAGFGAIIHTCARDEAHLNECLSNWKNKGFQVTGSVCDASSWTEREKLMQTVYTLFDAKLSILINNVGAIRSKPTIENTAEDFSFHISTNLESAYHFSQLAHPLLKSSGCGNIVFISSITGVVSRSISSIYSATKGAMNQLARNLACEWASDSIRANSVAPTFIATPLVDNAFDDEFKKVVESTNPLGRIGKPEEVASVVAFLCMPAASYITGQTICVDGGLSVNGFSYQPHA

SEQ ID NO: 2057 - DNA, 789 bp, Brassica napus
  CDS (1)..(789)
atggataaaagatggagccttcaagggatgaccgcccttgtaaacggtggagccagcggaatcgggtatgccatagtagaagagttagctagttttggagctagaatccacgtatgcgacatctctgaaacatttctcaatcaaagcttaagcgaatgggaaaagaaagggtttcaagtgagtggctcaatctgtgatgtaacctctcgtccccagagagaaacattaatacaaaaagtctccgcgctattcgatggcaaactcaacattcttgtgaacaatgtgggagtacttcgtggaaagccaacaacagaatatgcgaaagaggatttcaatttccacatctcaacaaacttagaacctgctttcaatttttcccagctttcacatcctctactaaaggcttcaggctatggaagcatcatcttcatttcctctgttgcaggaattgtatcatttgactgtggatccatttatagtctagcaaaaggagctctgaatcagctagcaagaaatttggcatgtgaatgggcaaaagacggcataagagccaacgctgttgcccctaatgctatcaggactcctctgtctcaacaatatcttgatgacgtcagtttcaaggaggaattgttcagtagaactccacttggtcgcgctggagagccaaatgaagttgcatcactagtggcattcttgtgtctacctgcggcttcttatataactggtcaaaccatttgtgttgatggaggcctcactgttaacggtttctcctatcaaccacatgcttga

SEQ ID NO: 2058 - protein, 262 aa, Brassica napus
MDKRWSLQGMTALVNGGASGIGYAIVEELASFGARIHVCDISETFLNQSLSEWEKKGFQVSGSICDVTSRPQRETLIQKVSALFDGKLNILVNNVGVLRGKPTTEYAKEDFNFHISTNLEPAFNFSQLSHPLLKASGYGSIIFISSVAGIVSFDCGSIYSLAKGALNQLARNLACEWAKDGIRANAVAPNAIRTPLSQQYLDDVSFKEELFSRTPLGRAGEPNEVASLVAFLCLPAASYITGQTICVDGGLTVNGFSYQPHA

SEQ ID NO: 2059 - DNA, 987 bp, Brassica napus; identical to SEQ ID NO: 1206
  CDS (1)..(987)

SEQ ID NO: 2060 - protein, 328 aa, Brassica napus; identical to SEQ ID NO: 1207

SEQ ID NO: 2061 - DNA, 849 bp, Brassica napus; identical to SEQ ID NO: 1208
  CDS (1)..(849)

SEQ ID NO: 2062 - protein, 282 aa, Brassica napus; identical to SEQ ID NO: 1209

SEQ ID NO: 2063 - DNA, 801 bp, Brassica napus
  CDS (1)..(801)
atggctggagaagagcaaagacgtagatggagccttcaaggcaagaccgcacttgtcaccggtggaaccaaaggcattgggcatgctatagtagaggaacttgcaggatttggggtgataatacatacatgtgctcgagacgaagcacatctcaacgagtgtttaagcaagtggaagaataaagggtttcaagtcactggttcagtctgtgacgtatcgtcctggaccgaaagagagaagctaatgcaaactgtgtactctttgtttgatgccaagctcagtatccttatcaacaatgctggcgcaatccggtcaaagccaacaatagagcatacggctgaggatttctcgttccacatttcgaccaacttggaatctgcgtatcattttagccagcttgcacatcctctgctcaaagcttcaggatgtggtaacatcgtgttcatatcctccatttctggggtcgtctcacttagcatcagctccatctacagtgccacaaaaggggcaatgaatcagctagcaaggaatttggcatgcgagtgggcgagcgacagcataagagctaattctgtagctcctacattcattgccactccactggttgataatgcgtttgatgatgaatttaaaaaagtggtagaatcaacaaatcccttggggcgcataggaaaaccagaggaggtagcatcggtggtggcatttctttgtatgcctgcagcttcttacataacgggtcagaccatttgcgttgatggaggtctttcggtcaatggcttctcgtatcagccacacgcttaa

SEQ ID NO: 2064 - protein, 266 aa, Brassica napus
MAGEEQRRRWSLQGKTALVTGGTKGIGHAIVEELAGFGVIIHTCARDEAHLNECLSKWKNKGFQVTGSVCDVSSWTEREKLMQTVYSLFDAKLSILINNAGAIRSKPTIEHTAEDFSFHISTNLESAYHFSQLAHPLLKASGCGNIVFISSISGVVSLSISSIYSATKGAMNQLARNLACEWASDSIRANSVAPTFIATPLVDNAFDDEFKKVVESTNPLGRIGKPEEVASVVAFLCMPAASYITGQTICVDGGLSVNGFSYQPHA

SEQ ID NO: 2065 - DNA, 987 bp, Brassica napus; identical to SEQ ID NO: 1212
  CDS (1)..(987)

SEQ ID NO: 2066 - protein, 328 aa, Brassica napus; identical to SEQ ID NO: 1213

SEQ ID NO: 2067 - DNA, 858 bp, Brassica napus
  CDS (1)..(858)
atgagcagcaatcatcagactgtgatgaagcaactagagccatggtgcgagctcaaagacaaagtggttctcctaacaggagcttcatccggcatcggaagagagatctgcctcgatctagccaaatccggctgcaagatcatcgcagcagctcgtcgtctcgaccgtctccaatccctctgctccgagatcaacgccttattctccccaacaaaaaccaaacaagccgcacctctcgagctagacgtctcctcagactcatccaccatccgaaacgcagtcaaacaagcttgggacatcttcggaaacatcgacgtcttgatcaacaacgcaggcatcagaggcaacgtcaagtcgagtctggacctatccgaagaagaatgggaaagagtcttcagaacaaacctaaccggaccttggctagtatcaaaacacgtctgcgttctgatgcgcgacgccaaacgccgcggcggaggatcggtgataaacgtttcctccatcgcggggcttcagcgcgggaagctacccggcgcgttggcgtacgcgtgttcgaaaggaggtcttgatattatgacgaagatgatggcggttgagctgggtgagtatggtataagagtgaactcgatagctccggggctgtttaagtcggagatcacggaaggtctggtgaggaaagagtggatgaagaatgtgaggaagaggattgttccgttgaaggtgcagcagactgtggacccggggcttacctcgctggttaggtatctgattccccactcttccaggtatgtctctcgcaatgtttacattgttgacgcgggtgctacattgtctggtctaacgattttttcttcactttga

SEQ ID NO: 2068 - protein, 285 aa, Brassica napus
MSSNHQTVMKQLEPWCELKDKVVLLTGASSGIGREICLDLAKSGCKIIAAARRLDRLQSLCSEINALFSPTKTKQAAPLELDVSSDSSTIRNAVKQAWDIFGNIDVLINNAGIRGNVKSSLDLSEEEWERVFRTNLTGPWLVSKHVCVLMRDAKRRGGGSVINVSSIAGLQRGKLPGALAYACSKGGLDIMTKMMAVELGEYGIRVNSIAPGLFKSEITEGLVRKEWMKNVRKRIVPLKVQQTVDPGLTSLVRYLIPHSSRYVSRNVYIVDAGATLSGLTIFSSL

SEQ ID NO: 2069 - DNA, 798 bp, Glycine max
  CDS (1)..(798)
atggcttctagttcagaatctcaatctcagtctaaaccgctccaagaccgagttgcaatcgtcaccggctcgtcccgcggaatcggccgagaaatcgcgcttcacctcgcctcactcggcgcgcgactcgtcgtcaactacacctccaactcggcccaagccgactcagtcgcggcgcagatcaacgccggttccgccaccacgacaccgcgcgccgtcgtggtccaagccgacgtgtccgatccggctcaggtgaagtcgctcttcgactcggccgagcgcgccttcgactcgccgatccacatccttgtcaactcggcgggcgtgatcgacggcacgtatccctccgtcgccgacaccaccgtggagtccttcgaccgcactttcgcggtgaacgcgcgtggcgccttcgcgtgcgccagggaggccgcgaaccgcctcaagcgcggcggcggagggcggatcattctactgacgacatcgcaggtggtggcgctgaggccggggtacggggcgtacgcggcgtcgaaggcggcggtggaggcaatggtgaagatcctggcgaaggaactgaaagggacgcagataacggcgaattgcgttgcgccgggaccgattgcgacggagatgttcttcgagggtaagacggaggaggtggtgaatcggatcgtgcaagagagtcccttggggaggctcggtgagaccaaagacgtggcacccgttgtgggattcttggccactgatgcttctgaatgggtcaacggtcaaattgttcgtgtcaacggtggctatatttag

SEQ ID NO: 2070 - protein, 265 aa, Glycine max
MASSSESQSQSKPLQDRVAIVTGSSRGIGREIALHLASLGARLVVNYTSNSAQADSVAAQINAGSATTTPRAVVVQADVSDPAQVKSLFDSAERAFDSPIHILVNSAGVIDGTYPSVADTTVESFDRTFAVNARGAFACAREAANRLKRGGGGRIILLTTSQVVALRPGYGAYAASKAAVEAMVKILAKELKGTQITANCVAPGPIATEMFFEGKTEEVVNRIVQESPLGRLGETKDVAPVVGFLATDASEWVNGQIVRVNGGYI

SEQ ID NO: 2071 - DNA, 882 bp, Glycine max
  CDS (1)..(882)
atggcttcgggtgaaaagaaattcccacctcaacaacaacaaacacagcctgggaaggagcatgctatgaatccagtaccccaattcactagccctgactacaagccttcaaataaacttcaaggaaagatagcattagtgactgggggtgactctgggattggacgagcggtgtgtaacttgtttgccttagaaggtgctaccgtgggcttcacatatgtgaaggggcatgaggacaaggacgcgagggacacgttggaaatgatcaagagggcaaagacttcggatgctaaagatccaatggcggtaccagctgatttgggttacgacgagaattgcaagagagtggttgatgaggtcgtgaatgcttatggttgtattgacattctggtcaacaatgcagctgagcaatacgagtgtggaacagtggaggacattgatgagcctaggcttgagagggtctttcgtacaaatatcttctcctatttcttcatgaccaggcatgccttgaagcacatgaaggaaggaagcagcattatcaacacgacatcggtgaatgcatacaagggaaatgcgaaactattggactacacgtccacgaagggagcaattgtggcctatacaaggggacttgctcttcagttggtgagtaagggaattcgggttaatggggtggctcctgggcctatttggaccccattgataccctcctctttcaaggaggaagaaacggctcaatttggtgcccaggtgccaatgaagagagctggccagcctattgaggttgctccgtcttatgtttttcttgcttgcaaccaatgctcctcttacataactggacaagtccttcaccccaatggtggaaccgttgtcaatggttaa

SEQ ID NO: 2072 - protein, 293 aa, Glycine max
MASGEKKFPPQQQQTQPGKEHAMNPVPQFTSPDYKPSNKLQGKIALVTGGDSGIGRAVCNLFALEGATVGFTYVKGHEDKDARDTLEMIKRAKTSDAKDPMAVPADLGYDENCKRVVDEVVNAYGCIDILVNNAAEQYECGTVEDIDEPRLERVFRTNIFSYFFMTRHALKHMKEGSSIINTTSVNAYKGNAKLLDYTSTKGAIVAYTRGLALQLVSKGIRVNGVAPGPIWTPLIPSSFKEEETAQFGAQVPMKRAGQPIEVAPSYVFLACNQCSSYITGQVLHPNGGTVVNG

SEQ ID NO: 2073 - DNA, 882 bp, Glycine max
  CDS (1)..(882)
atggcttccggtgaacagaaattccctcctcaacaacaacaaacacagcctgggaaggagcatgctatgactccagtaccccaattcactagccctgactacaagccttcaaataaacttcaagggaagattgcattagtcactgggggtgattctgggattggacgagcggtgtgtaacttgtttgccttagaaggtgctaccgtggccttcacgtatgtgaaggggcatgaggacaaggacgcgagggacacattggaaatgatcaagagagcaaagacttcggatgccaaggatccaatggcaataccatctgatttgggttacgatgagaactgcaagagggtggttgatgaggtcgtgagtgcttatggtcgtattgacattctggtcaacaatgcagctgagcagtacgagtgtggaaccgtggaggacatagacgagcctaggcttgagagggtctttcgtacaaatatcttctcctatttcttcatggcgaggcatgccttgaagcacatgaaggaaggaagcagcattatcaacacgacatcagtgaatgcatacaagggacatgcgaaactattggactacacgtccaccaagggggcaattgtggcctatacaaggggtcttgcccttcagctggtgagtaagggaattcgggttaatggggtggctccagggcccatttggacccctttgataccagcctctttcaaggaggaagaaacggcccaatttggagcgcaggtcccaatgaagagagctggtcaacctattgaggttgctccttcctatgtttttcttgcttccaaccaatgctcctcttacataactggacaagtccttcaccccaatggtggaaccgttgtgaatggttaa

SEQ ID NO: 2074 - protein, 293 aa, Glycine max
MASGEQKFPPQQQQTQPGKEHAMTPVPQFTSPDYKPSNKLQGKIALVTGGDSGIGRAVCNLFALEGATVAFTYVKGHEDKDARDTLEMIKRAKTSDAKDPMAIPSDLGYDENCKRVVDEVVSAYGRIDILVNNAAEQYECGTVEDIDEPRLERVFRTNIFSYFFMARHALKHMKEGSSIINTTSVNAYKGHAKLLDYTSTKGAIVAYTRGLALQLVSKGIRVNGVAPGPIWTPLIPASFKEEETAQFGAQVPMKRAGQPIEVAPSYVFLASNQCSSYITGQVLHPNGGTVVNG

SEQ ID NO: 2075 - DNA, 849 bp, Glycine max
  CDS (1)..(849)
atggctacgcaactttccgaccgcctcgagccatggcacaccctcgccggaaaagtcgtaatggtcaccggcgcctcctccggcctcggccgcgacttctgcctcgacctcggtcgggctggctgtcgggtcgtcgtggcggcccgcagagtcgaccgcctcgagtccctgtgcgacgaaattaacagcatggccgccggagacggtggccgaagccgccgcgccgtcgccgttgaactcgatgtcgctgccgatgaccccgccgtcgacaaatacgtgcagaaggcgtgggaggcgtttggtcacattgatgctcttatcaacaacgctggtgtcagagggaatgtcaaatcacctttggaattgtctgaggaggaatggaaccatgcgttcagaacaaacttaactgggacatggttggtctcaaaatatgtatgcaaacgcatgcgtgatgcacaaagaaaaggatcaatcattaatattgcttcaattgctggtttgaaccgtggtcaattgcctggaggtgctgcatattcatcctcaaaagcaggcgtcaatatgctaacaagggtcatggcattagaattgggggcacacaaaatcagagtgaattccatatcacctggacttttcaaatctgaaatcactgaaaaactaatggagaaaaattggttgaataatgtggccatgaaaacagtacccttgagaaaatttggcacttctgatccagcattaacatcgctggctcgttatttaattcacgattcttctgagtatgtgtcaggcaacaattttgttgtggatgctggagccaccttaccaggtgtgcctatttattcctccctataa

SEQ ID NO: 2076 - protein, 282 aa, Glycine max
MATQLSDRLEPWHTLAGKVVMVTGASSGLGRDFCLDLGRAGCRVVVAARRVDRLESLCDEINSMAAGDGGRSRRAVAVELDVAADDPAVDKYVQKAWEAFGHIDALINNAGVRGNVKSPLELSEEEWNHAFRTNLTGTWLVSKYVCKRMRDAQRKGSIINIASIAGLNRGQLPGGAAYSSSKAGVNMLTRVMALELGAHKIRVNSISPGLFKSEITEKLMEKNWLNNVAMKTVPLRKFGTSDPALTSLARYLIHDSSEYVSGNNFVVDAGATLPGVPIYSSL

SEQ ID NO: 2077 - DNA, 963 bp, Glycine max
  CDS (1)..(963)
atggcttccattgccggatccaactgcgtcgctctccgaaccgccaacttcggcgcctccggtaaccggaaaatcggccagatccgccaatggtctccgattctcacgaatctccgtcccgtttccggtcttcgtcaccgatcgaatactccgtttagctcctccggtgtgagagcacaggttgctactctggaggaagcaggaaccggagcaactcagaaagtggaagcgccggttgcagtggtgaccggagcttccagaggcattggaaaagcgattgcactgtcattaggtaaagcaggttgcaaggttctggtcaactatgcaaggtcatccaaggaagctgaggaggtttccaaggagattgaggagtttggtggtcaagctcttacatttggtggagatgtttctaacgaggctgatgtggagtctatgattaaaactgcagttgatgcttggggaacagttgatgtattaataaacaatgcaggaataacaagagatggtttattaatgagaatgaagaaatctcaatggcaggatgttattgatctaaatctcactggtgtttttctttgcacacaggctgctgctaagattatgatgaagaaaaagaagggaaggatcgtcaatattgcatcagttgttggtttggttggcaatgttggacaagccaattatagtgctgcaaaagcaggagtaattggcctgacaaaaactgttgcgaaggaatatgctagtagaaacatcactgttaatgcagttgctccagggtttattgcatctgacatgactgccaagctaggacaagacattgagaaaaagattttggagacaatcccattaggaagatatggccagccagaggaagttgctggactggttgaattcttggctcttaatcaagctgccagttacatcactgggcaggttttcaccattgatggaggtatggtgatgtaa

SEQ ID NO: 2078 - protein, 320 aa, Glycine max
MASIAGSNCVALRTANFGASGNRKIGQIRQWSPILTNLRPVSGLRHRSNTPFSSSGVRAQVATLEEAGTGATQKVEAPVAVVTGASRGIGKAIALSLGKAGCKVLVNYARSSKEAEEVSKEIEEFGGQALTFGGDVSNEADVESMIKTAVDAWGTVDVLINNAGITRDGLLMRMKKSQWQDVIDLNLTGVFLCTQAAAKIMMKKKKGRIVNIASVVGLVGNVGQANYSAAKAGVIGLTKTVAKEYASRNITVNAVAPGFIASDMTAKLGQDIEKKILETIPLGRYGQPEEVAGLVEFLALNQAASYITGQVFTIDGGMVM

SEQ ID NO: 2079 - DNA, 861 bp, Glycine max
  CDS (1)..(861)
atgtgtatggagaagcacggccatgatgaggaggagcaacccaaacctgtggttctaatcacaggatgttccacgggagggataggccacgcgcttgcacgatccttcgcagcgaacaggtgcagggtggtggccaccagcaggtcgcggtggagcatggcggatctggaacacgaccacaggttcttcttgcaagaattggatgttcagtccgatgagagcgtgcgtaaggtggtcgatgctgttgtcaacaagttcggtcgcatcgacgtgcttgttaacaacgctggtgttcagtgtgtgggcccccttgccgaggttcctctctctgccattcaaaacactttcgataccaatgtcttcggttcgttgagaatgattcaggccgttgttcctcatatggctgttaggaaacaggggaagatagtcaacgttggtagcgttgctgccttggcctctggaccttggtcaggcacttacaatgcttccaaagctgctcttcatgctttcactgatacattaagattggaacttggacactttggaatcgacgttgtgaatgtagttcctggagccatcacttccaatattgcaaataatgcccttgccaattacaatcgaatgcctgaatggaagttattcaagccttttgaagcagcaatccgagacagagcttctttgtctcaggggtccaagtcgaccccttcggaggagtttgctaaaaacacagtagcagctgttcttaagaagaatccacctgcatggttctcctatggccattactctaccttcatggctatcatgtatcatttaccactctttcttagagacttttttttgaagaaattgatgaaatgctga

SEQ ID NO: 2080 - protein, 286 aa, Glycine max
MCMEKHGHDEEEQPKPVVLITGCSTGGIGHALARSFAANRCRVVATSRSRWSMADLEHDHRFFLQELDVQSDESVRKVVDAVVNKFGRIDVLVNNAGVQCVGPLAEVPLSAIQNTFDTNVFGSLRMIQAVVPHMAVRKQGKIVNVGSVAALASGPWSGTYNASKAALHAFTDTLRLELGHFGIDVVNVVPGAITSNIANNALANYNRMPEWKLFKPFEAAIRDRASLSQGSKSTPSEEFAKNTVAAVLKKNPPAWFSYGHYSTFMAIMYHLPLFLRDFFLKKLMKC

SEQ ID NO: 2081 - DNA, 759 bp, Glycine max
  CDS (1)..(759)
atggaaacgccgaagagatttgaaggtaaggtagccatcgtgactgcttccacacagggaatcggcttagcaatagccgagaggcttggcctcgagggtgcatctgtcgtcatctcttctcgcaaacagcaaaatgttgatgcggccgcggaacaactgagggccaaaggaattcaagtgttgggggttgtttgccatgtttcaagtgctcagcaaaggaagaatttgatcgacaaaactgtccagaagtatggaaagatagatgttgttgtgtccaatgctgctgcaaatccttctgttgatgccatcttgcaaacaaaagactcggtccttgacaagctatgggagataaatgtcaaagccactatacttcttctgaaggacgcagtgcctcacttgcagaagggttcttctgttgttatcatttcctcaattgcaggttttaacccgccaccttctctggctatgtatggagtgaccaaaacagcccttcttggacttactaaagccctggctgctgagatggccccaaacactcgtgtaaactgtgttgctcctggttttgtgccaaccaattttgcttcattcattacaagtaacgatgctgtgaagaaagaactggaagagaagacattacttggaaggcttggtacaacagaagacatgggtgctgcagcagcttttttggcatctgacgatgctgcttatataacaggagagaccattgtagttgctgggggaacgccttccaggttgtag

SEQ ID NO: 2082 - protein, 252 aa, Glycine max
METPKRFEGKVAIVTASTQGIGLAIAERLGLEGASVVISSRKQQNVDAAAEQLRAKGIQVLGVVCHVSSAQQRKNLIDKTVQKYGKIDVVVSNAAANPSVDAILQTKDSVLDKLWEINVKATILLLKDAVPHLQKGSSVVIISSIAGFNPPPSLAMYGVTKTALLGLTKALAAEMAPNTRVNCVAPGFVPTNFASFITSNDAVKKELEEKTLLGRLGTTEDMGAAAAFLASDDAAYITGETIVVAGGTPSRL

SEQ ID NO: 2083 - DNA, 885 bp, Glycine max
  CDS (1)..(885)
atggcaagcaataaggagtctaagttcccagcacagagccagaaaactcagccaggaaaagaacatgtaatgaatccactcccacaagccacaaatcctgatcacaaggccgccaataaactccagggaaaggtggcgttggtgacaggaggtgactcaggaattggcagagcggtttgcctgtgtttcgcaaaagagggtgcaaccgtggcctttacatacgtaaagggccatgaggacagggataaagatgatactctgaagatgctgcttgaagctaagacaagtggtgcagacaatccattggcaatagcagcggatattggctttgatgagaactgcaaacaggtcattgaccttgttgtcaaagaatatggccgccttgatgttctggtcaacaatgcagctgagcagcatttgacaaactctgttgaggaaatcacacaacagcagcttgagagagtcttcggaaccaacatcttttctcagttctttttggtcaagcatgctctgaagcacatgaaagaagggagctgcatcataaactctacttcagttaatgcatacaatgggaatccagaagcgttggactacactgctaccaagggagcaattgtggccttcaccagaggtctttctcagcagctagcgagtaggggaattagggtgaatggtgtggcacctggcccagtttggacgccaatacaaccagcttcaaagcctgctgagatgattcagaacttggggtgtgaggtgccaatgaaccgcgtggctcagccttgtgagattgcaccatgttatttgttcttggcaacttgtcaggactcttcctactttactggccaagtcctccatccaaatggtgggatggtcgtcaacgcttaa

SEQ ID NO: 2084 - protein, 294 aa, Glycine max
MASNKESKFPAQSQKTQPGKEHVMNPLPQATNPDHKAANKLQGKVALVTGGDSGIGRAVCLCFAKEGATVAFTYVKGHEDRDKDDTLKMLLEAKTSGADNPLAIAADIGFDENCKQVIDLVVKEYGRLDVLVNNAAEQHLTNSVEEITQQQLERVFGTNIFSQFFLVKHALKHMKEGSCIINSTSVNAYNGNPEALDYTATKGAIVAFTRGLSQQLASRGIRVNGVAPGPVWTPIQPASKPAEMIQNLGCEVPMNRVAQPCEIAPCYLFLATCQDSSYFTGQVLHPNGGMVVNA

SEQ ID NO: 2085 - DNA, 768 bp, Glycine max
  CDS (1)..(768)
atggagagaaccaaatatggcaagagatttcaaggtaaggtagccattgtgacagcttccacccttggaattggctttagcatagcagagaggcttggcttggagggtgcatctgttgtcatctcttctcgcaaacagcaaaatgttgatgaggctgctggtaaactgagagctaaaggaatcgaagtattggcggttgtttgccacgtttcaaatgctcaacaaaggaagaatttgatagacaaaactttacagaagtatggaaagatagatgttgttgtgtccaatgctgccgtacatccttctgtagatcccattttgcaaacacaagaatcgatccttgacaagttgtgggagataaatgtcaaatccactatacttcttctcaaggatgcagctcctcacttgaagaagggttcttctgttgttctcattgcctcacttgttgcttataatccaccacctactatggctatgtatggagtgaccaaaacagcagttcttggacttaccaaagctatggctagtgaaatgggccctaatactcgggtgaattgtgttgttcctgggattgtgccaactcattttgttgcactttatacctcaaatgatgctacaagagaggaacttgaaagaaaggcattgcttggaaggcttggtacaactgaagacatggctgctgcgacagcgtttttggcgtctgatgatgcttcttacataacaggagaaaatctagtggtttctgggggaatgccttctaggttgtag

SEQ ID NO: 2086 - protein, 255 aa, Glycine max
MERTKYGKRFQGKVAIVTASTLGIGFSIAERLGLEGASVVISSRKQQNVDEAAGKLRAKGIEVLAVVCHVSNAQQRKNLIDKTLQKYGKIDVVVSNAAVHPSVDPILQTQESILDKLWEINVKSTILLLKDAAPHLKKGSSVVLIASLVAYNPPPTMAMYGVTKTAVLGLTKAMASEMGPNTRVNCVVPGIVPTHFVALYTSNDATREELERKALLGRLGTTEDMAAATAFLASDDASYITGENLVVSGGMPSRL

SEQ ID NO: 2087 - DNA, 804 bp, Glycine max
  CDS (1)..(804)
atggctgaggcaagcattggcagcaaaagcagcagatggtctttacagggaatgacagctctcgtcaccggtggatccaaaggaatcggatatgctatcgtggaggagttggcacagcttggagccactgtgcacacttgcgctcggaacgaagctgaactcaatgaatccttaaatgaatggaacacaaaaggatacagagtaactggttccgtctgtgacgtggcgtctcgtgcagaaagacaagacctcatagctagagtctccaatgagtttaatggcaaactcaatatccttgtaaacaacgtgggaacaaacgtaccgaaacatacccttgatgttacggaggaagacttctcatttctgataaatacaaatcttgaatctgcttaccacctaagccagcttgcacatcctctcctgaaagcttcagaggctgcaaacatcatttttatatcctccattgctggtgtgctatcaataggtataggatccacttatggtgcaacaaaaggagcaatgaaccaactgactaaaaatttggcatgtgagtgggccaaagacaatataaggactaattgcgttgcaccagggccaatcaaaacccctctcggtgacaagcattttaaaaatgaaaaacttcttaatgctttcatttcgcaaaccccccttggacggattggagaagcagaggaagtgtcttcattggtggcattcctctgcttacctgcagcctcttacataacaggacagaccatttgtgttgatggtggattaacagtgaatggtctctatataaattag

SEQ ID NO: 2088 - protein, 267 aa, Glycine max
MAEASIGSKSSRWSLQGMTALVTGGSKGIGYAIVEELAQLGATVHTCARNEAELNESLNEWNTKGYRVTGSVCDVASRAERQDLIARVSNEFNGKLNILVNNVGTNVPKHTLDVTEEDFSFLINTNLESAYHLSQLAHPLLKASEAANIIFISSIAGVLSIGIGSTYGATKGAMNQLTKNLACEWAKDNIRTNCVAPGPIKTPLGDKHFKNEKLLNAFISQTPLGRIGEAEEVSSLVAFLCLPAASYITGQTICVDGGLTVNGLYIN

SEQ ID NO: 2089 - DNA, 843 bp, Glycine max
  CDS (1)..(843)
atgtccactactggtactgttctggcttccactccaacacaaaggctattaggcaaagtggcattggttactggtggagcgtctggaattggagaaagcattgtgcgcctcttccatatccatggtgctaaaatatgtatagctgatgtgcaagacaaccttggaaagcaggtctgtcagtctcttggtgatgaagcaaatgttgtttttgtccattgtgatgttacagtagaggatgatgtttcccatgcagtggacttcactgtgggtaaatttggcacccttcacatcatagtcaacaatgccggaatttctggatcaccttgttccgatatccgcaatgcagacttatcagaattcgataaggtgtttagtgtaaatacgaagggagtgttccacgggatgaaacacgctgctcgaattatgatcccgaagaagaagggctcaatcatttctttatgcagtgtagcaagtgccataggtggcttaggaccgcatgcatacacagggtccaagtatgctgtattggggctcacaaagaatgttgcagctgaattggggaaacatgctataagagtgaactgtgtgtcaccttatggtgttgcaacaggtttggccttggctcatttgcctgaggatgagagaactgatgatgccttggtcagttttcgtgattttactgggagaatggccaacttgcagggggtagaattaactactcacgatgtggctaatgctgtgctcttccttgcaagtgatgatgctaaatatataagtggagagaatctcatggttgatggaggcttcacaagtgcaaatcactcactccaagtttttagatga

SEQ ID NO: 2090 - protein, 280 aa, Glycine max
MSTTGTVLASTPTQRLLGKVALVTGGASGIGESIVRLFHIHGAKICIADVQDNLGKQVCQSLGDEANVVFVHCDVTVEDDVSHAVDFTVGKFGTLHIIVNNAGISGSPCSDIRNADLSEFDKVFSVNTKGVFHGMKHAARIMIPKKKGSIISLCSVASAIGGLGPHAYTGSKYAVLGLTKNVAAELGKHAIRVNCVSPYGVATGLALAHLPEDERTDDALVSFRDFTGRMANLQGVELTTHDVANAVLFLASDDAKYISGENLMVDGGFTSANHSLQVFR

SEQ ID NO: 2091 - DNA, 795 bp, Glycine max
  CDS (1)..(795)
atggctgaaacaaagtgggtcatgaaggacaaaagatggtctctccatggaatgacagctctagtcacaggaggcacccgaggcatagggcatgccattgttgaagagttagctgagtttggagcaactgttcatatatgtgcacgtaatcaagatgatatagataaatgtttagaagagtggaaaagcaagggacttaatgtgactggttcagtatgtgatttactatgttctgaccaacgtaaaagattaatggaaattgttggctccatctttcatggaaagctcaatattctagtgaacaatgctgctacaaatataacaaagaagataacagattacacagcagaggatatatcagccataatgggcaccaattttgagtccgtttaccatttgtgtcaagttgcacacccacttctaaaagattctgggaatgggagcatagtatttatttcttccgtagcaggtttaaaagctcttcctgtgttctctgtttatgcagcctctaaaggagccatgaatcaattcaccaaaaacttggcattggaatgggcaaaggataatattcgtgcaaatgctgttgcccctggacctgttaagactaaacttttggagtgtatcgtgaattcttcggaagggaatgagtctataaatggagtagtgtctcaaacatttgttggtcgcatgggagaaactaaagagatatcagcattagttgcttttctttgccttccggctgcatcatacatcactggacaggttatatgtgtagatgggggtttcacaacttag

SEQ ID NO: 2092 - protein, 264 aa, Glycine max
MAETKWVMKDKRWSLHGMTALVTGGTRGIGHAIVEELAEFGATVHICARNQDDIDKCLEEWKSKGLNVTGSVCDLLCSDQRKRLMEIVGSIFHGKLNILVNNAATNITKKITDYTAEDISAIMGTNFESVYHLCQVAHPLLKDSGNGSIVFISSVAGLKALPVFSVYAASKGAMNQFTKNLALEWAKDNIRANAVAPGPVKTKLLECIVNSSEGNESINGVVSQTFVGRMGETKEISALVAFLCLPAASYITGQVICVDGGFTT

SEQ ID NO: 2093 - DNA, 963 bp, Glycine max
  CDS (1)..(963)
atggcttccattgccggatccaactgcgtcgctctccgaaccgccaacttcggcgcctccggtaaccggaaaatcggccagatccgccaatggtctccgattctcacgaatctccgtcccgtttccggtcttcgtcaccgatcgaatactccgtttagctcctccggtgtgagagcacaggttgctactctggaggaagcaggaaccggagcaactcagaaagtggaagcgccggttgcagtggtgaccggagcttccagaggcattggcaaagcgattgcactgtcattaggtaaagcaggttgcaaggttctggtcaactatgcaaggtcatccaaggaagctgaggaggtttccaaggagattgaggagtttggtggtcaagctcttacatttggtggagatgtttctaacgaggatgacgtggagtctatgattaaaactgcagttgatgcttggggaacagttgatgtattaataaacaatgcaggaataactagagatggtttattaatgagaatgaagaaatctcaatggcaggatgttattgatctaaatctcactggtgtttttctttgcacccaggctgctgctaagattatgatgaagaaaagaaagggaagaattgtcaatattgcatcagttgttggtttggttggcaatgttggacaagccaattatagtgctgcgaaagcaggagtaattggcctgacaaaaactgttgcaaaggaatatgctagcagaaacatcactgttaatgcagttgctccagggtttattgcatccgacatgactgccaagctaggacaagacattgagaaaaagattttggagacgatcccattaggaagatatggccaaccagaagaagttgccggactggttgaattcttggctcttaatcaagctgccagttacatcactgggcaggttttcaccattgatggaggtatggtgatgtaa

SEQ ID NO: 2094 - protein, 320 aa, Glycine max
MASIAGSNCVALRTANFGASGNRKIGQIRQWSPILTNLRPVSGLRHRSNTPFSSSGVRAQVATLEEAGTGATQKVEAPVAVVTGASRGIGKAIALSLGKAGCKVLVNYARSSKEAEEVSKEIEEFGGQALTFGGDVSNEDDVESMIKTAVDAWGTVDVLINNAGITRDGLLMRMKKSQWQDVIDLNLTGVFLCTQAAAKIMMKKRKGRIVNIASVVGLVGNVGQANYSAAKAGVIGLTKTVAKEYASRNITVNAVAPGFIASDMTAKLGQDIEKKILETIPLGRYGQPEEVAGLVEFLALNQAASYITGQVFTIDGGMVM

SEQ ID NO: 2095 - DNA, 810 bp, Glycine max; identical to SEQ ID NO: 1214
  CDS (1)..(810)

SEQ ID NO: 2096 - protein, 269 aa, Glycine max; identical to SEQ ID NO: 1215

SEQ ID NO: 2097 - DNA, 816 bp, Glycine max
  CDS (1)..(816)
atggcgaaccctgaaggcagtagcagaggctctagatggtcccttaagggaaccactgctctcgttactggaggaacgcgtggaattgggcacgctgtggtggaggaactagcggagtttggtgccacagtgtacacttgttcgaggaatgaagaagagctgaatgcatgcttgaaggagtggaaagagaagggattttcggtttctgggttggtttgtgatgcgtcttctccaccccatagagagaacctcattcaacaagtggcctctgctttcaacggcaagctcaacatacttgtaaacaatgttggaacaaatgtgaggaagccgacaattgagtatacagccgaagaatattcaaaattgatggcaactaacttggactccacataccatttgtgccaacttgcatatcctcttcttaaagcatctggaaatggaagtattgtgtccatttcctctgttgcaagtcagacaagcgtaggttctggagccatttacgcagcaactaaagctgctattgatcagcttaccaaatattttgcttgtgaatgggcaaaagacaatataaggagcaacggtgttgcaccctggtataccataacttcacttgtggaacctttgcttgcgaacaaacagcttgttagtgagataatatctcgaacgccgataaagcggatggcagaaacacatgaagtttcatccttggtgactttcctttgcctgccagcagcatcctacatcactggacagattgtttcagttgatggaggattcactgctaatggatttcaacccagcatgagaatttcttaa

SEQ ID NO: 2098 - protein, 271 aa, Glycine max
MANPEGSSRGSRWSLKGTTALVTGGTRGIGHAVVEELAEFGATVYTCSRNEEELNACLKEWKEKGFSVSGLVCDASSPPHRENLIQQVASAFNGKLNILVNNVGTNVRKPTIEYTAEEYSKLMATNLDSTYHLCQLAYPLLKASGNGSIVSISSVASQTSVGSGAIYAATKAAIDQLTKYFACEWAKDNIRSNGVAPWYTITSLVEPLLANKQLVSEIISRTPIKRMAETHEVSSLVTFLCLPAASYITGQIVSVDGGFTANGFQPSMRIS

SEQ ID NO: 2099 - DNA, 963 bp, Glycine max
  CDS (1)..(963)
atggcttccattgccggatccaactgcgtcgctctccgaaccgccaacttcggcgcctccggtaaccggaaaatcggccagatccgccaatggtctccgattctcacgaatctccgtcccgtttccggtcttcgtcaccgatcgaatactccgtttagctcctccggtgtgagagcacaggttgctactctggaggaagcaggaaccggagcaactcagaaagtggaagcgccggttgcagtggtgaccggagcttccagaggcattggcaaagcgattgcactgtcattaggtaaagcaggttgcaaggttctggtcaactatgcaaggtcatccaaggaagctgaggaggtttccaaggagattgaggagtttggtggtcaagctcttacatttggtggagatgtttctaacgaggctgatgtggagtctatgattaaaactgcagttgatgcttggggaacagttgatgtattaataaacaatgcaggaataactagagatggtttattaatgagaatgaagaaatctcaatggcaggatgttattgatctaaatctcactggtgtttttctttgcacccaggctgctgctaagattatgatgaagaaaagaaagggaagaattgtcaatattgcatcagttgttggtttggttggcaatgttggacaagccaattatagtgctgcaaaagcaggagtaattggcctgacaaaaactgttgcgaaggaatatgctagcagaaacatcactgttaatgcagttgctccagggtttattgcatctgacatgactgccaagctaggacaagacattgagaaaaagattttggagacgatcccattaggaagatatggccaaccagaggaagttgctggactggttgaattcttggctcttaatcaagctgccagttacatcactgggcaggttttcaccattgatggaggtatggtgatgtaa

SEQ ID NO: 2100 - protein, 320 aa, Glycine max
MASIAGSNCVALRTANFGASGNRKIGQIRQWSPILTNLRPVSGLRHRSNTPFSSSGVRAQVATLEEAGTGATQKVEAPVAVVTGASRGIGKAIALSLGKAGCKVLVNYARSSKEAEEVSKEIEEFGGQALTFGGDVSNEADVESMIKTAVDAWGTVDVLINNAGITRDGLLMRMKKSQWQDVIDLNLTGVFLCTQAAAKIMMKKRKGRIVNIASVVGLVGNVGQANYSAAKAGVIGLTKTVAKEYASRNITVNAVAPGFIASDMTAKLGQDIEKKILETIPLGRYGQPEEVAGLVEFLALNQAASYITGQVFTIDGGMVM

SEQ ID NO: 2101 - DNA, 822 bp, Glycine max
  CDS (1)..(822)
atgggaagtgttccattggcctccgctgctgctcttgccagaaggctagaagggaaggtggcactgataactggtggagcaagtggtataggtgagtgcacagcaagacttttctccaagcatggagccaaagtggtgattgctgatatccaagacgagttaggccactcaatttgcaaagacttggattcatcttcagctacttacattcattgtgatgtcacaaaagaagaaaacatcgaacacgccgtgaacacgaccgtttccaagtacggtaaactagacatcatgcacagcagcgcaggtatagttggcgcatggaaccccagcatattgcacaacaagaagtctcactttgagcaagttatcagtgtcaacctggtgggcacattcctgggaatcaagcacgccgcgagggtgatgatcccttctgggcgtggcagcatagttgcaatggctagcatttgtggaagaattggtggcgtggcttcgcatgcctatacgagctcgaagcacggcatcgtgggactggtgcgaaacactgccgtggagcttggaaccttagggatcagagtgaatagtgtgtctccttatgcggtccctacgcccatgagtaaaactttcctcaacactgatgatgaggggattgctgcactgtattccaatcttaaagggactgttcttaagccccaggatgtggctgaagctgttctttacttgggaagtgacgagtccaagtatgttagtggccatgaccttgttgtagatgggggtttcactgtcgtaaaccctggtttgtgtgtgtttgggcaatccgtgtag

SEQ ID NO: 2102 - protein, 273 aa, Glycine max
MGSVPLASAAALARRLEGKVALITGGASGIGECTARLFSKHGAKVVIADIQDELGHSICKDLDSSSATYIHCDVTKEENIEHAVNTTVSKYGKLDIMHSSAGIVGAWNPSILHNKKSHFEQVISVNLVGTFLGIKHAARVMIPSGRGSIVAMASICGRIGGVASHAYTSSKHGIVGLVRNTAVELGTLGIRVNSVSPYAVPTPMSKTFLNTDDEGIAALYSNLKGTVLKPQDVAEAVLYLGSDESKYVSGHDLVVDGGFTVVNPGLCVFGQSV

SEQ ID NO: 2103 - DNA, 819 bp, Glycine max
  CDS (1)..(819)
atggcagaagcaggaagcagcattaacagaggagcaagatggtctctcaatggaacgacggctctcgtcaccggcggcacccgtgggatcgggcacgccatagtgagtgacttggccgcgtttggcgctgctgtgcacacttgctccaggacccaaacagagctcaacaaatgcttacaagagtggcagagtctgggctttcaggtaactgggtcggtgtgtgacgtgtcctcaccatcccagagagagaagctcattgaggaagtcacttccatcttgaatggcaagcttaacatctatgtgaacaatgttggaacaaactttagaaagccaaccattgagtacactgctgaagaatattcacagcttatgacagttaatttagactcctcattccatctgtgccaacttgcatatcctcttctgaaagcatctgaaaatggaagcattgtgtttatttcatctgttgctggtgtggtgagcttgggtactggagctgtttatgcagcaagtaaagctgcaattaatcagcttacaaaaaacctggcttgtgaatgggccaaagacaacataaggagcaactgtgttgtaccatgggcaaccagaaccccacttgtagaacatttgttgagagaccaaaagtttgtggatgatattatgtctcgaactccgattaaacgtatagcagaacccgaagaagtgtcatcgttggtgactgtcctttgcttgcctgctgcttcttacatcactggacaggttatttgtgttgatggaggattaacggtgaatggatgtcaacccagcatgagaattacctga

SEQ ID NO: 2104 - protein, 272 aa, Glycine max
MAEAGSSINRGARWSLNGTTALVTGGTRGIGHAIVSDLAAFGAAVHTCSRTQTELNKCLQEWQSLGFQVTGSVCDVSSPSQREKLIEEVTSILNGKLNIYVNNVGTNFRKPTIEYTAEEYSQLMTVNLDSSFHLCQLAYPLLKASENGSIVFISSVAGVVSLGTGAVYAASKAAINQLTKNLACEWAKDNIRSNCVVPWATRTPLVEHLLRDQKFVDDIMSRTPIKRIAEPEEVSSLVTVLCLPAASYITGQVICVDGGLTVNGCQPSMRIT

SEQ ID NO: 2105 - DNA, 804 bp, Glycine max
  CDS (1)..(804)
atgacaaaacaaagttctaggttggagggtaaggtggctcttatcactggagcagcaagtgggattggtgaagagacagtgagattgttcgctgaacatggagcacttattgttgcaacagatattcaagatgaacaaggtcaccgagttgctgcttcaatagggtcagagagagtgacttaccatcattgtgatgtgagagatgaaaaccaagttgaagaaacaatcaatttcactttggaaaaacatggtcgcatagatgttttgttcagcaacgctggagtaataggttccttatctgggatccttgaccttgatctgaatgagtttgacaacaccatggccacaaatgttcgtggtgtagctgccacaattaagcacacggcacgtgccatggttgctaaaagcacccgtggatccatcatatgcaccactagtgtggctgctactattggtggaacaggtcctcatggttataccacatcaaaacatgctcttctggggttggtgaaatcagcttgtagtgaacttggtgcttatggaataagagttaatagcatatcccctttcggagttgcaacacctcttgcatgcaaagctttcaactttgagcctgagcaagttgaagctaatagctgctcacaggctaatctgaagggtgttgtgttgaaggctaggcatatagctgaagcagctttgtttcttgcttctgatgatgctgctgtttacatcagtggtcacaacttggtggtggatggtgggttctctgtggttaatagaagttattctttcacaccagcttaa

SEQ ID NO: 2106 - protein, 267 aa, Glycine max
MTKQSSRLEGKVALITGAASGIGEETVRLFAEHGALIVATDIQDEQGHRVAASIGSERVTYHHCDVRDENQVEETINFTLEKHGRIDVLFSNAGVIGSLSGILDLDLNEFDNTMATNVRGVAATIKHTARAMVAKSTRGSIICTTSVAATIGGTGPHGYTTSKHALLGLVKSACSELGAYGIRVNSISPFGVATPLACKAFNFEPEQVEANSCSQANLKGVVLKARHIAEAALFLASDDAAVYISGHNLVVDGGFSVVNRSYSFTPA

SEQ ID NO: 2107 - DNA, 960 bp, Glycine max
  CDS (1)..(960)
atgttgatcgtgttcatttgcatcttccttttcttcatctttctttacaagttcctcatcgcttatggcgatttcactttgatgtctaagaagcaacctaagcgccaagagattgaagataaggttgtttggattactggtgctagccgtggaattggggagattctggctaaacagtttgcaagtttaggggccaagcttattatctctgcaaggaatgaagctgagctaaaccgagtaaggacacagctgaaaggtaagcatgcacctgatgacgtcaagatcttaccattggatttatcatctggagaggattctcttaggatagctgttgagaaagcagaatccttttttccggattctggtgttgattacatggtccataatgcagcttttgagcgtcctaaaacatcaattttagatgtaactgaggaaggtcttaaggctacctttgatgtcaatgttctggggacaataactctcacaaagctcttggcacctttcatgttgaagagggggcatggtcattttgtggtgatgagtagtgcagcaggaaagacacctgccccaggtcaggctgtatactctgcttctaaatatgcgctcaatggttacttccataccttgcgttcagagctttgtcagaaaggaatccaggtaactgtggtctgtcctggtccaatagaaacatcaaataatgctggatcaagggttccatctgagaagcgtgtgccatctgaaaggtgtgcagagctgactattattgctgcaactcatggcttaaaggaagcttggatatcatatcagcctgtgcttgctgtcatgtatctcgttcagtacatgccaactattggttattgggtcatggacaagattggcaaaagtcgagtagaagctgctgaacagaagggaaacacatattctttgagcttactgctcggaaaaaagaaggccacttga

SEQ ID NO: 2108 - protein, 319 aa, Glycine max
MLIVFICIFLFFIFLYKFLIAYGDFTLMSKKQPKRQEIEDKVVWITGASRGIGEILAKQFASLGAKLIISARNEAELNRVRTQLKGKHAPDDVKILPLDLSSGEDSLRIAVEKAESFFPDSGVDYMVHNAAFERPKTSILDVTEEGLKATFDVNVLGTITLTKLLAPFMLKRGHGHFVVMSSAAGKTPAPGQAVYSASKYALNGYFHTLRSELCQKGIQVTVVCPGPIETSNNAGSRVPSEKRVPSERCAELTIIAATHGLKEAWISYQPVLAVMYLVQYMPTIGYWVMDKIGKSRVEAAEQKGNTYSLSLLLGKKKAT

SEQ ID NO: 2109 - DNA, 864 bp, Glycine max; identical to SEQ ID NO: 1216
  CDS (1)..(864)

SEQ ID NO: 2110 - protein, 287 aa, Glycine max; identical to SEQ ID NO: 1217

SEQ ID NO: 2111 - DNA, 849 bp, Glycine max
  CDS (1)..(849)
atgaatgccatagcagcagaacaagtgctggagccatggcacaagctagacgacaaagtcgttttggtgacgggtgcttcctcggggctcgggcgagatttctgcatcgacctcgccaaagctggctgctgtgtcgtcgcggcagctcgtcgcctcgatcgcctcacttccctctgccacgaaatcaaccaccgatggccctcgaacgtcggaatccaccgcgcggtggcggtggagcttgatgtcgccgccgatggccccgccatcgacagggctgtgcagaaggcctgggacgcctttggccgcgttgattccttgattaacaacgctggtgtcagaggaagtgttaaatcacccttgaaattgtctgaagaggaatgggatcatgtcttcaagactaacctaactggttgttggttggtgtcaaaatatgtatgcaaacgcatgtgtgatatccagcttaagggatcaattattaatatttcttcagtttctggtttaaatcgggggcaattgcctggagctgctgcatatgcatcttcgaaggcaggggtaaacatgctgactaaggtcatggctatggaattggggatgcacaaaattagagtaaattccatatcccctggaattttcaaatctgaaataactgaaaatttattacaaaaagattggctgaatgatgtggtcaggaaaataatgcctttgagaagattaggtacttcagatccagcattaacatctctagctcgttatcttattcatgattcttctgagtacgtcacgggcaacaattttattgtcgattatggaggcaccttaccaggtgtaccaatttattcttctctgtaa

SEQ ID NO: 2112 - protein, 282 aa, Glycine max
MNAIAAEQVLEPWHKLDDKVVLVTGASSGLGRDFCIDLAKAGCCVVAAARRLDRLTSLCHEINHRWPSNVGIHRAVAVELDVAADGPAIDRAVQKAWDAFGRVDSLINNAGVRGSVKSPLKLSEEEWDHVFKTNLTGCWLVSKYVCKRMCDIQLKGSIINISSVSGLNRGQLPGAAAYASSKAGVNMLTKVMAMELGMHKIRVNSISPGIFKSEITENLLQKDWLNDVVRKIMPLRRLGTSDPALTSLARYLIHDSSEYVTGNNFIVDYGGTLPGVPIYSSL

SEQ ID NO: 2113 - DNA, 858 bp, Brassica napus
  CDS (1)..(858)
atgagcagcaatcatcagactgtgatgaagcaactagagccatggtgcgagctcaaagacaaagtggttctcctaacaggagcttcatccggcatcggaagagagatctgcctcgatctagccaaatccggctgcaagatcatcgccgcagctcgccgtctcgaccgtctccaatccctctgctccgagatcaacgccttattctccccaacaaaaaccaaacaagccgcacctctcgagctagacgtctcctcagactcatccaccatccgaaacgcagtcaaacaagcttgggacatcttcggaaacatcgacgtcttgatcaacaacgcaggcatcagaggcaacgtcaagtcgagtctggacctatccgaagaagaatgggaaagagtcttcagaacaaacctaaccggaccttggctagtatcaaaacacgtctgcgttctgatgcgcgacgccaaacgccgcggcggaggatcggtgataaacgtttcctccatcgcggggcttcagcgcgggaagctacccggcgcgttggcgtacgcgtgttcgaaaggaggtcttgatattatgacgaagatgatggcggttgagctgggtgagtatggtataagagtgaactcgatagccccggggctgtttaagtcggagatcacggaaggtctgatgaggaaagagtggatgaagaatgtgagggagaggattgttccgttgaaggtgcagcagagtgtggacccggggcttacctcgctggttaggtatctgattcatgactcttccaggtatgtctctgggaatgtttacattgttgacgctggtgctacgttgtctggtctgccgattttttcttctctttga

SEQ ID NO: 2114 - protein, 285 aa, Brassica napus
MSSNHQTVMKQLEPWCELKDKVVLLTGASSGIGREICLDLAKSGCKIIAAARRLDRLQSLCSEINALFSPTKTKQAAPLELDVSSDSSTIRNAVKQAWDIFGNIDVLINNAGIRGNVKSSLDLSEEEWERVFRTNLTGPWLVSKHVCVLMRDAKRRGGGSVINVSSIAGLQRGKLPGALAYACSKGGLDIMTKMMAVELGEYGIRVNSIAPGLFKSEITEGLMRKEWMKNVRERIVPLKVQQSVDPGLTSLVRYLIHDSSRYVSGNVYIVDAGATLSGLPIFSSL

SEQ ID NO: 2115 - DNA, 762 bp, Oryza sativa
  CDS (1)..(762)
atggaggtgaagtgccgtcggctggaggggaaggtagccgtcgtgacggcctccacgcagggcatcggtctcgccatcgccgagcgcctcggcctcgagggcgccgccgtcgtcatctcctcccgcaagaagaagaacgtcgacgaggcggtcgtgggcctcagggcgaaggggatcaccgtcgtcggggtggtctgccatgtctccatcccggagcagcgcaagaacctcatcgacacggcggtcaagaattttgggcatatcgacatagttgtctccaatgctgctgccaatccttccgtagataacatattagaaatgaaagagcctatccttgacaaactatgggatattaatgttaaggcatctattcttcttcttcaggatgctgctgcatatttgcggaagggatcatccgtgatattgatttcttcaattactggctataatccagaaccagcattgtcgatgtatgctgttacaaaaactgccctgcttggtctcacaaaggctcttgctgctgagatggggccaaatactcgtgttaactgtatagcccctggttttgttcctacaaattttgctcgtttcctcacaactaatgacaccattaaaaatgagcttattgacaggagcacacttaagagattgggtactgtggaagacatggctgcagccgcagctttcttggcatcagacgatgcatcattcattacagctgaaactattgttgttgctggaggaactcgatctaggctgtag

SEQ ID NO: 2116 - protein, 253 aa, Oryza sativa
MEVKCRRLEGKVAVVTASTQGIGLAIAERLGLEGAAVVISSRKKKNVDEAVVGLRAKGITVVGVVCHVSIPEQRKNLIDTAVKNFGHIDIVVSNAAANPSVDNILEMKEPILDKLWDINVKASILLLQDAAAYLRKGSSVILISSITGYNPEPALSMYAVTKTALLGLTKALAAEMGPNTRVNCIAPGFVPTNFARFLTTNDTIKNELIDRSTLKRLGTVEDMAAAAAFLASDDASFITAETIVVAGGTRSRL

SEQ ID NO: 2117 - DNA, 888 bp, Oryza sativa
  CDS (1)..(888)
atgatgcagagaacaatgcagctcgttctcagggtgaagagatcgtcgggtttactacaccaattctccactgcggcgaactcgcagaggttggccgggaaggtggccgtcatcaccggcgccgccagcggcatcggcaaggcgtcggcgaaggagttcatcggcaatggcgccaaggttatactcgccgacgtccaggacgacctcggccgcgccgtcgccgccgagctcggccctggcgcgacgtacacgcggtgcgacgtcacggacgaggcgcaggtcgccgcggcggtggacctcgccgtggcgcgccacggggcgctcgacgtgttctacagcaacgccggcgtcctgggctccatcgcgccggcgccgctcgcctccctggacctgggcgagttcgaccgcgtcatggccgtgaacgcccgcgccgccgtcgccgccgccaagcacgcggcgcgcgccatggtgccgcgccggagcgggtgcgtcctcttcacggggagcgtgtcgggcgtggtgggcggcacggggccgacgtcgtacggcgtgtcgaaggcggccgtgctgggcgtggtgcgcgccgtggccggggagctggcgcgccacggcgtgcgggcgaacgccgtctcgccgtgcggcgtcgcgacgccgctgtccatggtgcaggtccttgaggcctaccccgggatgagcttcgaggagctcaagaacgccatggcggcgtccatggagcagatggaagctggcccgttgatcgaccccgaggacgtggcgagggcggccgtcttcctggcgtccgacgaggccaggtacatcaacggccataacctcgtcgtcgacggcggcttcacaacgcataaaggagacgacaatcgcatgaattaa

SEQ ID NO: 2118 - protein, 295 aa, Oryza sativa
MMQRTMQLVLRVKRSSGLLHQFSTAANSQRLAGKVAVITGAASGIGKASAKEFIGNGAKVILADVQDDLGRAVAAELGPGATYTRCDVTDEAQVAAAVDLAVARHGALDVFYSNAGVLGSIAPAPLASLDLGEFDRVMAVNARAAVAAAKHAARAMVPRRSGCVLFTGSVSGVVGGTGPTSYGVSKAAVLGVVRAVAGELARHGVRANAVSPCGVATPLSMVQVLEAYPGMSFEELKNAMAASMEQMEAGPLIDPEDVARAAVFLASDEARYINGHNLVVDGGFTTHKGDDNRMN

SEQ ID NO: 2119 - DNA, 1107 bp, Oryza sativa
  CDS (1)..(1107)
atgcgcgcgctctccctcgccagagcaagtagcccgccgcctcttcttcttcacctccgacgagcccttgcacccgcgtcgtcgtcttctccggcgccggtgctgttgctgcgtcctgcggtttcttgttcttctttgtttgttagcgacagggcggcggcggcggcggcggctcgccggagcagcggcagcagcaggagaagcatggcgtcgcagcagttcccgccgcagaagcaggagacgcagccggggaaggagcacgccatggatccccgccccgaggccatcatccagagctacaagccagccaacaagctgaaggacaaggtggcgatcgtgaccggcggcgactccggcatcgggcgggcggtgtgcctgtgcttcgcgctggagggcgcgacggtggcgttcacgtacgtgaaggggcaggaggagaaggacgcggaggagacgctccgcgcgctgcgcgacatcagggcgcgcaccggcgccaaggaccccatggcgatccccgccgacctcgggtacgacgacaactgccgcaaggtggtcgacgaggtcgccggcgcgtacggcggcgccatcgacatcctcgtcaacaacgccgccgagcagtacgagcgcccctccatcaccgacatcaccgaggacgacctggaacgcgtgttccgcaccaacatcttctcctacttcttcatgtcgaagcacgccgtgaagcggatgcgcgatcgccgcggcggcgccggcgccggcgggtgcagcatcatcaacacgtcgtcgatcaacgcgtacaaggggaacaagacgctgctggactacacggcgaccaagggcgccatcgtggcgttcacgagggcgctggcgctgcagctggcggaggaggggatccgggtgaacggcgtcgcgccggggccgatctggacgccgctgatcccggcgtcgttcgcggaggagaaggtgaggcagttcggctcccaggtgcccatgggccgcgccggccagccgtcggaggtggcgcccagcttcgtcttcctcgccagcgacgacgcctcctacatgtccggccagatgctgcacgtcaacggcggcgtcatcgtcaacggctag

SEQ ID NO: 2120 - protein, 368 aa, Oryza sativa
MRALSLARASSPPPLLLHLRRALAPASSSSPAPVLLLRPAVSCSSLFVSDRAAAAAAARRSSGSSRRSMASQQFPPQKQETQPGKEHAMDPRPEAIIQSYKPANKLKDKVAIVTGGDSGIGRAVCLCFALEGATVAFTYVKGQEEKDAEETLRALRDIRARTGAKDPMAIPADLGYDDNCRKVVDEVAGAYGGAIDILVNNAAEQYERPSITDITEDDLERVFRTNIFSYFFMSKHAVKRMRDRRGGAGAGGCSIINTSSINAYKGNKTLLDYTATKGAIVAFTRALALQLAEEGIRVNGVAPGPIWTPLIPASFAEEKVRQFGSQVPMGRAGQPSEVAPSFVFLASDDASYMSGQMLHVNGGVIVNG

SEQ ID NO: 2121 - DNA, 900 bp, Oryza sativa
  CDS (1)..(900)
atggccgtggagtcgccattcagggcggatgtgttgaggggcaaggcggcgctggtcaccggcggcggctccggcatcgggttcgagatcgccgcccagctcgcccgccacggcgcgcacgtcgccatcatgggccgccgccgcgaggtcctcgacaaggccgtcgccgccctccgctcccacggcctccgggctgttggttttgagggagatgtgcgcaagcaggaagatgccgcgagagtggttgccgcaacagttcaacattttggtaagctagacattcttgtcaatggggcagctggcaatttccttgcttccccggaggatttgacgcccaaagggttcaggacagtcgttgacattgacacagtgggtacatacactatgtgctatgaagctctaaagtatctgaaaaagggtggccctgggaaaggtccctctactggtggcgtcatcatcaacataagtgctactttgcattacactgcggcctggtaccaaattcatgtctctgctgctaaggcgggcgttgatagtataacaagatcattggctctggaatggggaacagattatgacatcagggtcaatggaattgcaccagggccaattgaaggcactccaggaatgaggaagcttgcacctgaggaaatggccaaggggagtcgggaaataatgcctttatttaagttgggtgaaaaatgggacatagctatggctgcactttaccttgcttctgatgcaggaaaatatgtaaatgggactacagtggttgttgatggaggtctttggctaagtcgccctcgccatattccgaaggaggaagtgaaggagctctcaaaggttgtcgagaagaaggttagggcctctggtgttggtgtgccatcaagcaaattgtga

SEQ ID NO: 2122 - protein, 299 aa, Oryza sativa
MAVESPFRADVLRGKAALVTGGGSGIGFEIAAQLARHGAHVAIMGRRREVLDKAVAALRSHGLRAVGFEGDVRKQEDAARVVAATVQHFGKLDILVNGAAGNFLASPEDLTPKGFRTVVDIDTVGTYTMCYEALKYLKKGGPGKGPSTGGVIINISATLHYTAAWYQIHVSAAKAGVDSITRSLALEWGTDYDIRVNGIAPGPIEGTPGMRKLAPEEMAKGSREIMPLFKLGEKWDIAMAALYLASDAGKYVNGTTVVVDGGLWLSRPRHIPKEEVKELSKVVEKKVRASGVGVPSSKL

SEQ ID NO: 2123 - DNA, 795 bp, Oryza sativa
  CDS (1)..(795)
atggccatggcgactaccagctctaaaaacgagaggtggagcctcgccggcgccaccgcgctcgtcaccggcggcagcaaaggcatcggccgcgccatcgtcgaggagctcgccagcttgggcgcgacggtgcacacctgcgcccggaccgaggcgccgctgaacagatgccgggaggagttgacggccaagggccttgccgtcaccgtctccgtctgtgacgtctcgttgcgtgccgacagggaggcgctcgccggcacggtgcgcgagctcttcggcggcaagctcagcatcctggtgaactgcgccgggatgtcgttcctgaagccggcggtggagctgacgccggacgattgctcgcaggtgatggggatgaacttcgagtcgtgcttccacttgagccagctggcgtaccctctcctcaaggcctctcagagaggttgtatcatcaacatctcgtccattgcttcggtggtcgcgttctgctctcttcccaacgccgtctactcagctgctaaaggagcaatgaaccaagtcacaaggaacctggctgctgagtgggcgaacgatgggatcagagttaactgtgttgcgccaggcttcattcgtactccgctcctatctgaattcgtggagggtaacgagttggggcgagcagagttcagccgtgttcccatgggccgtctcggtgaaccagaggacatcgcatcgctggtggcgtttctgtcaatgccagcgtcctcctatataaccggtcaggtcatatgcgccgacggcggtcgctgcctttcttga

SEQ ID NO: 2124 - protein, 264 aa, Oryza sativa
MAMATTSSKNERWSLAGATALVTGGSKGIGRAIVEELASLGATVHTCARTEAPLNRCREELTAKGLAVTVSVCDVSLRADREALAGTVRELFGGKLSILVNCAGMSFLKPAVELTPDDCSQVMGMNFESCFHLSQLAYPLLKASQRGCIINISSIASVVAFCSLPNAVYSAAKGAMNQVTRNLAAEWANDGIRVNCVAPGFIRTPLLSEFVEGNELGRAEFSRVPMGRLGEPEDIASLVAFLSMPASSYITGQVICADGGRCLS

SEQ ID NO: 2125 - DNA, 966 bp, Oryza sativa
  CDS (1)..(966)
atggggaccatcaccgccgccaaagcagccgcggcggcggccgtcttccagtctccgtgctcccctgcgcctgcggccagcttccccgcccgcagcgtccggccggatcgccgccgcgccgtctcgctctcagtctcaggtgtaagaactcatgttgcagctgttgaacaagcagtggtacaagatgctattgcacagtcagaggctccagttgttgttgttacaggtgcttccaggggaattgggaaagccattgcattggcttttggaaaagccggctgcaaggtcttagtgaattatgctcggtcttcaacagatgctgaagaagtctgcaaagagattgaaggatttggtggtcaggcaattaccttccgaggagatgtttctaatgaagccgatgtggattctatgattaaagcagctgttgatacatggggtacaattgatgtacttgtaaacaatgcaggaatcacacgggatacattgttgctgagaatgaagaaatctcagtggcaagatgtagttgatcttaatcttacgggcgtattcctttgcacacaggctgcgacaaaagtaatgatgaagaagaaaaagggaagagttatcaacatagcatcagttgttggccttactggcaatcttggccaagttaattatgctgctgccaaggctgcagttattgggttaacaaaaacaactgctagggaatttgcaagcagaaatattacagtgaatgctgttgctcctggatttatttcatcagatatgacctcccaacttggggaggagattgagaagaaaaatctgataactattcccttagggagatatggtgaaccagaggaagttgctgatctggttgagttcttagcacttagccctggtggaagctacatcactgggcaggtctcatactctcgtgtcaccatacaggtcctcactattgatggaggaatggtaatgtaa

SEQ ID NO: 2126 - protein, 321 aa, Oryza sativa
MGTITAAKAAAAAAVFQSPCSPAPAASFPARSVRPDRRRAVSLSVSGVRTHVAAVEQAVVQDAIAQSEAPVVVVTGASRGIGKAIALAFGKAGCKVLVNYARSSTDAEEVCKEIEGFGGQAITFRGDVSNEADVDSMIKAAVDTWGTIDVLVNNAGITRDTLLLRMKKSQWQDVVDLNLTGVFLCTQAATKVMMKKKKGRVINIASVVGLTGNLGQVNYAAAKAAVIGLTKTTAREFASRNITVNAVAPGFISSDMTSQLGEEIEKKNLITIPLGRYGEPEEVADLVEFLALSPGGSYITGQVSYSRVTIQVLTIDGGMVM

SEQ ID NO: 2127 - DNA, 1077 bp, Zea mays
  CDS (1)..(1077)
atgcgcgcgctactgcatctgcggctcatcaatccgtgcagtcccagagcaccccgtcttcccgctactcccgcaagggcgctcgtcgcttccttctccggggcgtggcaggcaccttctggtagagcgagagcgagagcagcgccgccggcagttcgcgctatggcgtcccagcaggtgttccgggctcagcagcagcagcagcagcagttcccggctcagcagcaggagtcccagccggggaaggagcacgcgatggacccccggcccgaggccatcgtccaggactacaaggccgccaacaagctcaaggacaaggtggcgctcgtgaccggcggcgactccggcatcgggcgcgccgtgtgcctgtgcttcgcgaaggagggcgcgacggtggccttcaccttcgtgagggggcaggaggagaaggacgcggaggagacgctgcgtgcgctgcgcgacatcgggtccgagacgggcgcgcgcgagccgatggccctgcccgccgacctcgggtacgaggccaactgccgggaggtggtggagcgggtggcgtcggcgtacggcgggcgcatcgacgtggtggtgaacaacgcggcggagcagtacgagcgggagagcatcggggacgtgacggaggcggacctggagcgcgtgttccgcaccaacatcttctcctacttcctggtgtccaagcacgcggtgccgcgcatggagcccggcgcctgcatcatcaacacctcctccgtcaacgcgtacaagggcaacaagacgctgctggactacacggccaccaagggcgccatcgtggccttcacgcgcgcgctctcgctgcagctggccgacaggggcatccgcgtcaacggcgtcgcgccgggccccgtctggacgccgctcatcccggcgtccttcggcaaggagaaggtggagcagttcgggtcccaggtgcccatgaagcgcgccgcgcagccggccgagatcgcgcccagcttcgtcttcctcgccagcaaccaggattcgtcctacatgtccggccagatcctccacgtcaacggaggcgtcatcgtcaatagctag

SEQ ID NO: 2128 - protein, 358 aa, Zea mays
MRALLHLRLINPCSPRAPRLPATPARALVASFSGAWQAPSGRARARAAPPAVRAMASQQVFRAQQQQQQQFPAQQQESQPGKEHAMDPRPEAIVQDYKAANKLKDKVALVTGGDSGIGRAVCLCFAKEGATVAFTFVRGQEEKDAEETLRALRDIGSETGAREPMALPADLGYEANCREVVERVASAYGGRIDVVVNNAAEQYERESIGDVTEADLERVFRTNIFSYFLVSKHAVPRMEPGACIINTSSVNAYKGNKTLLDYTATKGAIVAFTRALSLQLADRGIRVNGVAPGPVWTPLIPASFGKEKVEQFGSQVPMKRAAQPAEIAPSFVFLASNQDSSYMSGQILHVNGGVIVNS

SEQ ID NO: 2129 - DNA, 762 bp, Zea mays
  CDS (1)..(762)
atggatgtcaagtgccggcgtctggaggggaaggtggccatcgtgacggcgtccacgatggggatcggcctcgccatcgccgagcgcctcggtctggagggcgccgccgtcgtcatctcctcccgcaagcagaagaacgtgaacgaggcggtggaggggctcagggccaagggtatcaccgcggttggtgccgtctgccacgtctccgacgcacagcagcgcaagagcctcatcgagacggccgtcaagagctttgggcacatagatattcttgtctccaatgctgccgcaaatccttctgtagatagcatacttgaaatgaaagagtctgttctcgataagctgtgggatattaacgtcaaggcttctatccttcttattcaggatgctgctcctcacctacggaaggggtcatctgtgattattatttcttcaattgctggttacaatccagaacaaggattgacaatgtatggtgtcacaaagactgctctctttggtctcacgaaggctcttgctggtgagatgggacccgatactcgtgttaactgtatagcccctggttttgttcctacacggtttgctagtttcctcacagaaaatgagaccattaggaaagagcttaacgagaggaccaagcttaagagattgggtactgtggaagacatggctgcggctgcggcttttctggcgtctgacgacgcatcatacattacggctgaaaccattgttgttgctggaggggtgcagtctaggctgtaa

SEQ ID NO: 2130 - protein, 253 aa, Zea mays
MDVKCRRLEGKVAIVTASTMGIGLAIAERLGLEGAAVVISSRKQKNVNEAVEGLRAKGITAVGAVCHVSDAQQRKSLIETAVKSFGHIDILVSNAAANPSVDSILEMKESVLDKLWDINVKASILLIQDAAPHLRKGSSVIIISSIAGYNPEQGLTMYGVTKTALFGLTKALAGEMGPDTRVNCIAPGFVPTRFASFLTENETIRKELNERTKLKRLGTVEDMAAAAAFLASDDASYITAETIVVAGGVQSRL

SEQ ID NO: 2131 - DNA, 843 bp, Zea mays
  CDS (1)..(843)
atgtcgtcggcggggccaccgccgccgctgccgccgtggagcaggctggaggggcaggtggtgctggtgacgggcgcttcctccggcatcggacgcgacttctgcctcgacctggcgcgcgccggctgccgcgtcgtcgccgccgcccgccgcgccgatcgtctccgctcgctctgcgacgagatcaacccctccgctgcctcccgagccccccgcgcggtggctgtggaggtcgacgtcgccgccggtggttcggccctggaggcggcggtgcagaaggcctgggacgcctttggccgtatcgacgccttggtcaacaacgccggcatacgaggtgcagtgcattctccattagattggcccgaggatgagtgggacagaatcatcaagacgaaccttaccggatcatggctcgtggccaaacatgtctgtcgacgcatgcgtgatgccaagctgaagggttcagtggttaacatcacctctattgctggccttaaccgtgggcatctgcctggctccacgggatacgcatcctcaaaggctgctgtgcattatgccaccaagattatggctttggaattgggcgcggatcgcatcagagtgaactcgattgcacctggactcttcaaatcagagataactgctcctctgtttcaaaagaggtggttgagcaccgttgcttcaaagatagtgccgcttaaggagcatggcgctactgatcctgcattgacgtcgctggtccgttttctgatccatgaagcatcgtcgtatgtgactggcaacatcttcattgtagactcaggtgccaccatacctggtgttccgatattctcatccctgtaa

SEQ ID NO: 2132 - protein, 280 aa, Zea mays
MSSAGPPPPLPPWSRLEGQVVLVTGASSGIGRDFCLDLARAGCRVVAAARRADRLRSLCDEINPSAASRAPRAVAVEVDVAAGGSALEAAVQKAWDAFGRIDALVNNAGIRGAVHSPLDWPEDEWDRIIKTNLTGSWLVAKHVCRRMRDAKLKGSVVNITSIAGLNRGHLPGSTGYASSKAAVHYATKIMALELGADRIRVNSIAPGLFKSEITAPLFQKRWLSTVASKIVPLKEHGATDPALTSLVRFLIHEASSYVTGNIFIVDSGATIPGVPIFSSL

SEQ ID NO: 2133 - DNA, 939 bp, Zea mays
  CDS (1)..(939)
atggccgctgccacagccgccgccgccgcgctcgcctccccggcgggcctctccacatcgctggcgcgccgcggcctcgtcagcttcgcacccgcgctccgccccggccctgaccgcagctctcgcgccgtcgccctcctcggtgtacgaactcatgtcacggctgttgatcaagccattgtaaaaggtgatacaaagttggaaggtcctgtggttgttgttactggtgcttccagggggattggaaaagccactgcattggctcttggaaaagcaggctgcaaggtcttggtgaattatgctcgatcttcaaaggaggctgaagaagtctccaaggagattgaagcatctggaggccaggccattacctttggaggagatgtttccaaagaggctgatgttgaatctatgataaaagtggctgttgatacatggggaacgattgatgtactagtaaataatgcaggaatcacacgggacacattgttgatgagaatgaagaaatcacagtggcaagatgtgattgatttgaatcttacaggcgttttcctttgcacgcaggctgcaacaaaagtaatgatgaagaagaaaaagggaagaattatcaatatagcatcggttgttggtcttactggtaatgctggacaagctaattatgctgctgccaaggctggggttattgggttcacaaaaacagttgctagggagtatgccagcagaaatattaatgcaaacgttatcgctcctggatttattgcttcagatatgactgctgaacttggtgaagagttagagaagaaaattctgtcaactattcctttagggcgctatggtcggccagaggatgtagcaggcctggtggaattcttagccctcagccctgctgcaagctacatcactggacaggtcctcaccatcgatggaggaatggtaatgtaa

SEQ ID NO: 2134 - protein, 312 aa, Zea mays
MAAATAAAAALASPAGLSTSLARRGLVSFAPALRPGPDRSSRAVALLGVRTHVTAVDQAIVKGDTKLEGPVVVVTGASRGIGKATALALGKAGCKVLVNYARSSKEAEEVSKEIEASGGQAITFGGDVSKEADVESMIKVAVDTWGTIDVLVNNAGITRDTLLMRMKKSQWQDVIDLNLTGVFLCTQAATKVMMKKKKGRIINIASVVGLTGNAGQANYAAAKAGVIGFTKTVAREYASRNINANVIAPGFIASDMTAELGEELEKKILSTIPLGRYGRPEDVAGLVEFLALSPAASYITGQVLTIDGGMVM

SEQ ID NO: 2135 - DNA, 843 bp, Zea mays
  CDS (1)..(843)
atgtcgtcggcggggccaccgccgccgctgccgccgtggagcaggctggaggggcaggtggtgctggtgacgggcgcttcctccggcatcggacgcgacttctgcctcgacctggcgcgcgccggctgccgcgtcgtcgccgccgcccgccgcgccgatcgtctccgctcgctctgcgacgagatcaacccctccgctgcctcccgagccccccgcgcggtggctgtggaggtcgacgtcgccgccggtggttcggccctggaggcggcggtgcagaaggcctgggacgcctttggccgtatcgaccccttggtcaacaacgccggcatacgaggtgcagtgcattctccattagattggcccgaggatgagtgggacagaatcatcaagacgaaccttaccggatcatggctcgtggccaaacatgtctgtcgacgcatgcgtgatgccaagctgaagggttcagtggttaacatcacctctattgctggccttaaccgtgggcatctgcctggctccacgggatacgcatcctcaaaggctgctgtgcattatgccaccaagattatggctttggaattgggcgcggatcgcatcagagtgaactcgattgcacctggactcttcaaatcagagataactgctcctctgtttcaaaagaggtggttgagcaccgttgcttcaaagatagtgccgcttaaggagcatggcgctactgatcctgcattgacgtcgctggtccgttttctgatccatgaagcatcgtcgtatgtgactggcaacatcttcattgtagactcaggtgccaccatacctggtgttccgatattctcatccctgtaa

SEQ ID NO: 2136 - protein, 280 aa, Zea mays
MSSAGPPPPLPPWSRLEGQVVLVTGASSGIGRDFCLDLARAGCRVVAAARRADRLRSLCDEINPSAASRAPRAVAVEVDVAAGGSALEAAVQKAWDAFGRIDPLVNNAGIRGAVHSPLDWPEDEWDRIIKTNLTGSWLVAKHVCRRMRDAKLKGSVVNITSIAGLNRGHLPGSTGYASSKAAVHYATKIMALELGADRIRVNSIAPGLFKSEITAPLFQKRWLSTVASKIVPLKEHGATDPALTSLVRFLIHEASSYVTGNIFIVDSGATIPGVPIFSSL

SEQ ID NO: 2137 - DNA, 1011 bp, Zea mays
  CDS (1)..(1011)
atgcacgctagcctcgcctcctacgccgcggcagctatgccggcgctggacctccgccccgagatagcgcacgcgcaccagcccgtcatgtcgccctctcaccacggctgggacggcaatggcgccacagccgtgcccacaccgatgcccaagaggctggacgggaaggtggccattgtgacgggcggcgcgcgcgggatcggcgaggccatcgtgcggctgttcgccaagcacggggcccgggtggtgatcgcggacatcgacgacgccgcgggggaggcgctggcgtcggcgctgggcccgcaggtcagcttcgtgcgctgcgacgtgtccgtggaggacgacgtccggcgcgccgtggactgggcgctgtcgcgccacggcggccgcctcgacgtctactgcaacaacgccggggtgctgggccgccagacgcgcgccgccaggagcatcctgtccttcgacgcggccgagttcgaccgcgtgctccgcgtcaacgcgctgggcgccgcgctcgggatgaagcacgcggcgcgcgccatggcgccgcgccgcgcggggagcatcgtctccgtcgccagcgtcgcggccgtgctgggcggcctcggcccgcacgcctacaccgcctccaagcacgccatcgtcgggctcaccaagaacgccgcctgcgagctgcgcgcgcacggggtccgggtcaactgcgtctcgcccttcggcgtcgccacgcccatgctcatcaacgcctggcgccagggacacgacgacaccaccgccgacgccgaccgagacctcgacctcgacctcgacgtcaccgtgcccagcgaccaggaggtggagaagatggaggaggtggtcaggggcctggccacgctcaagggccccacgctcaggcccagggacatcgccgaggcggtgctcttcctggccagcgacgaggccaggtatatatcgggccacaacctcgtcgtggacggcggcgtcaccacatccaggaacctcatcggcttgtga

SEQ ID NO: 2138 - protein, 336 aa, Zea mays
MHASLASYAAAAMPALDLRPEIAHAHQPVMSPSHHGWDGNGATAVPTPMPKRLDGKVAIVTGGARGIGEAIVRLFAKHGARVVIADIDDAAGEALASALGPQVSFVRCDVSVEDDVRRAVDWALSRHGGRLDVYCNNAGVLGRQTRAARSILSFDAAEFDRVLRVNALGAALGMKHAARAMAPRRAGSIVSVASVAAVLGGLGPHAYTASKHAIVGLTKNAACELRAHGVRVNCVSPFGVATPMLINAWRQGHDDTTADADRDLDLDLDVTVPSDQEVEKMEEVVRGLATLKGPTLRPRDIAEAVLFLASDEARYISGHNLVVDGGVTTSRNLIGL

SEQ ID NO: 2139 - DNA, 1026 bp, Zea mays
  CDS (1)..(1026)
atggctgccaccttcaccgtcgccgcccgcctcccgctgcggggccccgcgcgcgctccgtcccggccggccgtcgctgctgtaacccggcttcgaagccggcaggagcggcgcggcctagcagcgacaggcgggaggggacctgcccgggttcgggccgagactttctccggtggtggaggcgtggggcggagggaccccatggcgccgccttacaatgtcctcatcaccggctctacgaaaggtataggatatgcattggcaaggaaatttctggaggctggtgataacgttataatctgctcgagatcagctcaaaaggtagaatctgtggtcggtgacttgaaggaggagtacggagagcaacatgtgtggggaactgtctgtgatgttagaaatggaaaggatgtaaaggcacttgtggagtttgcacgtgacaaacttaagcatattgatatatggatcaacaatgctggatcaaatgcatatacatacaaaccactagtggagacctctgatgaggctctcatggaaatcatcaccactaacacccttggattgatgatatgttgtcgtgaggcaataaatatgatgaggaaccaacctcgaggtggtcacatattcaaccttgatggtgctggttctgatggaaggccaactccaagatttgctgcatatggtgcaacaaagagaagtgttgtgcatcttacgaagtcacttcaggctgaattgcagatgaatgaagtgaataatgtgatggtgcacaatctatcgcctggcatggtcacaacagatcttcttatgtctggtgcaactacaaaacaagcaaaatttttcatcaatatattagctgaacctcctgatgtggttgcagactaccttgttccgaacgtcagagaaatccctaccaagcaatccatgaagccaacctacattcgcttcctcacaggcttgaaagcctactcaagaattttttctagacttgcttttggtgctaggagaaacaagtatgttactgaagattag

SEQ ID NO: 2140 - protein, 341 aa, Zea mays
MAATFTVAARLPLRGPARAPSRPAVAAVTRLRSRQERRGLAATGGRGPARVRAETFSGGGGVGRRDPMAPPYNVLITGSTKGIGYALARKFLEAGDNVIICSRSAQKVESVVGDLKEEYGEQHVWGTVCDVRNGKDVKALVEFARDKLKHIDIWINNAGSNAYTYKPLVETSDEALMEIITTNTLGLMICCREAINMMRNQPRGGHIFNLDGAGSDGRPTPRFAAYGATKRSVVHLTKSLQAELQMNEVNNVMVHNLSPGMVTTDLLMSGATTKQAKFFINILAEPPDVVADYLVPNVREIPTKQSMKPTYIRFLTGLKAYSRIFSRLAFGARRNKYVTED

SEQ ID NO: 2141 - DNA, 957 bp, Zea mays
  CDS (1)..(957)
atggccaccgccgccgccaccgcagcagcagcagcagtctcctccccggctgccccacgagcagccggggccgccgccgcctcccgccgggggttcgtcacgtttggtggaggcgccgcccgcttctctcccacgctgcggtccggccgtgggttctctggtgtgcaaacccatgttgccgctgttgaacaagcaattgtaaaagatgctaccaagctggaagctccagttgttgttgttacaggtgcatctagagggattggtaaggcaactgctctagcccttggaaaagcaggatgcaaggttctggtaaactatgcccggtcctcgaaagaggctgaagaggtctccaaagagattgaagcatctggtggtgaggctatcaccttcggaggagatgtttcaaaagaagctgatgtagagtctatgatgaaagcagctctagataaatggggaacaatagatgtgctggtaaataatgcagggattacacgagacacattgttgatgaggatgaagaaatctcagtggcaagacgtaattgatctgaatcttactggtgtcttcctttgtacacaggctgcaacaaaagtaatgatgaaaaagagaaagggaaaaattatcaacattgcatctgtagttggtcttactggcaatgttggccaagctaattatagcgcagccaaggctggagtgattggtttcacaaaaacagttgccagggagtatgcaagcagaaatatcaatgtgaatgctattgcaccagggttcattgcatctgatatgactgccgaacttggagaagagcttgagaagaaaatcttgtcaaccattccgttagggagatatggccaaccagaggaagttgcagggttggtcgagttcctggcccttaaccccgcagctagctatatgactggacaggtgcttacaattgacggagggatggtaatgtaa

SEQ ID NO: 2142 - protein, 318 aa, Zea mays
MATAAATAAAAAVSSPAAPRAAGAAAASRRGFVTFGGGAARFSPTLRSGRGFSGVQTHVAAVEQAIVKDATKLEAPVVVVTGASRGIGKATALALGKAGCKVLVNYARSSKEAEEVSKEIEASGGEAITFGGDVSKEADVESMMKAALDKWGTIDVLVNNAGITRDTLLMRMKKSQWQDVIDLNLTGVFLCTQAATKVMMKKRKGKIINIASVVGLTGNVGQANYSAAKAGVIGFTKTVAREYASRNINVNAIAPGFIASDMTAELGEELEKKILSTIPLGRYGQPEEVAGLVEFLALNPAASYMTGQVLTIDGGMVM

SEQ ID NO: 2143 - DNA, 939 bp, Zea mays
  CDS (1)..(939)
atggccgctgccacagccgccgccgccgcgctcgcctccccggcgtgcctctccacatcgctggcgcgccgcggcctcgacagcttcgcacccgcgctccgccccggccctgaccgcagctctcgcgccgtcgccctcctcggtgtacgaactcatgtcacggctgttgatcaagccattgtaaaaggtgatacaaagttggaaggtcctgtggttgttgttactggtgcttccagggggattggaaaagccactgcattggctcttggaaaagcaggctgcaaggtcttggtgaattatgctcgatcttcaaaggaggctgaagaagtctccaaggagattgaagcatctggaggccaggccattacctttggaggagatgtttccaaagaggctgatgttgaatctatgataaaagtggctgttgatacatggggaacgattgatgtactagtaaataatgcaggaatcacacgggacacattgttgatgagaatgaagaaatcacagtggcaagatgtgattgatttgaatcttacaggcgttttcctttgcacgcaggctgcaacaaaagtaatgatgaagaagaaaaagggaagaattatcaatatagcatcggttgttggtcttactggtaatgctggacaagctaattatgctgctgccaaggctggggttattgggttcacaaaaacagttgctagggagtatgccagcagaaatattaatgcaaacgttatcgctcctggatttattgcttcagatatgactgctgaacttggtgaagagttagagaagaaaattctgtcaactattcctttagggcgctatggtcggccagaggatgtagcaggcctggtggaattcttagccctcagccctgctgcaagctacatcactggacaggtcctcaccatcgatggaggaatggtaatgtaa

SEQ ID NO: 2144 - protein, 312 aa, Zea mays
MAAATAAAAALASPACLSTSLARRGLDSFAPALRPGPDRSSRAVALLGVRTHVTAVDQAIVKGDTKLEGPVVVVTGASRGIGKATALALGKAGCKVLVNYARSSKEAEEVSKEIEASGGQAITFGGDVSKEADVESMIKVAVDTWGTIDVLVNNAGITRDTLLMRMKKSQWQDVIDLNLTGVFLCTQAATKVMMKKKKGRIINIASVVGLTGNAGQANYAAAKAGVIGFTKTVAREYASRNINANVIAPGFIASDMTAELGEELEKKILSTIPLGRYGRPEDVAGLVEFLALSPAASYITGQVLTIDGGMVM

SEQ ID NO: 2145 - DNA, 915 bp, Zea mays
  CDS (1)..(915)
atggcgtcccagcaggtgttccgggctcagcagcagcagcagcagcagttcccggctcagcagcaggagtcccagccggggaaggagcacgcgatggacccccggcccgaggccatcgtccaggactacaaggccgccaacaagctcaaggacaaggtggcgctcgtgaccggcggcgactccggcatcgggcgcgccgtgtgcctgtgcttcgcgaaggagggcgcgacggtggccttcaccttcgtgagggggcaggaggagaaggacgcggaggagacgctgcgtgcgctgcgcgacatcgggtccgagacgggcgcgcgcgagccgatggccctgcccgccgacctcgggtacgaggccaactgccgggaggtggtggagcgggtggcgtcggcgtacggcgggcgcatcgacgtggtggtgaacaacgcggcggagcagtacgagcgggagagcatcggggacgtgacggaggcggacctggagcgcgtgttccgcaccaacatcttctcctacttcctggtgtccaagcacgcggtgccgcgcatggagcccggcgcctgcatcatcaacacctcctccgtcaacgcgtacaagggcaacaagacgctgctggactacacggccaccaagggcgccatcgtggccttcacgcgcgcgctctcgctgcagctggccgacaggggcatccgcgtcaacggcgtcgcgccgggccccgtctggacgccgctcatcccggcgtccttcggcaaggagaaggtggagcagttcgggtcccaggtgcccatgaagcgcgccgcgcagccggccgagatcgcgcccagcttcgtcttcctcgccagcaaccaggattcgtcctacatgtccggccagatcctccacgtcaacggaggcgtcatcgtcaatagctag

SEQ ID NO: 2146 - protein, 304 aa, Zea mays
MASQQVFRAQQQQQQQFPAQQQESQPGKEHAMDPRPEAIVQDYKAANKLKDKVALVTGGDSGIGRAVCLCFAKEGATVAFTFVRGQEEKDAEETLRALRDIGSETGAREPMALPADLGYEANCREVVERVASAYGGRIDVVVNNAAEQYERESIGDVTEADLERVFRTNIFSYFLVSKHAVPRMEPGACIINTSSVNAYKGNKTLLDYTATKGAIVAFTRALSLQLADRGIRVNGVAPGPVWTPLIPASFGKEKVEQFGSQVPMKRAAQPAEIAPSFVFLASNQDSSYMSGQILHVNGGVIVNS

SEQ ID NO: 2147 - DNA, 843 bp, Zea mays
  CDS (1)..(843)
atgtcgtcggcggggccaccgccgccgctgccgccgtggagcaggctggaggggcaggtggtgctggtgacgggcgcttcctccggcatcggacgcgacttctgcctcgacctggcgcgcgccggctgccgcgtcgtcgccgccgcccgccgcgccgatcgtctccgctcgctctgcgacgagatcaacgcctccgctgcctcccgagccccccgcgcggtggctgtggaggtcgacgtcgccgccggtggttcggccctggaggcggcggtgcagaaggcctgggacgcctttggccgtatcgacgccttggtcaacaacgccggcatacgaggtgcagtgcattctccattagattggcccgaggatgagtgggacagaatcatcaagacgaaccttaccggatcatggctcgtggccaaacatgtctgtcgacgcatgcgtgatgccaagctgaagggttcagtggttaacatcacctctattgctggccttaaccgtgggcatctgcctggctccacgggatacgcatcctcaaaggctgctgtgcattatgccaccaagattatggctttggaattgggcgcggatcgcatcagagtgaactcgattgcacctggactcttcaaatcagagataactgctcctctgtttcaaaagaggtggttgagcaccgttgcttcaaagatagtgccgcttaaggagcatggcgctactgatcctgcattgacgtcgctggttcgttttctgatccatgaagcatcgtcgtatgtgactggcaacatcttcattgtagactcaggtgccaccatacctggtgttccgatattctcatccctgtaa

SEQ ID NO: 2148 - protein, 280 aa, Zea mays
MSSAGPPPPLPPWSRLEGQVVLVTGASSGIGRDFCLDLARAGCRVVAAARRADRLRSLCDEINASAASRAPRAVAVEVDVAAGGSALEAAVQKAWDAFGRIDALVNNAGIRGAVHSPLDWPEDEWDRIIKTNLTGSWLVAKHVCRRMRDAKLKGSVVNITSIAGLNRGHLPGSTGYASSKAAVHYATKIMALELGADRIRVNSIAPGLFKSEITAPLFQKRWLSTVASKIVPLKEHGATDPALTSLVRFLIHEASSYVTGNIFIVDSGATIPGVPIFSSL

SEQ ID NO: 2149 - DNA, 813 bp, Zea mays
  CDS (1)..(813)
atgactgcagaaactctctcacttgaaggcaagactgccttgatcactggctcgggcagagaaaatggcattggcgctgccatcgccagagcttttgcccggaacggtgcagctgttgcaatccactatgtctcggagagctccaaggtgcgggctgagaaggttgcagcagacattagtcgggagtttggaaccaaaactaccgttgtacaaggggcggtggagaaagctagcaatgcgacgaagatagtcaaagaaaccttggaaggacttggcgcttcccacattgacattctcgtgaataacgctggatatggaaatcctaaaagtctcttggaggcaacgccagaattgctcgaagccgaattcgggatcaatgtctttggctcagtttacctaacacaagctgtcattggaatagggaaaatgcctagaggcgggcgtataatcaatgtcggctctatttcctcaaaacttggtcctgaagtcagtgcagtctacggcgcatcaaaggctgcgcaagatagtctcacggcatcctgggctggccagcttggccgtagccgcggaattaccgttaacacccttgccccggggccaatcctaaccgacatggcgaaaccgttcttggaggcaaaggaaggagcttcagctgatttgttgaaagcggtagaggcgcagacgcgagctgaggcacgaattgggacagttgaggacatggccgacgctgcgttgctcctagtttcggagaagagccgctggcttaccgcccaatggatctcggtcagcggtggggtcacaggaactatgtaa

SEQ ID NO: 2150 - protein, 270 aa, Zea mays
MTAETLSLEGKTALITGSGRENGIGAAIARAFARNGAAVAIHYVSESSKVRAEKVAADISREFGTKTTVVQGAVEKASNATKIVKETLEGLGASHIDILVNNAGYGNPKSLLEATPELLEAEFGINVFGSVYLTQAVIGIGKMPRGGRIINVGSISSKLGPEVSAVYGASKAAQDSLTASWAGQLGRSRGITVNTLAPGPILTDMAKPFLEAKEGASADLLKAVEAQTRAEARIGTVEDMADAALLLVSEKSRWLTAQWISVSGGVTGTM

SEQ ID NO: 2151 - DNA, 762 bp, Zea mays
  CDS (1)..(762)
atggatgtcaaatgccggcgtctggaggggaaggtggccgtcgtgacggcgtccacgcaggggatcggcctcgccatcgccgagcgcctcggcctggagggcgccgccgtcgtcgtctcctcccgcaagcagaagaacgtggacgaggccgtggaggggctcaaggccaaggggatcaccgtggtgggcgccgtctgccacgtatccgacgcacagcaacgcaagaacctcgtcgagacggccgtcaagaactttgggcacattgatattcttgtctccaacgctgctgcaaatcctactgtgaatgtcatacttgaaatgaaagaggttgttctcgataagttgtgggatattaacgtcaaggcttctattcttcttattcaggatgctgctccccacctacgagcaaggtcatctgtgatccttatttcttcaattgctggttacaatcctgagcaaggattgacaatgtatggtgttacaaagaccgctctctttggtctcacaaaggctcttgctggtgagatgggacccgatattcgtgttaattgtatagcccctggttttgttccgacacggtttgctagtttcttcatagacaacgagaccattaggaaaaagcttaacgagaggactatgcttaagagattgggttccgtggaagatatggcggcagctgccgcattcctggcatctgacgatgcatcattcatcacagctgaaaccattgttgttgctggaggggtgccgtcgagattgtaa

SEQ ID NO: 2152 - protein, 253 aa, Zea mays
MDVKCRRLEGKVAVVTASTQGIGLAIAERLGLEGAAVVVSSRKQKNVDEAVEGLKAKGITVVGAVCHVSDAQQRKNLVETAVKNFGHIDILVSNAAANPTVNVILEMKEVVLDKLWDINVKASILLIQDAAPHLRARSSVILISSIAGYNPEQGLTMYGVTKTALFGLTKALAGEMGPDIRVNCIAPGFVPTRFASFFIDNETIRKKLNERTMLKRLGSVEDMAAAAAFLASDDASFITAETIVVAGGVPSRL

SEQ ID NO: 2153 - DNA, 969 bp, Zea mays
  CDS (1)..(969)
atgatgcaccggcttgtcgtcgaagctaggagaagagcagccccggtggcgatggccgccggcggggtggcgggcggcgagcggtggatgtcgtcgtcggcagccagcaaaggaaggctagtagggaagattgcgctgatcaccggaggcgcgagcgggctgggcaaggccgcggcccgcgagttcatcgaggaaggcgcgggggccgtagtcctcgcggacatcaactccaagctgggcctcgagacggcccacgagctgggcccggacgcccacttcgtgcactgcgacgtggccgtcgaggacagcgtcgccgcggccgtggacgccgccgtggcgcgccacggccggctggacgtcatgctcaacagcgccggcgtagtgggcccgctgaccccaggcacgtcgcgggtcgccagcctggacctggcgcagttcgactccgtcatgtccgtgaacgtgcgcgggacgctggccgggatcaagcacgccgcgcgcgccatgctggcggcggcgcccgcgggggcaggaggaggaggaggaggagcaggagggtcgatcctctgcatggcgagcgtcagcggcatcctcggcgggctgggcacgtacctgtactcggtgtccaagttcgccatcgcggggatcgtcaaggccgcggcggccgagctgtcgcgcctcggcgtccgcgtcaactgcatctcgccgtacgcggtgcccacgccgatggtgctgggccagttttccgcgatgctgggcggggcagccgacgaggcgcaggtggcggccatcgtcaggggcctcggggagctcaggggcgccacctgcgaggccgtcgacatcgccagggccgccgtgtacctggcctccgacgacgccaagtacgtgtctggccacaaccttgtggtcgacggtggcttcacgagctacaagcacatgaacctgcccttccctaccaagccacatgagtga

SEQ ID NO: 2154 - protein, 322 aa, Zea mays
MMHRLVVEARRRAAPVAMAAGGVAGGERWMSSSAASKGRLVGKIALITGGASGLGKAAAREFIEEGAGAVVLADINSKLGLETAHELGPDAHFVHCDVAVEDSVAAAVDAAVARHGRLDVMLNSAGVVGPLTPGTSRVASLDLAQFDSVMSVNVRGTLAGIKHAARAMLAAAPAGAGGGGGGAGGSILCMASVSGILGGLGTYLYSVSKFAIAGIVKAAAAELSRLGVRVNCISPYAVPTPMVLGQFSAMLGGAADEAQVAAIVRGLGELRGATCEAVDIARAAVYLASDDAKYVSGHNLVVDGGFTSYKHMNLPFPTKPHE

SEQ ID NO: 2155 - DNA, 762 bp, Zea mays
  CDS (1)..(762)
atggatgtcaaatgccggcgtctggaggggaaggtggccgtcgtgacggcgtccacgcaggggatcggcctagccatcgccgagcgcctcggcctggagggcgccgccgccgtcgtctcctcccgcaagcagaagaacgtggacgaggccgtggaggggctcaaggccaaggggatcaccgtggtgggcgccgtctgccacgtatccgacgcacagcaacgcaagaacatcatcgagacggccgtcaagaactttgggcacattgatattcttgtctccaacgctgctgcaaatcctactgtgaatgtcatacttgaaatgaaagaggttgttctcgataagttgtgggatattaacgtcaaggcttctattcttcttattcaggatgctgctccccacctacgggcagggtcatctgtgatccttatttcttcaattgctggttacaatcctgagcaaggattgacaatgtatggtgttacaaagaccgctctctttggtctcacaaaggctcttgctggtgagatgggacccgatattcgtgttaattgtatagcccctggttttgttccgacacggtttgctagtttcttcatagacaacgagaccattaggaaaaagcttaacgagaggactatgcttaagagattgggttccgtggaagatatggcggcagctgccgcattcctggcatctgacgatgcatcattcatcacagctgaaaccattgttgttgctggaggggtgccgtcgagattgtaa

SEQ ID NO: 2156 - protein, 253 aa, Zea mays
MDVKCRRLEGKVAVVTASTQGIGLAIAERLGLEGAAAVVSSRKQKNVDEAVEGLKAKGITVVGAVCHVSDAQQRKNIIETAVKNFGHIDILVSNAAANPTVNVILEMKEVVLDKLWDINVKASILLIQDAAPHLRAGSSVILISSIAGYNPEQGLTMYGVTKTALFGLTKALAGEMGPDIRVNCIAPGFVPTRFASFFIDNETIRKKLNERTMLKRLGSVEDMAAAAAFLASDDASFITAETIVVAGGVPSRL

SEQ ID NO: 2157 - DNA, 762 bp, Zea mays
  CDS (1)..(762)
atggatgtcaagtgccggcgtctggaggggaaggtggccatcgtgacggcgtccacgatggggatcggcctcgccatcgccgagcgcctcggtctggagggcgccgccgtcgtcatctcctcccgcaagcagaagaacgtgaacgaggcggtggaggggctcagggccaagggtatcaccgcggttggtgccgtctgccacgtctccgacgcacagcagcgcaagagcctcatcgagacggccgtcaagagctttgggcacatagatattcttgtctccaatgctgccgcaaatccttctgtagatagcatacttgaaatgaaagagtctgttctcgataagctgtgggatattaacgtcaaggcttctatccttcttattcaggatgctgctcctcacctacggaaggggtcatctgtgattattatttcttcaattgctggttacaatccagaacaaggattgacaatgtatggtgtcacaaagactgctctctttggtctcacgaaggctcttgctggtgagatgggacccgatactcgtgttaactgtgtagcccctggttttgttcctacacggtttgctagtttcctcacagaaaatgagaccattaggaaagagcttaacgagaggaccaagcttaagagattgggtactgtggaagacatggctgcggctgcggcttttctggcgtctgacgacgcatcatacattacggctgaaaccattgttgttgctggaggggtgcagtctaggctgtaa

SEQ ID NO: 2158 - protein, 253 aa, Zea mays
MDVKCRRLEGKVAIVTASTMGIGLAIAERLGLEGAAVVISSRKQKNVNEAVEGLRAKGITAVGAVCHVSDAQQRKSLIETAVKSFGHIDILVSNAAANPSVDSILEMKESVLDKLWDINVKASILLIQDAAPHLRKGSSVIIISSIAGYNPEQGLTMYGVTKTALFGLTKALAGEMGPDTRVNCVAPGFVPTRFASFLTENETIRKELNERTKLKRLGTVEDMAAAAAFLASDDASYITAETIVVAGGVQSRL

SEQ ID NO: 2159 - DNA, 957 bp, Zea mays
  CDS (1)..(957)
atggccaccgccgccgccaccgcagcagcagcagcagtctcctccccggctgcgcgtggagcagccggggccgccgccgcctcccgccgggggttcgtcacgtttggtggaggcgccgcccgcttctctcccacgctgcggtccggccgtgggttctctggtgtgcaaacccatgttgctgctgttgaacaagcagttgtaaaagatgctaccaagctggaagctccagttgttgttgttacaggtgcatctagagggattggtaaggcaactgctctagcccttggaaaagcaggatgcaaggttctggtaaactatgcccggtcctcgaaagaggctgaagaggtctccaaagagattgaagcatctggtggtgaggctatcaccttcggaggagatgtttcaaaagaagctgatgtagagtctatgatgaaagcagctctagataaatggggaacaatagatgtgctggtaaataatgcagggattacacgagacacattgttgatgaggatgaagaaatctcagtggcaagacgtaattgatctgaatcttactggcgtcttcctttgtacacaggctgcaacaaaagtaatgatgaaaaagagaaagggaaaaattatcaacattgcatctgtagttggtcttactggcaatgttggccaagctaattatagcgcagccaaggctggagtgattggtttcacaaaaacagttgccagggagtatgcaagcagaaatatcaatgtgaatgctattgcaccagggttcattgcatctgatatgactgccgaacttggagaagagcttgagaagaaaatcttgtcaaccattccgttagggagatatggccaaccagaggaagttgcagggttggtcgagttcctggcccttaaccccgcagctagctatatgactggacaggtgcttacaattgacggagggatggtaatgtaa

SEQ ID NO: 2160 - protein, 318 aa, Zea mays
MATAAATAAAAAVSSPAARGAAGAAAASRRGFVTFGGGAARFSPTLRSGRGFSGVQTHVAAVEQAVVKDATKLEAPVVVVTGASRGIGKATALALGKAGCKVLVNYARSSKEAEEVSKEIEASGGEAITFGGDVSKEADVESMMKAALDKWGTIDVLVNNAGITRDTLLMRMKKSQWQDVIDLNLTGVFLCTQAATKVMMKKRKGKIINIASVVGLTGNVGQANYSAAKAGVIGFTKTVAREYASRNINVNAIAPGFIASDMTAELGEELEKKILSTIPLGRYGQPEEVAGLVEFLALNPAASYMTGQVLTIDGGMVM

SEQ ID NO: 2161 - DNA, 822 bp, Zea mays
  CDS (1)..(822)
atggccacggtggagacctcgggcacggcgatagggtcctccgggagatgggcactacacggcaagacagccctcgtcaccggcggcacccgcggcatcgggcgtgcggtagtggaggagctggcggcgctgggggcggccgtgcacacatgctcccggaaggcggaggagctcggcgagcgcatcaaggagtgggaggccaggggattcagcgttaccgggtccgtctgcgacctctccgagagggaccagcgggagcggttgctccgcgaggttgccgaccgcttcggcggcaagctcaacatcctcgtaaacaatgtaggaacaaacataaggaaaccaactactgagtttactgcagaggaatactcgtttctgatggctactaatcttgaatctgcatatcacttgtgccaaattgcacatcctcttttgaaattatctgggtcaggcagcattatattcatatcatctgttgctggagcgataggaatctttagtggaactatatatgctatgactaaaggtgccattaaccagctaaccaagaatttagcttgtgaatgggctaaggacaacataagagccaactctgtcgctccgtggtacatcaccacttcacttacggaaggaattttggcaaataagaactttgaggaacaagttgtgagtcgaactccgcttggacgtgtcggagaacctggagaagtatcggcacttgttgcttttctttgcatgccgggttccacttatattagcggccagacgattgcggtcgacggaggtatgactgtgaacgggttttaccctcccaagccctag

SEQ ID NO: 2162 - protein, 273 aa, Zea mays
MATVETSGTAIGSSGRWALHGKTALVTGGTRGIGRAVVEELAALGAAVHTCSRKAEELGERIKEWEARGFSVTGSVCDLSERDQRERLLREVADRFGGKLNILVNNVGTNIRKPTTEFTAEEYSFLMATNLESAYHLCQIAHPLLKLSGSGSIIFISSVAGAIGIFSGTIYAMTKGAINQLTKNLACEWAKDNIRANSVAPWYITTSLTEGILANKNFEEQVVSRTPLGRVGEPGEVSALVAFLCMPGSTYISGQTIAVDGGMTVNGFYPPKP

SEQ ID NO: 2163 - DNA, 792 bp, Zea mays
  CDS (1)..(792)
atggcgccaggaggcagcggcgagcggtggagcctggccggcgcgacagcgctggtcaccggtggcagcaaggggatcgggcaagccgtcgtggaggagctggccaggctcggcgcgcgcgtgcacacgtgcgcccgcagcgcggcggacctggaggagtgccgccggcggtgggccgagaaggggctccgcgtcaccgtctccgtgtgcgacgtcgccgtgcgcgccgaccgggagaggctcgtcctggacacggtcagcgcggccttcgacggcaagctcgatatcctggtcaacaacgctgcgctgctgctgctcaagccggcggcggagtgggcggcggaggactacgcgcggatcatggcgaccaacctggagtcgtgcttgcacatctcccagctcgcgcacccgctgctcctcaacgcctccgtcgccggaggggcgagcatcgtcaacgtctcctccatcgccagcgtccttggcttcccgcaggaagttatgtacagcgtcaccaaaggaggactgaatcagatgacgagaagtctagctgtggagtgggcctgcgataggatccgtgtgaactgcgtcgcgccgggcgtgatcatgacggacatgggtaaagagctaccggcggcgttggtggagcaggagcggtcacgcatcccgctgcggcggaccggcgagccggaggaggtggcgtccctggtgtcgttcctctgcatgccggcggcgtcctacgtcaccgggcaggtcatcttcgtcgacggcggccggaccattagtggcgcctga

SEQ ID NO: 2164 - protein, 263 aa, Zea mays
MAPGGSGERWSLAGATALVTGGSKGIGQAVVEELARLGARVHTCARSAADLEECRRRWAEKGLRVTVSVCDVAVRADRERLVLDTVSAAFDGKLDILVNNAALLLLKPAAEWAAEDYARIMATNLESCLHISQLAHPLLLNASVAGGASIVNVSSIASVLGFPQEVMYSVTKGGLNQMTRSLAVEWACDRIRVNCVAPGVIMTDMGKELPAALVEQERSRIPLRRTGEPEEVASLVSFLCMPAASYVTGQVIFVDGGRTISGA

SEQ ID NO: 2165 - DNA, 957 bp, Zea mays
  CDS (1)..(957)
atggccaccgccgccgccaccgcagcagcagcagcagtctcctccccggctgcgcgtggagcagccggggccgccgccgcctcccgccgggggttcgtcacgtttggtggaggcgccgcccgcttctctcccacgctgcggtccggccgtgggttctctggtgtgcaaacccatgttgctgctgttgaacaagcagttgtaaaagatgctaccaagctggaagctccagttgttgttgttacaggtgcatctagagggattggtaaggcaactgctctagcccttggaaaagcaggatgcaaggttctggtaaactatgcccggtcctcgaaagaggctgaagaggtctccaaagagattgaagcatctggtggtgaggctatcaccttcggaggagatgtttcaaaagaagctgatgtagagtctatgatgaaagcagctctagataaatggggaacaatagatgtgctggtaaataatgcaggaatcacacgggacacattgttgatgagaatgaagaaatcacagtggcaagatgtgattgatttgaatcttacaggcgttttcctttgcacgcaggctgcaacaaaagtaatgatgaagaagaaaaagggaagaattatcaatatagcatcggttgttggtcttactggtaatgctggacaagctaattatgctgctgccaaggctggggttattgggttcacaaaaacagttgctagggagtatgccagcagaaatattaatgcaaacgttatcgctcctggatttattgcttcagatatgactgctgaacttggtgaagagttagagaagaaaattctgtcaactattcctttagggcgctatggtcggccagaggatgtagcgggcctggtggaattcttagccctcagccctgctgcaagctacatcactggacaggtcctcaccatcgatggaggaatggtaatgtaa

SEQ ID NO: 2166 - protein, 318 aa, Zea mays
MATAAATAAAAAVSSPAARGAAGAAAASRRGFVTFGGGAARFSPTLRSGRGFSGVQTHVAAVEQAVVKDATKLEAPVVVVTGASRGIGKATALALGKAGCKVLVNYARSSKEAEEVSKEIEASGGEAITFGGDVSKEADVESMMKAALDKWGTIDVLVNNAGITRDTLLMRMKKSQWQDVIDLNLTGVFLCTQAATKVMMKKKKGRIINIASVVGLTGNAGQANYAAAKAGVIGFTKTVAREYASRNINANVIAPGFIASDMTAELGEELEKKILSTIPLGRYGRPEDVAGLVEFLALSPAASYITGQVLTIDGGMVM

SEQ ID NO: 2167 - DNA, 762 bp, Zea mays
  CDS (1)..(762)
atggatgtcaaatgccggcgtctggaggggaaggtggccgtcgtgacggcgtccacgcaggggatcggcctcgccatcgccgagcgcctcggcctggagggcgccgccgtcgtcgtctcctcccgcaagcagaagaacgtggacgaggccgtggaggggctcaaggccaaggggatcaccgtggtgggcgccgtctgccacgtatccgacgcacagcaacgcaagaacctcgtcgagacggccgtcaagaactttgggcacattgatattcttgtctccaacgctgctgcaaatcctactgtgaatgtcatacttgaaatgaaagaggttgttctcgataagttgtgggatattaacgtcaaggcttctattcttcttattcaggatgctgctccccacctacgagcaaggtcatctgtgatccttatttcttcaattgctggttacaatcctgagcacggattgacaatgtatggtgttacaaagaccgctctctttggtctcacaaaggctcttgctggtgagatgggacccgatattcgtgttaactgtatagcccctggttttgttccgacacggtttgctagtttcttcgtagacaacgagaccattaggaaaaagcttaacgagaggactatgcttaagagattgggttccgtggaagatatggcggcagctgccgcattcctggcatctgacgatgcatcattcatcacagctgaaaccattgttgttgctggaggggtgccgtcgagattgtaa

SEQ ID NO: 2168 - protein, 253 aa, Zea mays
MDVKCRRLEGKVAVVTASTQGIGLAIAERLGLEGAAVVVSSRKQKNVDEAVEGLKAKGITVVGAVCHVSDAQQRKNLVETAVKNFGHIDILVSNAAANPTVNVILEMKEVVLDKLWDINVKASILLIQDAAPHLRARSSVILISSIAGYNPEHGLTMYGVTKTALFGLTKALAGEMGPDIRVNCIAPGFVPTRFASFFVDNETIRKKLNERTMLKRLGSVEDMAAAAAFLASDDASFITAETIVVAGGVPSRL

SEQ ID NO: 2169 - DNA, 26 bp, Artificial sequence
  primer
atgtttatcctgtattttcagaggga

SEQ ID NO: 2170 - DNA, 24 bp, Artificial sequence
  primer
ttagataccgacgctaaccgtctc

SEQ ID NO: 2171 - protein, 354 aa, Artificial sequence
  consensus sequence
  Variant (2)..(8): Xaa in position 2 to 8 is any amino acid
  Variant (11)..(12): Xaa in position 11 to 12 is any amino acid
  Variant (13)..(22): Xaa in position 13 to 22 is any or no amino acid
  Variant (26)..(35): Xaa in position 26 to 35 is any amino acid
  Variant (37)..(57): Xaa in position 37 to 57 is any amino acid
  Variant (58)..(81): Xaa in position 58 to 81 is any or no amino acid
  Variant (83)..(93): Xaa in position 83 to 93 is any amino acid
  Variant (94)..(109): Xaa in position 94 to 109 is any or no amino acid
  Variant (111)..(114): Xaa in position 111 to 114 is any amino acid
  Variant (118)..(136): Xaa in position 118 to 136 is any amino acid
  Variant (137)..(149): Xaa in position 137 to 149 is any or no amino acid
  Variant (151)..(168): Xaa in position 151 to 168 is any amino acid
  Variant (169)..(189): Xaa in position 169 to 189 is any or no amino acid
  Variant (191)..(191): Xaa in position 191 is any amino acid
  Variant (193)..(196): Xaa in position 193 to 196 is any amino acid
  Variant (198)..(208): Xaa in position 198 to 208 is any amino acid
  Variant (209)..(212): Xaa in position 209 to 212 is any or no amino acid
  Variant (214)..(216): Xaa in position 214 to 216 is any amino acid
  Variant (218)..(236): Xaa in position 218 to 236 is any amino acid
  Variant (237)..(244): Xaa in position 237 to 244 is any or no amino acid
  Variant (246)..(248): Xaa in position 246 to 248 is any amino acid
  Variant (250)..(253): Xaa in position 250 to 253 is any amino acid
  Variant (255)..(279): Xaa in position 255 to 279 is any amino acid
  Variant (280)..(325): Xaa in position 280 to 325 is any or no amino acid
  Variant (327)..(333): Xaa in position 327 to 333 is any amino acid
  Variant (334)..(336): Xaa in position 334 to 336 is any or no amino acid
  Variant (338)..(341): Xaa in position 338 to 341 is any amino acid
  Variant (342)..(351): Xaa in position 342 to 351 is any or no amino acid
LXXXXXXXTGXXXXXXXXXXXXGIGXXXXXXXXXXGXXXXXXXXXXXXXXXXXXXXXXXXXXXXXXXXXXXXXXXXXXXXXDXXXXXXXXXXXXXXXXXXXXXXXXXXXDXXXXNAGXXXXXXXXXXXXXXXXXXXXXXXXXXXXXXXXNXXXXXXXXXXXXXXXXXXXXXXXXXXXXXXXXXXXXXXXGXIXXXXSXXXXXXXXXXXXXXXYXXXKXXXXXXXXXXXXXXXXXXXXXXXXXXXNXXXPXXXXTXXXXXXXXXXXXXXXXXXXXXXXXXXXXXXXXXXXXXXXXXXXXXXXXXXXXXXXXXXXXXXXXXXXXXXXLXXXXXXXXXXGXXXXXXXXXXXXXXDGG

SEQ ID NO: 2172 - DNA, 258 bp, GLYCINE MAX
  CDS (1)..(258)
atggctcgcgcaggagggataacaaacgcagtgaacgtgggaatcgcagtgcaagccgattgggagaaccgcgaattcatctctcacatttctctcaacgttcgtcgcctcttcgacttcctcgtccaattcgaggctacgacgaagagcaagttggcgtctttgaatgagaagctggatgtgttggagcggaggttggagctgcttgaagttcaagtgggcaatgcttcggctaatccttctctttttgccacttga

SEQ ID NO: 2173 - protein, 85 aa, GLYCINE MAX
MARAGGITNAVNVGIAVQADWENREFISHISLNVRRLFDFLVQFEATTKSKLASLNEKLDVLERRLELLEVQVGNASANPSLFAT

SEQ ID NO: 2174 - DNA, 414 bp, Zea mays subsp. mays
  CDS (61)..(297)
cgggtgctggtggaggaagaagcagcgcagcaggtggcagggatgggtcgcggcggcgggatggggaacccagtcaacgtgggcatcgcggtgcaggcggactgggagaaccgcgagttcatctccaacatctccctcaacgtccgacgcctcttcgacttcctcctcagattcgaagctacgacgaagagcaagctggcaagtttgaacgagaagctggacatcctagagcggaagctggaggtgcttgaagtccaagtgggcagcgcgacgaccaacccttccgtcttcaactaggaggggcgggtttatatgtttaaataaataaatgtaggtatgaatgttgcttgtaccaacgaattctggtcgctatctatcgtgtagtgtgttgtggaggatgttattattaatgtg

SEQ ID NO: 2175 - protein, 78 aa, Zea mays subsp. mays
MGNPVNVGIAVQADWENREFISNISLNVRRLFDFLLRFEATTKSKLASLNEKLDILERKLEVLEVQVGSATTNPSVFN

SEQ ID NO: 2176 - DNA, 426 bp, Zea mays
  CDS (58)..(312)
acagtttatttggtgctggtgctggtggaggaagaagcagcgcagcaggtggcagggatgggtcgcggcggcgggatggggaacccggtcaacgtgggcatcgcggtgcaggcggactgggagaaccgcgagttcatctccaacatctccctcaacgtccgacgcctcttcgacttcctcctcagattcgaagctacgacgaagagcaagctggcaagtttgaacgagaagctggacatcctagagcggaagctggagatgcttgaagtccaagtgggcagcgcgacgaccaacccttccgtcttcaactaggaatcgcgggtttatatgcttgtaccaacgaattctggtcgctatcaattatgtaatgtaatgtaatggattttgttattattattgtggtatgtgtaaagatgtgcagaatcg

SEQ ID NO: 2177 - protein, 84 aa, Zea mays
MGRGGGMGNPVNVGIAVQADWENREFISNISLNVRRLFDFLLRFEATTKSKLASLNEKLDILERKLEMLEVQVGSATTNPSVFN

SEQ ID NO: 2178 - DNA, 267 bp, Triticum aestivum
  CDS (1)..(267)
atggctcgcgcggggcaagggggcgggatggggagcgcggtgaacgtcgggatcgcggtgcaggcggactgggagaaccgcgagttcatctccaacatctccctcaacgtccgccgcctcttcgacttcctcctccgattcgaggccacgacgaagagcaagctggcgtcgctgaacgagaaactagacagcctagagcggaagctggaggtgctggaggtccaagtgagcagcgccaccaccaacccctccgttttcaacaactag

SEQ ID NO: 2179 - protein, 88 aa, Triticum aestivum
MARAGQGGGMGSAVNVGIAVQADWENREFISNISLNVRRLFDFLLRFEATTKSKLASLNEKLDSLERKLEVLEVQVSSATTNPSVFNN

SEQ ID NO: 2180 - DNA, 358 bp, Gossypium hirsutum
  CDS (45)..(302)
gatctgaaaaatcggcatctctttaggggaaaaaaggggaagaaatggcaagagcaggagggataacgaacgccgttaacgtagggatagcagtccaagccgattgggagaatcgcgaattcatctctcacatttccctcaatgttcgtcgcctctttgaatttctcctccaattcgaggctacaacgaagagcaaattagcatccttgaacgagaaactggacaccctggaacgtcgtttggagcttcttgaagttcaagttggaactgcgtccgctaacccttctcttttcagtacgtgattcatatttaaaagttgtatttgtttccatatctttgtcgggattttgttcctctc

SEQ ID NO: 2181 - protein, 85 aa, Gossypium hirsutum
MARAGGITNAVNVGIAVQADWENREFISHISLNVRRLFEFLLQFEATTKSKLASLNEKLDTLERRLELLEVQVGTASANPSLFST

SEQ ID NO: 2182 - DNA, 231 bp, Drosophila melanogaster
  CDS (1)..(231)
atgagtggggctcacagagaggcgatccaaaagcagatccaccaggactgggcgaacagggagtatatcgaagtgataactgccagcataaagagaatcaccgactttctgaactctttcgatatgtcctgtcgctcccgtctggcggtgctgaacgaaaaactaacgatcctggagcggcgcatagactatctggaggcgtgcgtcgcccagggtgaaacattaacgtaa

SEQ ID NO: 2183 - protein, 76 aa, Drosophila melanogaster
MSGAHREAIQKQIHQDWANREYIEVITASIKRITDFLNSFDMSCRSRLAVLNEKLTILERRIDYLEACVAQGETLT

SEQ ID NO: 2184 - DNA, 234 bp, Strongylocentrotus purpuratus
  CDS (1)..(234)
atgtctcgaccaatgccacaatcctccgttcggaatcaaattcaagaagactgggcgaacagagagtacatagaaattatcacaacgaatattaaaaagatagcggattttctcaactcttttgatacatcatgcagatcaagacttgccatattgaatgaaaaattaacaggacttgagagaaggatagagtaccttgaagctagagtaacaagaggggacacactggtctga

SEQ ID NO: 2185 - protein, 77 aa, Strongylocentrotus purpuratus
MSRPMPQSSVRNQIQEDWANREYIEIITTNIKKIADFLNSFDTSCRSRLAILNEKLTGLERRIEYLEARVTRGDTLV

SEQ ID NO: 2186 - DNA, 384 bp, Nasonia vitripennis
  CDS (56)..(286)
gcttgtcaaaagaaaacgcaaattgaaagaaaaagtacctcttaactgttcgaaaatgtcgactggacacagagaagcgattcaaaagcagatacaacaagattgggcaaatcgagagtacattgaagttatcacgggcagtattaaaaaaatcactgattttcttaattcttttgatatgtcttgtagatcccgattagctgttctaaacgaaaagctgaccacattggaacgaagaattgaatatttagaagcatgcgttacaaaaggcgaaacacttacatagataatgagtttgccgacgagtatgttctatttattctacgcttttttacttgattcattgtacataaccataggtttcaataactaattaaattcaaa

SEQ ID NO: 2187 - protein, 76 aa, Nasonia vitripennis
MSTGHREAIQKQIQQDWANREYIEVITGSIKKITDFLNSFDMSCRSRLAVLNEKLTTLERRIEYLEACVTKGETLT

SEQ ID NO: 2188 - DNA, 228 bp, Anopheles gambiae str. PEST
  CDS (1)..(228)
atggatgcccatcgggaagcgatccagaaacagatacaccaggactgggccaatcgagagtacatcgaagtgataacggccagcatcaagcgtatcaccgatttcctcaactccttcgatatgtcctgccgatcccggctggcggtgctgaacgagaagctaactacgctggaacgacggatcgactatctggaggcgtgcgtcacgaaaggcgaaacgctgcaatag

SEQ ID NO: 2189 - protein, 75 aa, Anopheles gambiae str. PEST
MDAHREAIQKQIHQDWANREYIEVITASIKRITDFLNSFDMSCRSRLAVLNEKLTTLERRIDYLEACVTKGETLQ

SEQ ID NO: 2190 - DNA, 231 bp, Tribolium castaneum
  CDS (1)..(231)
atggctgctcctagaggagagacagtccccaagcccatccaacaagactgggtaaaccgcgaatacatcgaagtgataaccgtcagcataaaaaagatcaccgatttcctcaattctttcgacttatcttgtcgatcaaaactcgccgttttaaacgaaaagttgacaactctcgagcgaaagatcgactatttggaagcttgtgtcaccaaaggggaaaccttgacataa

SEQ ID NO: 2191 - protein, 76 aa, Tribolium castaneum
MAAPRGETVPKPIQQDWVNREYIEVITVSIKKITDFLNSFDLSCRSKLAVLNEKLTTLERKIDYLEACVTKGETLT

SEQ ID NO: 2192 - DNA, 948 bp, Oryza sativa subsp
  CDS (1)..(948)
atggctcgcgcgggcgggcatgggatggggaacccggtgaacgtggggatcgcggtgcaggcggactgggagaaccgcgagttcatctccaacatctccctcaacgtccgtcgcctcttcgacttcctcctccgattcgaagctactacgaagagcaaacttgcgtccttgaatgagaagctggacatcctagagcggaaactggaggtgcttgaggttcaagtgagcagcgcaacaaccaatccatccgttttcaactattgctcatcaatgaatgaatcaatcaatgggaaaatgaatgagttattcgcagtggcaggtagggcgggggtggcgatgatgaatatggtgtcgagcagcagcatccaaccggggcagatacatagcatatggcagcgacgacaaggaggtgagagtagagggagatatgtggtgatgagcagcggcagcgtcaggaagagcagcagcagcaggaggagggtggtggcggttatccgggccgtgggcgacggcgcaggtgaatcgacgagcggcaaggacgaggaggaggaggagaagaggcgtcgggaggagctggagcggttggtgggtggaccggaggacgcgacgttcagcggggcggacctggcggcgctgataaggagcaagtacgggaggtcgtacgacgtgacgctgataaagaaggagttcatggggcggaacctgctggccatgaacgtcatgtggaagtaccgggagcagcggtccttcccgctgacggaggaggagtacctgctccgcctcgacgacgtcgccgcctccctccgctgctggggcgccgtcgcccacgtccgctcctccctcgccaagctcaaggaccgcccccgcatcggcaaggccgtcagcatcttcatcgacatgcccaccgacgactccggcgcccgctccaacgagtggatctacaaataa

SEQ ID NO: 2193 - protein, 315 aa, Oryza sativa subsp
MARAGGHGMGNPVNVGIAVQADWENREFISNISLNVRRLFDFLLRFEATTKSKLASLNEKLDILERKLEVLEVQVSSATTNPSVFNYCSSMNESINGKMNELFAVAGRAGVAMMNMVSSSSIQPGQIHSIWQRRQGGESRGRYVVMSSGSVRKSSSSRRRVVAVIRAVGDGAGESTSGKDEEEEEKRRREELERLVGGPEDATFSGADLAALIRSKYGRSYDVTLIKKEFMGRNLLAMNVMWKYREQRSFPLTEEEYLLRLDDVAASLRCWGAVAHVRSSLAKLKDRPRIGKAVSIFIDMPTDDSGARSNEWIYK

SEQ ID NO: 2194 - DNA, 258 bp, Vitis vinifera
  CDS (1)..(258)
atggcgagagcgggtgggatcaccaacgcggtgaatgtgggaattgcagtgcaagcagattgggagaaccgggaattcatctctcacatttccctcaatatccgtcgcctcttcgaattcctcgtccaattcgaggctacaacaaagagcaaattggcatcattgaatgagaagcttgatacgctagagcgtcgtctagaattgcttgaagttcaagtgggtactgcatcatccaacccatctctttttgctacatga

SEQ ID NO: 2195 - protein, 85 aa, Vitis vinifera
MARAGGITNAVNVGIAVQADWENREFISHISLNIRRLFEFLVQFEATTKSKLASLNEKLDTLERRLELLEVQVGTASSNPSLFAT

SEQ ID NO: 2196 - DNA, 231 bp, Triatoma infestans
  CDS (1)..(231)
atggccggtgtacatagagaagcaatacaaaaacaaatccaacaggattgggcaaatcgtgaatatattgaagtaattactggcagtatcaagaaaataacagattttttaaattcatttgatatgtcttgcagatctaggttggctgtactgaatgaaaaattgactacactggaaagacgtattgaatatcttgaagcacgggttacgaaaggagaaacccttacttga

SEQ ID NO: 2197 - protein, 76 aa, Triatoma infestans
MAGVHREAIQKQIQQDWANREYIEVITGSIKKITDFLNSFDMSCRSRLAVLNEKLTTLERRIEYLEARVTKGETLT

SEQ ID NO: 2198 - DNA, 240 bp, Physcomitrella patens
  CDS (1)..(240)
atggcgaagaacgggattaataacagtgtcgccgtcggcattgctgtacaatctgactgggacaatcgccatttttcgagctccctgtcgctgaacgtccggcgccttttcgagttccttttgcagtttgaatcgtccaccaggagtaagctagcaaccctgaacgagaagctaacggtgctggagcgtcagctggagtttctagaggctcagtttagcactgccattaaccctgtctaa

SEQ ID NO: 2199 - protein, 79 aa, Physcomitrella patens
MAKNGINNSVAVGIAVQSDWDNRHFSSSLSLNVRRLFEFLLQFESSTRSKLATLNEKLTVLERQLEFLEAQFSTAINPV

SEQ ID NO: 2200 - DNA, 231 bp, Ixodes scapularis
  CDS (1)..(231)
atgtctgtgtcggaaagagaagcgatccagaaacagatacagcaggactgggccaaccgagaatacatcgaaataatcagtggaagcatcaaaaagatcgcagacttcctgacatcattcgacatgtcatgcagagcacgactcgcaaccctaaacgaaaagcttacgtccctggaaagaagaatagagtatttggaggccagggtcacaaaaggagaaaccttgtcctag

SEQ ID NO: 2201 - protein, 76 aa, Ixodes scapularis
MSVSEREAIQKQIQQDWANREYIEIISGSIKKIADFLTSFDMSCRARLATLNEKLTSLERRIEYLEARVTKGETLS

SEQ ID NO: 2202 - DNA, 258 bp, Arabidopsis thaliana
  CDS (1)..(258)
atggcgaaagctggagggatcacgaacgcagtaaacgtaggaatcgctgttcaagcagattgggagaatcgagaatttatctcacatatctctcttaatgttcgtcgtctcttcgaattccttgttcaatttgaatcaaccacaaagagcaagttggcttctttgaatgagaagttggatctgttggaacgtcgcttggaaatgctggaggtgcaagtaagtaccgcgacagcaaatccttctctgtttgcgacgtga

SEQ ID NO: 2203 - protein, 85 aa, Arabidopsis thaliana
MAKAGGITNAVNVGIAVQADWENREFISHISLNVRRLFEFLVQFESTTKSKLASLNEKLDLLERRLEMLEVQVSTATANPSLFAT

SEQ ID NO: 2204 - DNA, 255 bp, Zea mays
  CDS (1)..(255)
atgggtcgcggcggcgggatggggaacccagtcaacgtgggcatcgcggtgcaggcggactgggagaaccgcgagttcatctccaacatctccctcaacgtccgacgcctcttcgacttcctcctcagattcgaagctacgacgaagagcaagctggcaagtttgaacgagaagctggacatcctagagcggaagctggaggtgcttgaagtccaagtgggcagcgcgacgaccaacccttccgtcttcaactag

SEQ ID NO: 2205 - protein, 84 aa, Zea mays
MGRGGGMGNPVNVGIAVQADWENREFISNISLNVRRLFDFLLRFEATTKSKLASLNEKLDILERKLEVLEVQVGSATTNPSVFN

SEQ ID NO: 2206 - DNA, 261 bp, Oryza sativa subsp
  CDS (1)..(261)
atggctcgcgcgggcgggcatgggatggggaacccggtgaacgtggggatcgcggtgcaggcggactgggagaaccgcgagttcatctccaacatctccctcaacgtccgtcgcctcttcgacttcctcctccgattcgaagctactacgaagagcaaacttgcgtccttgaatgagaagctggacatcctagagcggaaactggaggtgcttgaggttcaagtgagcagcgcaacaaccaatccatccgttttcaactag

SEQ ID NO: 2207 - protein, 86 aa, Oryza sativa subsp
MARAGGHGMGNPVNVGIAVQADWENREFISNISLNVRRLFDFLLRFEATTKSKLASLNEKLDILERKLEVLEVQVSSATTNPSVFN

SEQ ID NO: 2208 - DNA, 231 bp, Oryza sativa
  CDS (1)..(231)
atggctcgcgcgggcgggcatgggatggggaacccggtgaacgtggggatcgcggtgcaggcggactgggagaaccgcgagttcatctccaacatctccctcaacgtccgtcgcctcttcgacttcctcctccgattcgaagctactacgaagagcaaacttgcgtccttgaatgagaagctggacatcctagagcggaaactggaggtgcttgaggttcaatgccagtag

SEQ ID NO: 2209 - protein, 76 aa, Oryza sativa
MARAGGHGMGNPVNVGIAVQADWENREFISNISLNVRRLFDFLLRFEATTKSKLASLNEKLDILERKLEVLEVQCQ

SEQ ID NO: 2210 - DNA, 23 bp, Artificial sequence
  primer
atggctcgcgcaggagggataac

SEQ ID NO: 2211 - DNA, 20 bp, Artificial sequence
  primer
tcaagtggcaaaaagagaag

SEQ ID NO: 2212 - protein, 76 aa, Artificial sequence
  consensus sequence
  Variant (2)..(12): Xaa in position 2 to 12 is any amino acid
  Variant (13)..(20): Xaa in position 13 to 20 is any or no amino acid
  Variant (22)..(22): Xaa in position 22 is any amino acid
  Variant (25)..(25): Xaa in position 25 is any amino acid
  Variant (29)..(29): Xaa in position 29 is any amino acid
  Variant (31)..(32): Xaa in position 31 to 32 is any amino acid
  Variant (34)..(42): Xaa in position 34 to 42 is any amino acid
  Variant (45)..(46): Xaa in position 45 to 46 is any amino acid
  Variant (48)..(52): Xaa in position 48 to 52 is any amino acid
  Variant (54)..(54): Xaa in position 54 is any amino acid
  Variant (57)..(57): Xaa in position 57 is any amino acid
  Variant (63)..(64): Xaa in position 63 to 64 is any amino acid
  Variant (68)..(69): Xaa in position 68 to 69 is any amino acid
  Variant (71)..(71): Xaa in position 71 is any amino acid
  Variant (74)..(75): Xaa in position 74 to 75 is any amino acid
MXXXXXXXXXXXXXXXXXXXQXDWXNREXIXXIXXXXXXXXXFLXXFXXXXXSXLAXLNEKLXXLERXXEXLEXXV

SEQ ID NO: 2213 - protein, 59 aa, Artificial sequence
  protein pattern
  Variant (2)..(2): Xaa in position 2 is any amino acid
  Variant (3)..(3): Xaa in position 3 is any or no amino acid
  Variant (5)..(5): Xaa in position 5 is any or no amino acid
  Variant (8)..(8): Xaa in position 8 is any amino acid
  Variant (12)..(12): Xaa in position 12 is Phe or Tyr
  Variant (14)..(14): Xaa in position 14 is Glu or Ser
  Variant (15)..(15): Xaa in position 15 is any amino acid
  Variant (17)..(17): Xaa in position 17 is Ser or Thr
  Variant (18)..(18): Xaa in position 18 is Ala, Gly, Leu or Val
  Variant (19)..(19): Xaa in position 19 is Asn or Ser
  Variant (20)..(20): Xaa in position 20 is Ile or Val
  Variant (21)..(22): Xaa in position 21 to 22 is Lys or Arg
  Variant (23)..(23): Xaa in position 23 is Ile or Leu
  Variant (24)..(24): Xaa in position 24 is any amino acid
  Variant (25)..(25): Xaa in position 25 is Asp or Glu
  Variant (28)..(28): Xaa in position 28 is any amino acid
  Variant (29)..(29): Xaa in position 29 is Gln, Arg or Ser
  Variant (31)..(31): Xaa in position 31 is Asp or Glu
  Variant (32)..(32): Xaa in position 32 is any amino acid
  Variant (33)..(33): Xaa in position 33 is Ser or Thr
  Variant (34)..(34): Xaa in position 34 is Cys or Thr
  Variant (35)..(35): Xaa in position 35 is Lys or Arg
  Variant (37)..(37): Xaa in position 37 is Lys or Arg
  Variant (40)..(40): Xaa in position 40 is Ser or Val
  Variant (46)..(46): Xaa in position 46 is Asp or Thr
  Variant (47)..(47): Xaa in position 47 is any amino acid
  Variant (51)..(51): Xaa in position 51 is Lys or Arg
  Variant (52)..(52): Xaa in position 52 is Ile or Leu
  Variant (53)..(53): Xaa in position 53 is Asp or Glu
  Variant (54)..(54): Xaa in position 54 is any amino acid
  Variant (57)..(57): Xaa in position 57 is Ala or Val
  Variant (58)..(58): Xaa in position 58 is any amino acid
  Variant (59)..(59): Xaa in position 59 is Cys or Val
IXXQXDWXNREXIXXIXXXXXXXXXFLXXFXXXXXSXLAXLNEKLXXLERXXXXLEXXX

SEQ ID NO: 2214 - DNA, 957 bp, SYNECHOCYSTIS SP.
  CDS (1)..(957): transl_table=11
atgcccgagtatttgcttctgcccgctggcctaatttccctctccctggcgatcgccgctggactgtatctcctaactgcccggggctatcagtcatcggattccgtggccaacgcctacgaccaatggacagaggacggcattttggaatattactggggcgaccatatccacctcggccattatggcgatccgccagtggccaaggatttcatccaatcgaaaattgattttgtccatgccatggcccagtggggcggattagatacacttccccccggcacaacggtattggatgtgggttgcggcattggcggtagcagtcgcattctcgccaaagattatggttttaacgttaccggcatcaccattagtccccaacaggtgaaacgggcgacggaattaactcctcccgatgtgacggccaagtttgcggtggacgatgctatggctttgtcttttcctgacggtagtttcgacgtagtttggtcggtggaagcagggccccacatgcctgacaaagctgtgtttgccaaggaattactgcgggtcgtgaaaccagggggcattctggtggtggcggattggaatcaacgggacgatcgccaagtgcccctcaacttctgggaaaaaccagtgatgcgacaactgttggatcaatggtcccaccctgcctttgccagcattgaaggttttgcggaaaatttggaagccacgggtttggtggagggccaggtgactactgctgattggactgtaccgaccctccccgcttggttggataccatttggcagggcattatccggccccagggctggttacaatacggcattcgtgggtttatcaaatccgtgcgggaagtaccgactattttattgatgcgccttgcctttggggtaggactttgtcgcttcggtatgttcaaagcagtgcgaaaaaacgccactcaagcttaa

SEQ ID NO: 2215 - protein, 318 aa, SYNECHOCYSTIS SP.
MPEYLLLPAGLISLSLAIAAGLYLLTARGYQSSDSVANAYDQWTEDGILEYYWGDHIHLGHYGDPPVAKDFIQSKIDFVHAMAQWGGLDTLPPGTTVLDVGCGIGGSSRILAKDYGFNVTGITISPQQVKRATELTPPDVTAKFAVDDAMALSFPDGSFDVVWSVEAGPHMPDKAVFAKELLRVVKPGGILVVADWNQRDDRQVPLNFWEKPVMRQLLDQWSHPAFASIEGFAENLEATGLVEGQVTTADWTVPTLPAWLDTIWQGIIRPQGWLQYGIRGFIKSVREVPTILLMRLAFGVGLCRFGMFKAVRKNATQA

SEQ ID NO: 2216 - DNA, 930 bp, Synechocystis sp
  CDS (10)..(915): transl_table=11
gatatcaccatggccgctggactgtatctcctaactgcccggggctatcagtcatcggattccgtggccaacgcctacgaccaatggacagaggacggcattttggaatattactggggcgaccatatccacctcggccattatggcgatccgccagtggccaaggatttcatccaatcgaaaattgattttgtccatgccatggcccagtggggcggattagatacacttccccccggcacaacggtattggatgtgggttgcggcattggcggtagcagtcgcattctcgccaaagattatggttttaacgttaccggcatcaccattagtccccaacaggtgaaacgggcgacggaattaactcctcccgatgtgacggccaagtttgcggtggacgatgctatggctttgtcttttcctgacggtagtttcgacgtagtttggtcggtggaagcagggccccacatgcctgacaaagctgtgtttgccaaggaattactgcgggtcgtgaaaccagggggcattctggtggtggcggattggaatcaacgggacgatcgccaagtgcccctcaacttctgggaaaaaccagtgatgcgacaactgttggatcaatggtcccaccctgcctttgccagcattgaaggttttgcggaaaatttggaagccacgggtttggtggagggccaggtgactactgctgattggactgtaccgaccctccccgcttggttggataccatttggcagggcattatccggccccagggctggttacaatacggcattcgtgggtttatcaaatccgtgcgggaagtaccgactattttattgatgcgccttgcctttggggtaggactttgtcgcttcggtatgttcaaagcagtgcgaaaaaacgccactcaagcttaaattcttaaggtcgac

SEQ ID NO: 2217 - protein, 301 aa, Synechocystis sp
MAAGLYLLTARGYQSSDSVANAYDQWTEDGILEYYWGDHIHLGHYGDPPVAKDFIQSKIDFVHAMAQWGGLDTLPPGTTVLDVGCGIGGSSRILAKDYGFNVTGITISPQQVKRATELTPPDVTAKFAVDDAMALSFPDGSFDVVWSVEAGPHMPDKAVFAKELLRVVKPGGILVVADWNQRDDRQVPLNFWEKPVMRQLLDQWSHPAFASIEGFAENLEATGLVEGQVTTADWTVPTLPAWLDTIWQGIIRPQGWLQYGIRGFIKSVREVPTILLMRLAFGVGLCRFGMFKAVRKNATQA

SEQ ID NO: 2218 - DNA, 936 bp, Prochlorococcus marinus
  CDS (1)..(936): transl_table=11
atgtccatttttttaatatcttcacttgttatatttttaactttattattttcttctctaatactttggagaattaatactagaaaatatatttcttcgagaactgtagctacagcatatgattcctggactcaagataaattactagaaagattatggggagaacatatacatctaggtttctatcctctaaataaaaatattgattttagagaggctaaagttcaatttgtacatgagttagtaagttggagtggtttagataaattaccaagaggttctaggattttagatgtcggttgcggaataggtggaagttctagaattctcgccaattattatggatttaatgtcactggaataactattagtccagctcaagtaaaaagagcaaaagaacttactccttatgaatgtaaatgcaacttcaaagttatggatgctttggatttgaaatttgaagagggaatatttgatggtgtttggagtgttgaggcaggagcccatatgaataataaaactaaatttgcagatcaaatgttaagaactttaagacctggaggatatttagcattggctgattggaattcaagagatttacaaaagcaacccccatccatgattgaaaaaataatcttaaaacaattacttgaacagtgggtacatcctaaatttattagtatcaatgaattcagtagtattcttataaataacaaaaatagttcaggtcaagttatatcctctaattggaattcttttacaaatccctcttggtttgattcaatatttgaaggaatgagaagacctaattcaattttatcccttggtccaggagcaattataaagtctatcagagagatacctacaatacttttaatggattgggcctttaaaaaaggtttaatggaatttggagtttataaatgtagaggttaa

SEQ ID NO: 2219 - protein, 311 aa, Prochlorococcus marinus
MSIFLISSLVIFLTLLFSSLILWRINTRKYISSRTVATAYDSWTQDKLLERLWGEHIHLGFYPLNKNIDFREAKVQFVHELVSWSGLDKLPRGSRILDVGCGIGGSSRILANYYGFNVTGITISPAQVKRAKELTPYECKCNFKVMDALDLKFEEGIFDGVWSVEAGAHMNNKTKFADQMLRTLRPGGYLALADWNSRDLQKQPPSMIEKIILKQLLEQWVHPKFISINEFSSILINNKNSSGQVISSNWNSFTNPSWFDSIFEGMRRPNSILSLGPGAIIKSIREIPTILLMDWAFKKGLMEFGVYKCRG

SEQ ID NO: 2220 - DNA, 1038 bp, Gossypium hirsutum
  CDS (1)..(1038)
atggctgccgcgttacaattacaaacacacccttgcttccatggcacgtgccaactctcacctccgccacgaccttccgtttccttcccttcttcctcccgctcgtttccatctagcagacgttccctgtccgcgcatgtgaaggcggcggcgtcgtctttgtccaccaccaccttgcaggaagggatagcggagttttacgatgagtcgtcggggatttgggaagacatatggggtgaccatatgcaccatggatattacgagccgggttccgatatttcgggttcagatcatcgtgccgctcagattcgaatggtcgaagaatcgctccgttttgctggaatatcagaggacccagcaaacaggcccaagagaatagttgatgttgggtgtgggataggaggcagttctaggtatctagcaaggaaatatggggcaaaatgccaaggcattactttgagccctgttcaagctggaagagccaatgctcttgctaatgctcaaggactagcagaacaggtttgttttgaagttgcagatgccttgaaccaaccattccctgatgaccaatttgatcttgtttggtctatggaaagcggagaacacatgcctgacaaacccaagtttgttaaagagctggtgcgagtggcagctccaggaggcacaataatagtagtgacatggtgccatagggatcttggtccatctgaagagtctttgcagccatgggagcaaaagcttttaaacagaatatgtgatgcttactatttaccagagtggtgttctacttctgattatgtcaaattatttcagtccctatctctccaggatataaaggcaggagactggactgagaatgtagcacccttttggccagcagtgatacgttcagcattgacatggaagggcttcacatcgctgctacgaagtggattaaaaacaataaaaggtgcactggtgatgccattgatgatcgaaggtttccagaaaggggtgataaagtttgccatcattgcttgccggaagccagctgagtag

SEQ ID NO: 2221 - protein, 345 aa, Gossypium hirsutum
MAAALQLQTHPCFHGTCQLSPPPRPSVSFPSSSRSFPSSRRSLSAHVKAAASSLSTTTLQEGIAEFYDESSGIWEDIWGDHMHHGYYEPGSDISGSDHRAAQIRMVEESLRFAGISEDPANRPKRIVDVGCGIGGSSRYLARKYGAKCQGITLSPVQAGRANALANAQGLAEQVCFEVADALNQPFPDDQFDLVWSMESGEHMPDKPKFVKELVRVAAPGGTIIVVTWCHRDLGPSEESLQPWEQKLLNRICDAYYLPEWCSTSDYVKLFQSLSLQDIKAGDWTENVAPFWPAVIRSALTWKGFTSLLRSGLKTIKGALVMPLMIEGFQKGVIKFAIIACRKPAE

SEQ ID NO: 2222 - DNA, 1278 bp, Chlamydomonas reinhardtii
  CDS (1)..(1278)
atgcttgggcaatccctgcgaggcgatgtgggccggtcagcttctgtgaggtcgtcgcaacccactgcgtcaatcgcgcccatctcatctaggtcagcaagccggcgcgtggcctgcgcgtccgcacaatcgaccgatgtcgcctctgaggcagtggccacgaccagcgctggcgcagcccgctctgctgctcgggaggtataccagttgagcgatgctgcgtgctgctccacctctgcccccaccgcgagcactacttttgctggcgtcgacccaactgtcttggcagccgtcgctgggctagggctaagtctgtttgcgctcaagcgcatcctggacaccccctcgcgcaaatatgacaacaacgtgggccaggagtatgatgcgtggacggaggaaggcgttctggagtactactggggcgagcacatccatttgggctattattcggacgaggagctggcgcgcgggtacctaaagaaggacttcaagcaggcaaagttcgacttcgtggacgagatgctccgattcagcggggcgaagaaccccgcgaccatcctggacgtggggtgtggcttcggtggcacctcccgccacctggccaagaagttccgcgacgccaacgtgaccggtatcacgctgtctcccaagcaggtgcagcgcggcacggagctggccaaggagcagggcgtgggcaacgtcaagttccaggtgatggacgcgctggccatggagttccctgacaactcctttgacctggtgtgggcgtgcgagagcggcgagcacatgcccgacaagcgcaagtacatcgaggagatgacgcgtgtgctcaagcccggcggcacgctcgtcattgcctgctggtgccagcgcgaggagggcgacaagcccttcacgccccaggacaaggaggacctccagttcctgtacgacgagtgggcgcacccctacttcatctccatcgccgagttcggccgcctcatgaacggcacgggcaagctggacggcgtcaagctggaggactggaacaagaacaccatctcgtcctggcggcacagcatctgggtgggcgtgttcgacccctgggtcgtggtgttcaaggggccgcgcatctggtacaagaccgtgcgcgagatcgtgaccctggagcgcatgcaccaggcgttcgagaagggcctgatggagtacggcatgatgacggccacgaagaagctggcaccggcgagcgagtccgcggccaacacgcaggaccgcgtgccggtgggcgccaaggcgtga

SEQ ID NO: 2223 - protein, 425 aa, Chlamydomonas reinhardtii
MLGQSLRGDVGRSASVRSSQPTASIAPISSRSASRRVACASAQSTDVASEAVATTSAGAARSAAREVYQLSDAACCSTSAPTASTTFAGVDPTVLAAVAGLGLSLFALKRILDTPSRKYDNNVGQEYDAWTEEGVLEYYWGEHIHLGYYSDEELARGYLKKDFKQAKFDFVDEMLRFSGAKNPATILDVGCGFGGTSRHLAKKFRDANVTGITLSPKQVQRGTELAKEQGVGNVKFQVMDALAMEFPDNSFDLVWACESGEHMPDKRKYIEEMTRVLKPGGTLVIACWCQREEGDKPFTPQDKEDLQFLYDEWAHPYFISIAEFGRLMNGTGKLDGVKLEDWNKNTISSWRHSIWVGVFDPWVVVFKGPRIWYKTVREIVTLERMHQAFEKGLMEYGMMTATKKLAPASESAANTQDRVPVGAKA

SEQ ID NO: 2224 - DNA, 1017 bp, Chlamydomonas reinhardtii
  CDS (1)..(1017)
atgcccagcactgcgctgcaagggcacacgctgccctcaagctctgcatgcctaggtagagctacacgccatgtatgcagagtgtccacacggagccggcgcgctgtgacggttcgcgcgggaccgctggagacgctcgtgaagccgctcacgacgctgggaaaggtcagcgacctcaaagtcggcatcgccaacttctatgacgagtcttcggagctgtgggagaacatgtggggggagcacatgcatcacggctactatcccaagggtgcccccgtcaagagcaaccagcaggcacagatcgatatgattgaggagacgctcaaggtggctggtgtgacacaagccaagaagatggtggacgtgggctgcggcatcggcggcagctcgcgctacatcagccgcaagttcggctgcacctccaacggcatcacgctcagccccaagcaggctgctcgcgccaatgcgctgagcaaggagcagggctttggcgacaagctgcagttccaggtgggcgacgcgctggcgcagccgttcgaggccggcgccttcgacctggtgtggtccatggagagcggcgagcacatgcccgacaagaagaagtttgtgtcggagctggcgcgcgtgtgtgcgcccggcggcaccgtgattgtggtgacgtggtgccaccgcgtgttgggtccgggcgaggcgggcttgcgcgaggacgagaaggcgctgctggaccgcatcaacgaggcctactacctgcccgactggtgctccgtggcagactaccagaaactgttcgaggcacaaggcctgactgacatccagacccgcgactggagccaggaggtgtcgcccttctggggcgccgtgatcgccacggccctgaccagcgagggtctggcgggtctggccaaggcgggctggaccaccatcaagggcgccctggtgatgccgctcatggccgagggcttcagacgcggcctcatcaagttcaacctcatcagcggccgcaagctgcagcagtag

SEQ ID NO: 2225 - protein, 338 aa, Chlamydomonas reinhardtii
MPSTALQGHTLPSSSACLGRATRHVCRVSTRSRRAVTVRAGPLETLVKPLTTLGKVSDLKVGIANFYDESSELWENMWGEHMHHGYYPKGAPVKSNQQAQIDMIEETLKVAGVTQAKKMVDVGCGIGGSSRYISRKFGCTSNGITLSPKQAARANALSKEQGFGDKLQFQVGDALAQPFEAGAFDLVWSMESGEHMPDKKKFVSELARVCAPGGTVIVVTWCHRVLGPGEAGLREDEKALLDRINEAYYLPDWCSVADYQKLFEAQGLTDIQTRDWSQEVSPFWGAVIATALTSEGLAGLAKAGWTTIKGALVMPLMAEGFRRGLIKFNLISGRKLQQ

SEQ ID NO: 2226 - DNA, 930 bp, Prochlorococcus marinus str. MIT 9211
  CDS (1)..(930): transl_table=11
atgggtacattaatttctttattggttggtattttattaatattgatcatatggatttggttaaagactaatcgagcttataagagcaaatcaagtgtttcactagcctatgattcttggactaatgaccgccttctagagagattgtggggagaacatattcatcttggctattacaaagatagttctgtaaaaactgattttaggcaagcaaaagttgattttgtacatcaattagtcaaatggagcggtatggatcatttgccaaaaggctcacgaattcttgatattggttgtggtataggaggtagtgcaagaatcttggcaagagattataactttgatgttttaggaattactattagtcctctccaggttcggagagcccaagaattgactcctgaggactctacttgtcgattcgaagtaatggatgctttggatcttcaactagaaaatggcagctttgatggtgtatggagtgtggaagctgggccgcatatacctgataaacaactttatgcagatgagatgcttcgtgtattacgtccaggcggtgttttggctgttgcggattggaatagaagagatatccaaaagaagaaatatgattttttggaagaacttgtgcttcgtcagcttttaaatcaatgggcccatcccgaattttctactattaatgcctttcaaaagaatttatcgaatagtgcatattctgcaggtactgcagatacagatgattggacaagatttacgataccttcctggaatgattcaataatcgaaggaattaaaagaccaaaagtcttttttgatttggggccaaaatccttctataaaggatttcgcgagattcctactatattattaatgcggtgggctttttctgtaggcctaatggagtttggtgtctttagaactagaggctga

SEQ ID NO: 2227 - protein, 309 aa, Prochlorococcus marinus str. MIT 9211
MGTLISLLVGILLILIIWIWLKTNRAYKSKSSVSLAYDSWTNDRLLERLWGEHIHLGYYKDSSVKTDFRQAKVDFVHQLVKWSGMDHLPKGSRILDIGCGIGGSARILARDYNFDVLGITISPLQVRRAQELTPEDSTCRFEVMDALDLQLENGSFDGVWSVEAGPHIPDKQLYADEMLRVLRPGGVLAVADWNRRDIQKKKYDFLEELVLRQLLNQWAHPEFSTINAFQKNLSNSAYSAGTADTDDWTRFTIPSWNDSIIEGIKRPKVFFDLGPKSFYKGFREIPTILLMRWAFSVGLMEFGVFRTRG

SEQ ID NO: 2228 - DNA, 954 bp, Synechocystis sp. PCC 6803
  CDS (1)..(954): transl_table=11
atggtttaccatgttaggcctaagcacgccctgttcttagcattctattgttatttctctttgcttaccatggccagcgccaccattgccagtgcagacctctacgaaaaaattaaaaatttctacgacgactccagcggtctctgggaagacgtttggggtgagcatatgcaccacggctactacggtccccacggcacctatcggatcgatcgccgccaggctcaaattgatctgatcaaagaactattggcctgggcagtgccccaaaatagcgccaaaccacgaaaaattctcgatttaggctgtggcattggcggcagtagtttgtacttggcccagcaacaccaagcagaagtgatgggggctagtctttccccagtgcaggtggaacgggcgggggaaagggccagggccctggggttgggctcaacctgccagtttcaggtggccaatgccttggatttgccctttgcttccgattcctttgactgggtttggtcgttggaaagtggggagcacatgcccaacaaagctcagtttttacaagaagcttggcgggtacttaaaccaggtggccgtctgattttagcgacctggtgtcatcgtcccattgatcccggcaatggccccctgactgccgatgaacgtcgccatctccaagccatctatgacgtttactgtttgccctatgtggtttccctgccggactacgaggcgatcgccagggaatgtgggtttggggaaattaagactgccgattggtcagtggcggtggcacctttttgggaccgggtgattgagtctgcgttcgatccccgggtgttgtgggccttggggcaagcggggccaaaaattatcaatgccgccctgtgtttacgattaatgaaatggggctatgaacggggattagtgcgttttggcttattaacggggataaagcctttagtttga

SEQ ID NO: 2229 - protein, 317 aa, Synechocystis sp. PCC 6803
MVYHVRPKHALFLAFYCYFSLLTMASATIASADLYEKIKNFYDDSSGLWEDVWGEHMHHGYYGPHGTYRIDRRQAQIDLIKELLAWAVPQNSAKPRKILDLGCGIGGSSLYLAQQHQAEVMGASLSPVQVERAGERARALGLGSTCQFQVANALDLPFASDSFDWVWSLESGEHMPNKAQFLQEAWRVLKPGGRLILATWCHRPIDPGNGPLTADERRHLQAIYDVYCLPYVVSLPDYEAIARECGFGEIKTADWSVAVAPFWDRVIESAFDPRVLWALGQAGPKIINAALCLRLMKWGYERGLVRFGLLTGIKPLV

SEQ ID NO: 2230 - DNA, 843 bp, Nostoc sp. PCC 7120
  CDS (1)..(843): transl_table=11
atgagtgcaacactttaccaacaaattcagcaattttacgatgcttcctctgggctgtgggaagagatttggggcgaacatatgcaccacggctattatggtgcagacggtactgaacaaaaaaaccgccgtcaggcgcaaattgatttaattgaagaattactcacttgggcaggagtacaaacagcagaaaatatactagatgtgggttgtggtattggtggtagttctctgtatttggcaggaaagttgaatgctaaagctacaggaattaccctgagtccagtgcaagccgctagagccacagaaagagccaaggaagctggtttaagtggtagaagtcagtttttagtggcaaatgcccaagcaatgccttttgatgataattcttttgacttggtgtggtcgctagaaagtggcgaacatatgccagataaaaccaagtttttgcaagagtgttatcgagtcttgaaaccgggcggtaagttaatcatggtgacatggtgtcatcgtcccactgataaaacaccactgacggctgatgaaaaaaaacacctagaagatatttatcgggtgtattgtttgccttatgtaatttcgttgccggagtatgaagcgatcgcacgtcaactaccattaaataatatccgcaccgccgactggtcgcaatccgtcgcccaattttggaacatagtcatcgattccgcctttaccccccaagcaatattcggcttactccgcgcaggttggactaccatccaaggagccttatcactaggcttaatgcgtcgcggctatgagcgcgggttaattcggtttgggttgctttgtggggataagtga

SEQ ID NO: 2231 - protein, 280 aa, Nostoc sp. PCC 7120
MSATLYQQIQQFYDASSGLWEEIWGEHMHHGYYGADGTEQKNRRQAQIDLIEELLTWAGVQTAENILDVGCGIGGSSLYLAGKLNAKATGITLSPVQAARATERAKEAGLSGRSQFLVANAQAMPFDDNSFDLVWSLESGEHMPDKTKFLQECYRVLKPGGKLIMVTWCHRPTDKTPLTADEKKHLEDIYRVYCLPYVISLPEYEAIARQLPLNNIRTADWSQSVAQFWNIVIDSAFTPQAIFGLLRAGWTTIQGALSLGLMRRGYERGLIRFGLLCGDK

SEQ ID NO: 2232 - DNA, 993 bp, Nostoc sp. PCC 7120
  CDS (1)..(993): transl_table=11
atgagttggttgttttctacactggtatttttcttaacgctattgacagcagggatcgcgttatatctcattactgctagacgttatcaatcatctaactccgtagccaattcctacgaccagtggactgaagacggtattttagagttttactggggcgaacatatccatttaggtcattatggttcgccacctcaaagaaaggattttctggtggctaaatctgattttgtccatgaaatggtgcgttggggtggtttggataaactaccccctggtactaccttgttagatgttggttgtggaattgggggtagtagtcgcattttggcacgggattatggatttgccgttacaggtatcaccatcagcccccaacaagtccaacgcgctcaagagttaacaccacaggaactgaatgcacagtttttggtggatgatgcaatggcgctttccttcccagataatagttttgatgtagtttggtcaattgaagctggcccacatatgccagataaagccatttttgccaaagaattgatgcgggtactaaagcctggtggaatcatggttttagccgactggaatcagcgagacgatcgccaaaaacccctcaatttttgggagaaaccagtaatgcagcaactactagatcagtggtctcatccagctttttccagcatcgaaggcttttctgagcttttggcagcgacgggattagtagaaggggaggtaatcaccgcagactggacgaaacaaacactcccctcttggcttgattctatctggcaaggaatagttagaccagaaggattagtgcgttttggtctatctggtttcattaaatctctgcgagaagtgcctaccctactactgatgaggctggcattcggtacaggactctgtagatttgggatgttccgcgctttacgagctgacactgtaagatcatcagcagaacagacatctgcgatcaaggttgctcaaaagtaa

SEQ ID NO: 2233 - protein, 330 aa, Nostoc sp. PCC 7120
MSWLFSTLVFFLTLLTAGIALYLITARRYQSSNSVANSYDQWTEDGILEFYWGEHIHLGHYGSPPQRKDFLVAKSDFVHEMVRWGGLDKLPPGTTLLDVGCGIGGSSRILARDYGFAVTGITISPQQVQRAQELTPQELNAQFLVDDAMALSFPDNSFDVVWSIEAGPHMPDKAIFAKELMRVLKPGGIMVLADWNQRDDRQKPLNFWEKPVMQQLLDQWSHPAFSSIEGFSELLAATGLVEGEVITADWTKQTLPSWLDSIWQGIVRPEGLVRFGLSGFIKSLREVPTLLLMRLAFGTGLCRFGMFRALRADTVRSSAEQTSAIKVAQK

SEQ ID NO: 2234 - DNA, 987 bp, Thermosynechococcus elongatus BP-1
  CDS (1)..(987): transl_table=11
atgtctcatctagggctcatactggttatcactgttgttgcgttagtcctgctgggcttagcgctttacctgttgttcccccgcaagtacgagtctgcccgttccgtggccgagtcctatgacaactggaccaaggacggcattctagaattttactggggtgagcatattcaccttggccactatggtttgcctcctcgtcccaaggactttcgccaagcgaaggtagattttgttcatgaaatggtgcgttgggccggtctcgatcgcctgccgccggggacaaccgtcttggatgtcggctgtggtattggcgggagcagtcgtatcctggcccgtgactatggctttcatgtgactgggattacgattagccctgagcaggtacgccgggcgcgagaactcactcctgcggagctgaatgttcgctttcagctcgatgacgcgctagccttgtcatttccagatgccagctttgacgtagtttggtcaattgaagccggcccccacatgcccgataaacagcagttcgctaaagaattactccgtgtcctgaagcctgggggaattctggtggttgctgattggaaccagcgggacgatcgccagcagcccttgaacttctgggagcggctgatcatgcggcagctcttggatcaatgggcacaccccgcctttgccagcattgaaggctttgccgaggcccttgcagcaacgggtttagtggctggagaggtcatgactgctgactggacccaggaaacgctcccctcatggctagattcgatttggcagggaattgtgcggccagaggggctaattcgctttggcctaccggggctcgtgaaatccttgcgggaagttcccacattcctgctgatgcggattgcctttggtatgggactctgccgctttggtatgtttcgcgctgtgcgagcggagattcccgctgtctcccttgagcccgcccctcaagtgaactgctga

SEQ ID NO: 2235 - protein, 328 aa, Thermosynechococcus elongatus BP-1
MSHLGLILVITVVALVLLGLALYLLFPRKYESARSVAESYDNWTKDGILEFYWGEHIHLGHYGLPPRPKDFRQAKVDFVHEMVRWAGLDRLPPGTTVLDVGCGIGGSSRILARDYGFHVTGITISPEQVRRARELTPAELNVRFQLDDALALSFPDASFDVVWSIEAGPHMPDKQQFAKELLRVLKPGGILVVADWNQRDDRQQPLNFWERLIMRQLLDQWAHPAFASIEGFAEALAATGLVAGEVMTADWTQETLPSWLDSIWQGIVRPEGLIRFGLPGLVKSLREVPTFLLMRIAFGMGLCRFGMFRAVRAEIPAVSLEPAPQVNC

SEQ ID NO: 2236 - DNA, 930 bp, Prochlorococcus marinus subsp. marinus str. CCMP1375
  CDS (1)..(930): transl_table=11
atgatagctttcttattgccaatagtctctctattagtcctttctttaatatttttatggctatttaatgacagaaagtataaatcttctgaaagtgtttcttcagcatatgattcatggactaatgatcgcttgctagaaaaattgtggggtgaacatattcatcttggttattatgaaaattcttataaaacgaaggattttcgacaggcaaagatagattttgttcataagttagctcattggagtgggctttccactcttcctaaaggttctcgtattattgatattggttgtggtattggaggaagttccaggattttagctaaagactacggatttgatgttgttggtataacaattagttccgaacaagtaaaaagagcaaatcaattaactccaaaagagctcaaatgtcactttgaaatcatgaatgcacttaatttgaaattcgaagatggaagtttcgatggggtttggagtgttgaagcaggtcctcatattttaaataaacaattatttgctgatgaaatgcttagagtattacgtccagggggtgttttggctgttgctgattggaatagaagagattatgcgaaaaaagaaattggatttttaaatagtttagttcttaaacagttattaaatcaatggtctcacccagactttgcaactatttatggttttagaaataatctatcagatagtatttactctgcaggcagagtcgaaactgatgactggacaaaatatacgataccttcttggaatgattcaattattgaaggtattcgaaggccaaatgttttttttgacttgggtttaggatctttttttaaagcaattagagaagtgcctacaattgtattaatgcgatgggcctttcatactggccttatgcaatttggagtttttcgctctagaggataa

SEQ ID NO: 2237 - protein, 309 aa, Prochlorococcus marinus subsp. marinus str. CCMP1375
MIAFLLPIVSLLVLSLIFLWLFNDRKYKSSESVSSAYDSWTNDRLLEKLWGEHIHLGYYENSYKTKDFRQAKIDFVHKLAHWSGLSTLPKGSRIIDIGCGIGGSSRILAKDYGFDVVGITISSEQVKRANQLTPKELKCHFEIMNALNLKFEDGSFDGVWSVEAGPHILNKQLFADEMLRVLRPGGVLAVADWNRRDYAKKEIGFLNSLVLKQLLNQWSHPDFATIYGFRNNLSDSIYSAGRVETDDWTKYTIPSWNDSIIEGIRRPNVFFDLGLGSFFKAIREVPTIVLMRWAFHTGLMQFGVFRSRG

SEQ ID NO: 2238 - DNA, 915 bp, Prochlorococcus marinus str. MIT 9313
  CDS (1)..(915): transl_table=11
ttgatcctggcagggacaaccctgacttctgctgtagtgatctggacccaacgggatcgacgatacaaatcaagcgccagtgttgcctctgcttacgatgcctggaccaatgaccagctgctcgagcggctctggggtgaacacgtccacctcggctattacggcaaacctcctagcaccagagatttccgagccgcaaagcaagacttcgtacatgagctcgttcaatggagtggactggcccaactccctcgaggctcccgagtacttgacgtgggctgcggtattggtggtagcgcaagaatcctggcccgggattacaactttgacgtgcttggcatcaccatcagtccagcccaggtgaaacgagcgtctcaactcactcctgaggggatgacctgccaattccaggtgatggatgccctcgatttaaaactggccaacggtagcttcgacgctgtttggagtgtggaagcaggcccccacatgccagacaagcagcgctatgcagatgaactgctgcgtgtgctgaggccaaaaggtgtacttgcggtggccgattggaaccgccgtgattacgaagatggggagatgaccagccttgagcgatgggtgatgcgtcagctactcgaccagtgggcccatccggaattcgccagcattaaaggattccgccgcaatttgcttcatagcccttttgcttgcggcactgtcgaatctgacgactggacaagatccatcctgccctcctggaatgattcgattttggaggggtttcgtcgtcctggagccgtgctcgggttgggtccagccgccttggtcaagggattcagagaaataccaacgattttgttgatgcgctgggcttttgcccacggtctgatgcaattcggtgtcttccgcagccgcgactga

SEQ ID NO: 2239 - protein, 304 aa, Prochlorococcus marinus str. MIT 9313
MILAGTTLTSAVVIWTQRDRRYKSSASVASAYDAWTNDQLLERLWGEHVHLGYYGKPPSTRDFRAAKQDFVHELVQWSGLAQLPRGSRVLDVGCGIGGSARILARDYNFDVLGITISPAQVKRASQLTPEGMTCQFQVMDALDLKLANGSFDAVWSVEAGPHMPDKQRYADELLRVLRPKGVLAVADWNRRDYEDGEMTSLERWVMRQLLDQWAHPEFASIKGFRRNLLHSPFACGTVESDDWTRSILPSWNDSILEGFRRPGAVLGLGPAALVKGFREIPTILLMRWAFAHGLMQFGVFRSRD

SEQ ID NO: 2240 - DNA, 930 bp, Synechococcus sp. WH 8102
  CDS (1)..(930): transl_table=11
atgttggctggcctgcttctcctgaccggggctgccggtgccacggccctgctgatctggttgcagcgtgatcgccgctaccactcctcagacagcgtcgccgcggcctacgacgcctggaccgatgaccaactgctggaacggctctggggagaccatgtccacctggggcattacggaaacccgccaggttctgtcgacttccgccaggccaaggaggcttttgtgcacgagctggtgcgctggagcgggctcgaccaactacctcgaggcagtcgggtgttggatgtgggttgcggcatcggcggcagtgcccggatcctggccagggattacggcttggacgtgctcggggtgagcatcagcccagcccagatccgccgcgccacagaactcacccccgccggcctcagctgtcgctttgaagtgatggacgcccttaaccttcaacttcccgatcggcaattcgatgcggtgtggacggtggaggcggggccccacatgccagacaagcagcgtttcgctgatgagttgctgcgggtactccggcccgggggctgcttagccgccgctgattggaaccgccgcgcccccaaggatggcgccatgaacagcaccgaacgctgggtgatgcggcagttgttgaatcaatgggcgcatccggaattcgccagcatctccggcttccgggccaacctcgaagccagccctcaccagcggggcctgatcagtaccggcgactggactctggccacccttccctcctggtttgattcgatcgccgaaggcctccgtcgcccctgggctgtcctgggccttggtcccaaagcagtgcttcaaggcctgcgagagaccccgacgctgctgttgatgcattgggcctttgccacagggttgatgcagttcggcgtctttcgcctcagccgctga

SEQ ID NO: 2241 - protein, 309 aa, Synechococcus sp. WH 8102
MLAGLLLLTGAAGATALLIWLQRDRRYHSSDSVAAAYDAWTDDQLLERLWGDHVHLGHYGNPPGSVDFRQAKEAFVHELVRWSGLDQLPRGSRVLDVGCGIGGSARILARDYGLDVLGVSISPAQIRRATELTPAGLSCRFEVMDALNLQLPDRQFDAVWTVEAGPHMPDKQRFADELLRVLRPGGCLAAADWNRRAPKDGAMNSTERWVMRQLLNQWAHPEFASISGFRANLEASPHQRGLISTGDWTLATLPSWFDSIAEGLRRPWAVLGLGPKAVLQGLRETPTLLLMHWAFATGLMQFGVFRLSR

SEQ ID NO: 2242 - DNA, 846 bp, Gloeobacter violaceus PCC 7421
  CDS (1)..(846): transl_table=11
atgggcgagcgaacggttctcaacgaaaatatccggcggttctacgacgcgtcctccgggttgtgggaggaggtctggggcgagcacatgcaccacggccactgggaagtgggggaagcggacaaagatcgccgcgtcgcccaggtggatttggtcgtcaggctcctcgactgggcggggatcgaccgggccgagtcgatcgtcgatgtcggctgcggcatcggcggcagcagtctgtttctggcggagcgcttcggcgcccgggtggaggggatcaccctcagccccgtgcagtgtaagcgcgccgccgagcgcgcccgcgagcaccatctggacgggcgcgcgcactttcaggtggccgacgcccaccggatgcccttcgccgacggccggttcgacctggtctggtcgctcgaaagcggtgagcacatggccgacaaggcccaatttttgcgcgaatgccaccgggtgctcaggcccggcggccgcttcgtgtttgtgacttggtgctgtcgccacggcgccttggacgcgcgggatcaaaaatggctcggggcgatctaccggatctaccacctgccctacatcctctcgatcgagagctacacgcagttgcttggtgagacggggttctcgggcattcggaccaccgactggtccgatcgggtggcccgcttctggtcgctggtcatcgattcggccctcgaaccggcggtgctgtggaaggtgatcgcccagggaccgacggtaatcaaaggcgcgctcgccatgcagttgatgcggcgcagctacgcgcgggggctggtgcgcttcggcgtgttcgcggcccaaaaggcggagggataa

SEQ ID NO: 2243 - protein, 281 aa, Gloeobacter violaceus PCC 7421
MGERTVLNENIRRFYDASSGLWEEVWGEHMHHGHWEVGEADKDRRVAQVDLVVRLLDWAGIDRAESIVDVGCGIGGSSLFLAERFGARVEGITLSPVQCKRAAERAREHHLDGRAHFQVADAHRMPFADGRFDLVWSLESGEHMADKAQFLRECHRVLRPGGRFVFVTWCCRHGALDARDQKWLGAIYRIYHLPYILSIESYTQLLGETGFSGIRTTDWSDRVARFWSLVIDSALEPAVLWKVIAQGPTVIKGALAMQLMRRSYARGLVRFGVFAAQKAEG

SEQ ID NO: 2244 - DNA, 936 bp, Prochlorococcus marinus str. AS9601
  CDS (1)..(936): transl_table=11
atgattgatttattattccctttttttatactttttttactctttctagtccttgcaataatttggagaaataatgctagaaaatacatttcttccggtacagtagcttctgcatatgatgcttggaccaacgataaattacttgagagattatggggagaacatatacatttgggtttttatcccttaggaaacaaaaatactgattttagaaaggctaaagttcagtttgttcatgaattagtcaaatggagtggtttagataaattgccacggggatccagaatactcgacgtaggttgcggaataggggggagttctaggattcttgcagaatattatgggtttaatgtcactggcattacaattagtccggctcaagttaaaagagcaagagaacttactcctcatgggctaaattgcaacttccaagttatggatgctttaaatttgaaatttgaaaatggatcatttgatgccatctggagtgttgaggctggcgcacacatgaataataaaactaggtttgcagatgaaatgatgagaaccctaagacctggagggtatctagcattggcagattggaactcaagagacctccatgcatatcccccatcattttttgaaaagttagttcttaaacaattacttgaacaatgggtacatcctaattttattagcataaatgaattcagtaacattcttagaacaaacgaaaatagttcaggaagagttatatcagaaaattggaatacctatacaaatccttcatggtatgactccatttttgaaggtattcgaagaccctttgtaattttgtcgcttggcccatttgcgatagtgaagtcgattagagaaataccaacaatacttctcatgaattgggcatttagaaaaggtttaatggagtttggagtttataaatgtagaggataa

SEQ ID NO: 2245 - protein, 311 aa, Prochlorococcus marinus str. AS9601
MIDLLFPFFILFLLFLVLAIIWRNNARKYISSGTVASAYDAWTNDKLLERLWGEHIHLGFYPLGNKNTDFRKAKVQFVHELVKWSGLDKLPRGSRILDVGCGIGGSSRILAEYYGFNVTGITISPAQVKRARELTPHGLNCNFQVMDALNLKFENGSFDAIWSVEAGAHMNNKTRFADEMMRTLRPGGYLALADWNSRDLHAYPPSFFEKLVLKQLLEQWVHPNFISINEFSNILRTNENSSGRVISENWNTYTNPSWYDSIFEGIRRPFVILSLGPFAIVKSIREIPTILLMNWAFRKGLMEFGVYKCRG

SEQ ID NO: 2246 - DNA, 915 bp, Prochlorococcus marinus str. MIT 9303
  CDS (1)..(915): transl_table=11
ttgatcctggcagggacaaccctggcttctgctgtagtgatctggacccaacgggatcggcgctacaaatcaagcgccagtgttgcctctgcttacgatgcctggaccaatgaccagctgctcgagcggctctggggtgaacacgtccacctcggctattacggcaaacctcctagccccagagatttccgagccgcaaagcaagacttcgtacatgagctcgttcaatggagtggactcgccaaactccctcgaggctcccgagtacttgacgtgggctgcggtattggtggtagcgcaagaatcctggcccgggattacaactttgacgtgcttggcatcaccatcagtccagcccaggtaaaacgagcgtctcaactcactcctgaggggatgacctgccaattccaggtgatggatgccctcgatttaaaactggccaaaggtagcttcgacgctgtttggagtgtggaagcaggcccccacatgccagacaagcagcgctatgcagatgaactgctgcgtgtgctgaggccaaaaggtgtacttgcggtggccgattggaaccgccgtgattacgaagatggggagatgaccaaccttgagcgatgggtgatgcgtcagctactcgaccagtgggcccatccggaattcgccagcattaaaggattccgccgcaatttgcttcatagcccttttgcttgcggccctgtcgaatctgacgactggacaagatccatcctgccctcctggaatgattcgattttggaggggtttcgtcgtcctggagccgtgctcgggttgggtccagccgccgtggtcaagggattcagagaaataccaacgattttgttgatgcgctgggcttttgcccatggtctgatgcaattcggtgtcttccgcagccgcgactga

SEQ ID NO: 2247 - protein, 304 aa, Prochlorococcus marinus str. MIT 9303
MILAGTTLASAVVIWTQRDRRYKSSASVASAYDAWTNDQLLERLWGEHVHLGYYGKPPSPRDFRAAKQDFVHELVQWSGLAKLPRGSRVLDVGCGIGGSARILARDYNFDVLGITISPAQVKRASQLTPEGMTCQFQVMDALDLKLAKGSFDAVWSVEAGPHMPDKQRYADELLRVLRPKGVLAVADWNRRDYEDGEMTNLERWVMRQLLDQWAHPEFASIKGFRRNLLHSPFACGPVESDDWTRSILPSWNDSILEGFRRPGAVLGLGPAAVVKGFREIPTILLMRWAFAHGLMQFGVFRSRD

SEQ ID NO: 2248 - DNA, 933 bp, Prochlorococcus marinus str. MIT 9301
  CDS (1)..(933): transl_table=11
atgtttgaattattaatccctttttttttactagttttattattactattgctatctataatctggagaattaaagctagaaaatatatttcttccagcacagtggcttctgcatatgatgcctggacacaggataaattacttgagagattgtggggagaacatatacatttgggttattatccgtcaggaaaaaatattgattttagaaaggctaaaattaagtttgtccatgaattagtcaaatggagtggtttagataaattgccaaagggatccagaattcttgatgtaggttgtggaataggggggagttccaggattcttgcggaatcttatgggtttaatgtcactgggattacaattagtccggctcaagttaaaagagctagagaacttactcctaatggactaaattgccacttccaagttatggatgctttaaatttgaaatttgaagaaggatcatttgatgcagtctggagtgttgaggctggtgcacatatgaatgataaaactaggtttgcagatgaaatgctgagaattctaagacctgatggttatttggcattggctgattggaactcaagagaccttgaggcataccccccatcattttttgaaaagttagttcttaaacaattactcgaacaatgggtacatcctaattttattagcattaatgatttcggtaatattctcagatctaataaaaatagttcaggaagagttattgctgaaaattggaattcctatacaaatccttcatggtatgactccattattgaaggcattcgaaggcctttcgcaattttgtcacttggcccatttgccatattgaagtcgattagagagattccaacaatacttctcatgaactgggcatttagaaaaggtttaatggagtttggagtttataaatgtagaggataa

SEQ ID NO: 2249 - protein, 310 aa, Prochlorococcus marinus str. MIT 9301
MFELLIPFFLLVLLLLLLSIIWRIKARKYISSSTVASAYDAWTQDKLLERLWGEHIHLGYYPSGKNIDFRKAKIKFVHELVKWSGLDKLPKGSRILDVGCGIGGSSRILAESYGFNVTGITISPAQVKRARELTPNGLNCHFQVMDALNLKFEEGSFDAVWSVEAGAHMNDKTRFADEMLRILRPDGYLALADWNSRDLEAYPPSFFEKLVLKQLLEQWVHPNFISINDFGNILRSNKNSSGRVIAENWNSYTNPSWYDSIIEGIRRPFAILSLGPFAILKSIREIPTILLMNWAFRKGLMEFGVYKCRG

SEQ ID NO: 2250 - DNA, 966 bp, Synechococcus sp. WH 7803
  CDS (1)..(966): transl_table=11
atgcccctgcctgcttttttcggaccagcagcgattggcgctgccgctgccgttggtgcctacgcgctgtggactcgccgcaatcgcgcttacctctcaagcgagagtgtggcttcggcgtacgacgcatggacggaggacaggcttcttgaaaccctctggggtgagcatgtgcatctcggtcactacggggctcccccccgcagcaaggatttccggcgagccaaggctgatttcgttcatgaattggtgcgctggagtggtttggatcagttaccacctggcgcgaaggtgctggatgtgggctgtggcatcggcggcagcgccagaattcttgccagggattacggctttgacgttctcggagtgagcatcagcccagcacagatccgtcgggccaccgaactcacaccggagggaatgacctgccgattcgccgtgatggatgcccttgatctggcactggacgatggggggtttgatgcggtttggagtgtggaagccggtccgcacatgccggacaaacagcgctacgccgatgaactgctgcgcatgctccgccctggcggactgctggccgtcgcggattggaatcgtcgggatcctgtggatggcccattgaacggtcgagaacgttgggtgatgcatcagctgctcacgcaatgggcgcaccctgagttcgccagcatccgtggcctgcagcacaacctggaaaccagtgcttattccaaaggtccgatcgcagtggccaattggaatcaagccacgctgccctcctggaacgattcgattctggaaggcctgcgacgccccgcagcagtgctgcgactcggtccatcagccatcgttcaggggttgcgcgaaacaccaaccctgttgttgatgcgctgggcctttgcccggggaatgatgcaattcggtgtgtttcgcctcgccaacgatcaggtcagatcagaactcggatag

SEQ ID NO: 2251 - protein, 321 aa, Synechococcus sp. WH 7803
MPLPAFFGPAAIGAAAAVGAYALWTRRNRAYLSSESVASAYDAWTEDRLLETLWGEHVHLGHYGAPPRSKDFRRAKADFVHELVRWSGLDQLPPGAKVLDVGCGIGGSARILARDYGFDVLGVSISPAQIRRATELTPEGMTCRFAVMDALDLALDDGGFDAVWSVEAGPHMPDKQRYADELLRMLRPGGLLAVADWNRRDPVDGPLNGRERWVMHQLLTQWAHPEFASIRGLQHNLETSAYSKGPIAVANWNQATLPSWNDSILEGLRRPAAVLRLGPSAIVQGLRETPTLLLMRWAFARGMMQFGVFRLANDQVRSELG

SEQ ID NO: 2252 - DNA, 936 bp, Prochlorococcus marinus str. MIT 9215
  CDS (1)..(936): transl_table=11
atgtttgaattattattccctttttttttactagttttattttttttagtcttttctattatctggagaattaaggctagaaaatatatttcttcaggtacagtggcttcggcatatgatgcttggacccaagataaattactcgagagattgtggggagaacatatacatttgggtttttataattcagggaaaaaaaatattgattttagaaaagctaaagttcagtttgttcatgaattagtcaaatggagtggtttagataaattgccaaagggatctagaatactagatgtcggctgtggaattgggggaagttctaggattcttgcaaaaaattatgggtttaatgtcaccggcattacaatcagtccggctcaagttaagagagcaagagaacttactcctaatggacttaattgcaacttccaagttatggatgctttggatttgaaatttgaagatggattatttgatgctgtttggagtgttgaggctggtgcacacatgagtgataaaaacaggtttgcagatgaaatgttgagaattctaaggcctggagggtatttggcattggctgattggaactcaagagacctaaaggaatgccccccatctttttttgaaaagttagttcttaaacaactacttgaacaatgggtacatcctgaatttatcagcattaacgaatttggtaacattcttagagctaacaaacatagttcaggaagagttatttctgaaaattggaattcctatacaaatccgtcatggtacgactccattattgaaggttttcgaaggccttttgcaattttgtcacttggcccaattgcgatagtgaagtcgattagagagatcccaaccatactcctcatgaattgggcatttaggaaaggtttaatggagtttggagtttttaaatgtagaggataa

SEQ ID NO: 2253 - protein, 311 aa, Prochlorococcus marinus str. MIT 9215
MFELLFPFFLLVLFFLVFSIIWRIKARKYISSGTVASAYDAWTQDKLLERLWGEHIHLGFYNSGKKNIDFRKAKVQFVHELVKWSGLDKLPKGSRILDVGCGIGGSSRILAKNYGFNVTGITISPAQVKRARELTPNGLNCNFQVMDALDLKFEDGLFDAVWSVEAGAHMSDKNRFADEMLRILRPGGYLALADWNSRDLKECPPSFFEKLVLKQLLEQWVHPEFISINEFGNILRANKHSSGRVISENWNSYTNPSWYDSIIEGFRRPFAILSLGPIAIVKSIREIPTILLMNWAFRKGLMEFGVFKCRG

SEQ ID NO: 2254 - DNA, 993 bp, Anabaena variabilis ATCC 29413
  CDS (1)..(993): transl_table=11
atgaattggttgttttctacactggtatttttcctaacactactggcagcaggtattgcgttatatctcattactgctagacgttatcaatcatctaactccgtagccaattcctacgaccagtggactgaagacggtattttagagttttactggggcgaacacatccatttaggtcattatggttcgccaccgcaaaggaaagattttctggcagctaaatctgattttgtccatgaaatggtgcgttggggtggtttggataaattaccccctggtactaccctgttagatgttggttgtggaattgggggaagtagtcgcattttggcacgggattatggatttgccgttacaggtatcaccatcagcccccaacaagtccaacgcgcccaagaattaacacctcaggaactgaatgcacagtttttggtggatgatgcgatggcgctttcttccccagatggtagttttgatgtagtttggtcaattgaagctggcccacatatgccagataaagccatttttgccaaagaattgatgcgggtgctaaagcctggtggaatcatggttttagccgactggaatcagcgagacgatcgccaaaaacccctaaatatttgggagaaaccagtaatgcagcaactactagatcagtggtctcacccggctttttccagcatcgaaggcttttctgagcttttggccgcgacgggattagtagaaggggaggtaatcacggcagactggacaaaacaaacactcccctcttggctggattctatctggcaaggaatagttagaccagaaggattagtgcgttttggtctatctggtttcattaaatctctgcgagaagtacccaccctactactgatgaggctagcatttggtatgggactctgtagatttgggatgttccgtgctttacgagctaacactgtgacaccaccagcagaacagacaactgggatcaaagttgctcaaaggtaa

SEQ ID NO: 2255 - protein, 330 aa, Anabaena variabilis ATCC 29413
MNWLFSTLVFFLTLLAAGIALYLITARRYQSSNSVANSYDQWTEDGILEFYWGEHIHLGHYGSPPQRKDFLAAKSDFVHEMVRWGGLDKLPPGTTLLDVGCGIGGSSRILARDYGFAVTGITISPQQVQRAQELTPQELNAQFLVDDAMALSSPDGSFDVVWSIEAGPHMPDKAIFAKELMRVLKPGGIMVLADWNQRDDRQKPLNIWEKPVMQQLLDQWSHPAFSSIEGFSELLAATGLVEGEVITADWTKQTLPSWLDSIWQGIVRPEGLVRFGLSGFIKSLREVPTLLLMRLAFGMGLCRFGMFRALRANTVTPPAEQTTGIKVAQR

SEQ ID NO: 2256 - DNA, 843 bp, Anabaena variabilis ATCC 29413
  CDS (1)..(843): transl_table=11
atgagtgcaacactataccaacaaattcagcaattttacgacgcttcctctgggctgtgggaagagatttggggcgaacacatgcaccacggttattatggtgtagacggtactgaacaaaaaaaccgtcgtcaggcgcaaattgatttaattgaagaattacttacttgggcaggggtacaaacagcagaaaatatactagatgtgggttgtggtattggtggtagttctctatatttggcagaaaagttgaatgctaaagctacaggaattaccctgagtccggtgcaagctgctagagccacagaaagagccaaggaagctggtttaagtggtagaagtcagtttttagtggcaaatgcccaagcaatgccttttgatgataattcttttgacttggtgtggtcgctggaaagtggcgaacatatgccagataaaaccaagtttttgcaagagtgttaccgagtcctaaaaccgggtggtaagttaatcatggtgacatggtgtcatcgtcctacggatgaaacaccactgacggctgatgaacaaaaacacctagaagatatttatcgggtgtattgtttgccttatgtaatttcgttgccagagtatgaggcgatcgcacgtcaactaccattaaacaatatccgcaccgccgactggtcgcaatccgtcgcccaattttggaacatagtcatcgattccgcctttactccccaagcaatatttgggttactccgcgctggttggactaccatccaaggagcattatcactaggcttaatgcgtcgcggttatgagcgggggttaattcggtttgggttgctgtgtggggataagtga

SEQ ID NO: 2257 - protein, 280 aa, Anabaena variabilis ATCC 29413
MSATLYQQIQQFYDASSGLWEEIWGEHMHHGYYGVDGTEQKNRRQAQIDLIEELLTWAGVQTAENILDVGCGIGGSSLYLAEKLNAKATGITLSPVQAARATERAKEAGLSGRSQFLVANAQAMPFDDNSFDLVWSLESGEHMPDKTKFLQECYRVLKPGGKLIMVTWCHRPTDETPLTADEQKHLEDIYRVYCLPYVISLPEYEAIARQLPLNNIRTADWSQSVAQFWNIVIDSAFTPQAIFGLLRAGWTTIQGALSLGLMRRGYERGLIRFGLLCGDK

SEQ ID NO: 2258 - DNA, 915 bp, Synechococcus sp. CC9605
  CDS (1)..(915): transl_table=11
atggtggccggcgccgttggaaccaccggagttgcgctatggcttcgccgcgaccggcgctacgaatcgtcggagagtgtcgcctccgcctacgacgcctggacggaagaccgtttgctggagcagctctggggagagcatgtccatctcggccattacgggaccccgccgggctccttcgacttccgcgaagccaaggaagccttcgtccacgagctggtgcgctggagcggtctggaccaactccccgctggcagccgggtgctggatgtgggatgcggcatcggtggcagcgcccgaatactggcgcgggattacggattggacgttctcggcatcagcatcagcccagcccaggtggaacgagccacacaactcaccccatcaggcctgagctgccgcttccaggtaatggacgccttggatcttcaactgcccgaccagagctttgatgcggtctggagtgtggaggccggtccccacatgccgaacaaacagcgttatgccgatgagctgctgcgggcgatgcgaccggggggtctgctagctgtggccgactggaaccgccgagacccctctgacggcggcatgacgagaaccgaacgctgggtgatgcgtcagctgctcaaccagtgggcccaccctgaattcgccagcatcaaggggttccgccagaacctcgacaacagcgtccaccaccgtggcgagatcgtcaccggcgattggacccaggccacgctcccctcatggattgactcgatcatcgagggcatccgacgcccctgggccgtggtcagcctggggccgaaagctgtcctgcaaggcctgagagaaacgccgacgttgctgctgatgcactgggccttcgccaccgggctgatgcaattcggcgtcttccgaatcagcaaagactga

SEQ ID NO: 2259 - protein, 304 aa, Synechococcus sp. CC9605
MVAGAVGTTGVALWLRRDRRYESSESVASAYDAWTEDRLLEQLWGEHVHLGHYGTPPGSFDFREAKEAFVHELVRWSGLDQLPAGSRVLDVGCGIGGSARILARDYGLDVLGISISPAQVERATQLTPSGLSCRFQVMDALDLQLPDQSFDAVWSVEAGPHMPNKQRYADELLRAMRPGGLLAVADWNRRDPSDGGMTRTERWVMRQLLNQWAHPEFASIKGFRQNLDNSVHHRGEIVTGDWTQATLPSWIDSIIEGIRRPWAVVSLGPKAVLQGLRETPTLLLMHWAFATGLMQFGVFRISKD

SEQ ID NO: 2260 - DNA, 936 bp, Prochlorococcus marinus str. MIT 9312
  CDS (1)..(936): transl_table=11
atggttgaattatttttacctttttttttactggttttatttcttttagctttgttttttgtctggagaattaatcctagaaaatatatttcttctggcacagtggcatctgcatatgatgcttggacccaagataaattgcttgagagattgtggggagagcatatacatttaggcttttatccctcagatgggaagaatattgattttagaaaggctaaagttcagtttgtgcatgaattagtcaagtggagtggtttagataaattgccaaaaggatccagaatactcgatgtaggttgtggaataggaggaagttctaggattcttgcgaaatattatggatttaatgttactggaattacaattagtcctgctcaagtaaaaagagcaaaagaacttactcctcttggactcaattgtaattttcaagttatggacgcattgaatttaaaatttaaagatggatcatttgatgcggtatggagtgtggaggcgggcgcacacatgaatgataaaactaagtttgcagatgaaatgctgagaactttgagacccggaggttatttggcattagctgattggaactcaagagatctcagatcatatcctccttctttttttgaaaagttggttcttaaacaattacttgatcagtgggttcatcctgattttataagcattaacgaatttgctaatattcttagtactaataaaaatagtgcaggaagagttgtttctgaaaattggaatttttatacaaatccttcatggtacgactccataatcgagggaattcgaagaccttctgcaattttaactcttggacctttagcgatagttaagtcaataagagagatcccgacaatacttcttatgaattgggcatttagaaaaggtttaatggagtttggagtttataaatgtagaggataa

SEQ ID NO: 2261 - protein, 311 aa, Prochlorococcus marinus str. MIT 9312
MVELFLPFFLLVLFLLALFFVWRINPRKYISSGTVASAYDAWTQDKLLERLWGEHIHLGFYPSDGKNIDFRKAKVQFVHELVKWSGLDKLPKGSRILDVGCGIGGSSRILAKYYGFNVTGITISPAQVKRAKELTPLGLNCNFQVMDALNLKFKDGSFDAVWSVEAGAHMNDKTKFADEMLRTLRPGGYLALADWNSRDLRSYPPSFFEKLVLKQLLDQWVHPDFISINEFANILSTNKNSAGRVVSENWNFYTNPSWYDSIIEGIRRPSAILTLGPLAIVKSIREIPTILLMNWAFRKGLMEFGVYKCRG

SEQ ID NO: 2262 - DNA, 933 bp, Synechococcus elongatus PCC 7942
  CDS (1)..(933): transl_table=11
atgcccatgtctcctctttggctgttgctggtgttgccggttagtctgctcgccatttacctcctcactcctcgtcgctaccagtcttccgactcagtggcgcaggcctacgacagctggacacaggacggcatcctggagttttactggggcgagcacattcacctcgggcactacggcaatccgctgcgccgcaaagattttcgggcagccaaagcagattttgttcatgaaatggtgcgctggggtaacctcgatcgcctgccagcgggcaccacagtcttggatgtgggttgcggcattggcggaagcagccggattctggcgcgggactaccactttgatgtcactggcatcacgatcagtccggggcaagttcagcgggcgcgatcgctgacgccagacggagtgacagcgcaattcaaagtcgatgacgccctcaatctctcgtttcctgacgccagctttgatgtggtctggtgcattgaggcagggcctcacatgcccgataaagccctgttcgctaaagaattgctgcgggtgctcaaacccggtggcacgctggtcgtggctgactggaatcaacgcgatacccgccggcgatcgctccaaggttgggagcgctgggtgatgcgccagctcttagatcagtgggctcacccagaatttgccagcatcgaaggcttcagtgaactgttagaagcgacaggctgggttgatggtgcggtcacaacagcggattggactcgcgaaaccctgccctcttggctggattcgatctggcagggtatcctccgcccggctggcctcgttcgctttggcttctcggggctgatcaaatcactgcgcgaagttccgaccctgatcctgatgcgaatcgcctttggtcaagggctctgccgcttcgggatgttccgagcgactcgcgcctag

SEQ ID NO: 2263 - protein, 310 aa, Synechococcus elongatus PCC 7942
MPMSPLWLLLVLPVSLLAIYLLTPRRYQSSDSVAQAYDSWTQDGILEFYWGEHIHLGHYGNPLRRKDFRAAKADFVHEMVRWGNLDRLPAGTTVLDVGCGIGGSSRILARDYHFDVTGITISPGQVQRARSLTPDGVTAQFKVDDALNLSFPDASFDVVWCIEAGPHMPDKALFAKELLRVLKPGGTLVVADWNQRDTRRRSLQGWERWVMRQLLDQWAHPEFASIEGFSELLEATGWVDGAVTTADWTRETLPSWLDSIWQGILRPAGLVRFGFSGLIKSLREVPTLILMRIAFGQGLCRFGMFRATRA

SEQ ID NO: 2264 - DNA, 987 bp, Trichodesmium erythraeum IMS101
  CDS (1)..(987): transl_table=11
atgtacttatattacgctcttggatttatattattactcgtagccctcggcatagttatctatttaatcactccccgtagctatgaatcctctaatacggtagccaattcctatgacgactggactcaagacggtattttagaattttactggggcgaacatattcatttaggtcactatggttcaccaccacgacgcaaagattttttgcaagccaaagctgacttcgttcacgaaatggtcaagtggggtggtttagacaaattacctcgtggtactactgttttagatgtcggttgtggaattggtggcagcagccgtatcttagccaaagaatacgagtttgaagttacgggggttaccattagccccaaacaggtacaacgggcaacagaattaacccctcaaggagttacggctaaattccaggtagatgatgcgttggcactatctttcccagacaatagttttgatgtggtttggtcgattgaagctggacctcatatgccggataaggtcaagtatggttcagaaatgatgcgtgtcttaaaacctggcggtattttggtcgtagctgattggaatcagcgcgatgaccgtcaaaaacccctgaattattgggaaaaacccgtaatgcgtcaattattggaccagtggtcacatcctgccttttctagtatcgaaggcttttcggaacaaatagcggaaactgggttagtcgaaggagaagtagccaccgcagattggactcaagaaactctcccttcttggttcgaatcaatttggcaaggaattgttagacccaaaggattgattaagtttggcttttcagggtttattaaatctctcagagaagtacctactatgttattgatgcgattgggatttggtgctgggctgtgcagatttggaatgttccgcgctgttaagtctaactcagtacctgtctcaacagagactgctaccactgaagtagctaacgcttaa

SEQ ID NO: 2265 - protein, 328 aa, Trichodesmium erythraeum IMS101
MYLYYALGFILLLVALGIVIYLITPRSYESSNTVANSYDDWTQDGILEFYWGEHIHLGHYGSPPRRKDFLQAKADFVHEMVKWGGLDKLPRGTTVLDVGCGIGGSSRILAKEYEFEVTGVTISPKQVQRATELTPQGVTAKFQVDDALALSFPDNSFDVVWSIEAGPHMPDKVKYGSEMMRVLKPGGILVVADWNQRDDRQKPLNYWEKPVMRQLLDQWSHPAFSSIEGFSEQIAETGLVEGEVATADWTQETLPSWFESIWQGIVRPKGLIKFGFSGFIKSLREVPTMLLMRLGFGAGLCRFGMFRAVKSNSVPVSTETATTEVANA

SEQ ID NO: 2266 - DNA, 945 bp, Synechococcus sp. CC9311
  CDS (1)..(945): transl_table=11
atgccttcaccgactgttctcataccaacagcagctggattactgctcttgggttgcgcctaccagctctggaatcgtcgcaatcgcgcctaccactccagtgagagcgttgctgccgcatacgacgcctggacagatgaccagttactggaatccctttggggtgagcatgttcatcttggccactacggatccccaccccagcctcgggatttcagacaggccaaatccgacttcgttcatgagttagtccactggagtggcttcgatcaattgccaccaggatcccgtgttttagatgtgggttgcggtatcgggggaagcgccaggatcctttctcgcgactacggtttagacgtactgggtatcagcatcagtccggctcaggtgaacagagccacccacctaacaccagactctctgccctgtcgcttcgcagtgatggatgccctcaacctgcaacttgaggatcaaagctttgacgccgtttggacggtcgaggccggtccgcatatgcctgacaagcagcggtttgccaacgaactcttaagagtcctaaaacctggcggtcgcctggctgttgccgactggaatcgccgtgatcctgtggatggtgcccttaatcggcgcgaacgctgggtgatgcatcaattactcacacaatgggcgcatcctgaattcgccagcatccgaggctttcgccagaaccttgagaacagccctcatcatcgcggcaccatcagcaccgatgattggacagacgccaccttgccctcttggaatgaatccatcctcgaaggcatccgcaggcccaatgcaatcctccgccttggccccaaggcagtgctgcagggcctacgtgaaacaccaacgctgttgttaatgcgctgggcttttgccagagggatgatgcagttcggcgtgtttaaaactaatcactgctga

SEQ ID NO: 2267 - protein, 314 aa, Synechococcus sp. CC9311
MPSPTVLIPTAAGLLLLGCAYQLWNRRNRAYHSSESVAAAYDAWTDDQLLESLWGEHVHLGHYGSPPQPRDFRQAKSDFVHELVHWSGFDQLPPGSRVLDVGCGIGGSARILSRDYGLDVLGISISPAQVNRATHLTPDSLPCRFAVMDALNLQLEDQSFDAVWTVEAGPHMPDKQRFANELLRVLKPGGRLAVADWNRRDPVDGALNRRERWVMHQLLTQWAHPEFASIRGFRQNLENSPHHRGTISTDDWTDATLPSWNESILEGIRRPNAILRLGPKAVLQGLRETPTLLLMRWAFARGMMQFGVFKTNHC

SEQ ID NO: 2268 - DNA, 987 bp, Crocosphaera watsonii WH 8501
  CDS (1)..(987): transl_table=11
atgtacttatactataccctgggatttatcgccgtcgtcttagtcataggtgttgttgtctatcttgtaacacctcgcagttatgaatcatctgacacagtagccacttcttacgacgaatggactcaagacggaattttagaattttattggggagaacacattcatttaggtcattatggttcaccaccaagaagcaaagatttcttagaagcaaaagctgattttgttcacgaaatggtcaaatggggtggtttagacaaattacctcgcggtacaaccgttttagacgttggctgtggtattggtggcagtagtcggattttagccaaagcatacgggtttgagacaacaggagttaccatcagtcccaaacaagtacaacgggccaccgaattaacccccgaagatgttactgccaaattccaggtagatgacgctttaaatctctctttcccagataacagttttgatgtggtttggtccattgaagctggtccccatatgccagacaaagctaaatatgcccaagagatggtgcgagttttaaaacctggtggccttttagtagtagcagactggaaccaacgggatgaccgtcaaaaacccctgaatttctgggaaaaaccagtgatgcgtcaactcttagaccaatggtcacacccttcattttccagtatcgaaggcttttctgaacaaatcgcagccacaggattaatcgaaggagaagttatcaccgcagattggacaaaagaaaccctaccctcttggttagaatccatttggcaaggaattgttcgaccccaaggtttaattaagttcggtttctcaggattcattaaatctttaagagaagttcccactatgttattgatgcgattgggatttggtgctggtttgtgtcgttttggaatgttccgcgccattaaatctccttctgtttcccagtcaacccagactgcaaaaggtgaaacagtaaacgtttaa

SEQ ID NO: 2269 - protein, 328 aa, Crocosphaera watsonii WH 8501
MYLYYTLGFIAVVLVIGVVVYLVTPRSYESSDTVATSYDEWTQDGILEFYWGEHIHLGHYGSPPRSKDFLEAKADFVHEMVKWGGLDKLPRGTTVLDVGCGIGGSSRILAKAYGFETTGVTISPKQVQRATELTPEDVTAKFQVDDALNLSFPDNSFDVVWSIEAGPHMPDKAKYAQEMVRVLKPGGLLVVADWNQRDDRQKPLNFWEKPVMRQLLDQWSHPSFSSIEGFSEQIAATGLIEGEVITADWTKETLPSWLESIWQGIVRPQGLIKFGFSGFIKSLREVPTMLLMRLGFGAGLCRFGMFRAIKSPSVSQSTQTAKGETVNV

SEQ ID NO: 2270 - DNA, 945 bp, Synechococcus sp. RS9917
  CDS (1)..(945): transl_table=11
atgctgaacgccaccggcttcgccctggcccttggcattcccacggccgccgctgccgtgggccttgcgatctggagtcgccgcaatcgcgcctatcactccagcgccagtgtcgctgcggcttacgacgcctggaccgacgatcgcttgctcgagcagctctggggcgaacacgtgcacctcgggcactacggcgagccgcctcggcgccgagacttccgagccgccaaggccgatttcgtgcatgccctcgtgcactggagtggtcttgatcagctgccccccggctcgcgccttctcgatgtgggctgcggcattggcggcagcgcccgaatcctggcgcgtgagtacggctttgatgttctgggcatcagcatcagtcccgctcaggtggcccgcgccaccagcctcacccccacgggtctgagttgccgctttgcggtgatggatgccctcgatctgaaactcgccgacggccagtttgatgccgtgtggagcgtcgaggccggtccccacatgcccgacaaacagcgttacgccgatgaactgttgcgcgtgctccgccccggcggcgttctcgccgtggcggactggaatcgccgcgatgtctctgacggggccatgtcggggctcgagcggcaggtgatgcaccaactgctcacgcagtgggcccatccggaatttgccagcatcaaaggctttggcgccaatctcaacgccagcccctacaaccatggcggcaccatcgtcagcgccgactggaccgcggcgaccctgccctcctggattgactcgatcatggagggcgtgcgtcgccccggcgccgtgctcagcctcggccccaaggcagtgctgcaaggcttgagggaaacgccaacgctccttttgatgcactgggcgttcgccaccgggctgatgcagttcggggtgttccgccgtgattaa

SEQ ID NO: 2271 - protein, 314 aa, Synechococcus sp. RS9917
MLNATGFALALGIPTAAAAVGLAIWSRRNRAYHSSASVAAAYDAWTDDRLLEQLWGEHVHLGHYGEPPRRRDFRAAKADFVHALVHWSGLDQLPPGSRLLDVGCGIGGSARILAREYGFDVLGISISPAQVARATSLTPTGLSCRFAVMDALDLKLADGQFDAVWSVEAGPHMPDKQRYADELLRVLRPGGVLAVADWNRRDVSDGAMSGLERQVMHQLLTQWAHPEFASIKGFGANLNASPYNHGGTIVSADWTAATLPSWIDSIMEGVRRPGAVLSLGPKAVLQGLRETPTLLLMHWAFATGLMQFGVFRRD

SEQ ID NO: 2272 - DNA, 975 bp, Synechococcus sp. WH 5701
  CDS (1)..(975): transl_table=11
atgccgctgccaacctggctgccgcctctggccatcggcgccggagccggtctgctcagtcttgccctggtgagggaatggcagcgccgtgaccgccgcttccagagcacggccaccgtggctgaggcctacgaccgctggaccggtgatcggctgctggaaaacctctggggtgagcacgtgcacctcgggcactacggcaaccccccggtggcccgcgatttcagggccgccaaggaagagttcgtgcatgagctggtgcgctggtcgggcctcgaccatctaccccccggcacccggctgctggatgtgggttgcggcatcggcggcagcgcccgcaccctcgcccgcgactacggcttcgacgtgctgggcatcagcatcagcccagcccaggtggagcgggcccgccagctcacgccctccgggctctcctgccgtttcgcggtgatggacgccctggctctggagctggaggacggcagcgtccaggccgtgtggagcgtggaagcggggccacacatgcccgacaagcagcgctatgccgatgaactgctgcgggtcctggccccggcagggcagctggtggtggccgactggaaccggcgcgatcccgccgacggcgagctcaacggtctggagcgctgggtgatggatcagctgctgcaccagtgggcccatccggaatttgcctccatcccctccttccgccgcaacctggaagccagcccccatcggcgggccggtgccgtggagaccgctgactggagtgaggccaccctgccctcctggatcgactccattctcgaaggggtgcgccgccccggcgccatcctcagcctgggaccagcagccgtgctgcaggggttgcgggaagcgcccacgatcctgctgatgcactgggcgttcagcaccgggatgatgcgcttcggggtgttccgctacggctcctcggacaggttggtgagcgggtag

SEQ ID NO: 2273 - protein, 324 aa, Synechococcus sp. WH 5701
MPLPTWLPPLAIGAGAGLLSLALVREWQRRDRRFQSTATVAEAYDRWTGDRLLENLWGEHVHLGHYGNPPVARDFRAAKEEFVHELVRWSGLDHLPPGTRLLDVGCGIGGSARTLARDYGFDVLGISISPAQVERARQLTPSGLSCRFAVMDALALELEDGSVQAVWSVEAGPHMPDKQRYADELLRVLAPAGQLVVADWNRRDPADGELNGLERWVMDQLLHQWAHPEFASIPSFRRNLEASPHRRAGAVETADWSEATLPSWIDSILEGVRRPGAILSLGPAAVLQGLREAPTILLMHWAFSTGMMRFGVFRYGSSDRLVSG

SEQ ID NO: 2274 - DNA, 966 bp, Synechococcus sp. WH 7805
  CDS (1)..(966): transl_table=11
atgccactgcctgcttttctcggaccagcggcgatcggtgtggcggctgccgcgggtgcctatgtgctttggtctcggcgcaatcgcgcttacctctccagcgagagtgttgcttcggcatacgacgcttggacggaggacaggcttctagaaactctctggggcgatcatgttcatctcggtcactacggagctcccccccgcaacaaggatttccgtcgtgccaaagccgatttcgtccatgaattggttcgctggagtggcctagaccagctgccacctggagcgaaagtgctggatgtgggttgcggcatcggcggcagcgccaggattctggccagggattatgggtttgacgttcttggagtcagcatcagcccagcccagatccgccgggccaccgagctcaccccggaggggatgacctgcaggttcgccgttatggatgccctcgatctagagctgaacgatggagagtttgatgcggtttggagtgtggaagccggtccgcacatgccggacaagcagcgttatgccgatgaattgttgcgcatgatccgtcctggtggaatgctggccatcgcggattggaatcgtcgcgacccgctggatggacctttaaatcgccaagagcgctgggtcatgcatcagctgctcacccagtgggcgcaccctgaattcgccagcatccgtgggctgcagcacaacctggaaaccagcgtttattcgaaaggtccgattgcagtggccaattggaatcagcagacattgccctcctggaacgattcgatccttgaaggattaagacggccctcagccgttctgcgacttggcccctcagccatcgttcagggtttgcgcgaaacaccgacactgctgttgatgcgctgggccttcgcccggggaatgatgcagtttggtgtgtttcgcctgaatggagatcaggagagatctgaactcggataa

SEQ ID NO: 2275 - protein, 321 aa, Synechococcus sp. WH 7805
MPLPAFLGPAAIGVAAAAGAYVLWSRRNRAYLSSESVASAYDAWTEDRLLETLWGDHVHLGHYGAPPRNKDFRRAKADFVHELVRWSGLDQLPPGAKVLDVGCGIGGSARILARDYGFDVLGVSISPAQIRRATELTPEGMTCRFAVMDALDLELNDGEFDAVWSVEAGPHMPDKQRYADELLRMIRPGGMLAIADWNRRDPLDGPLNRQERWVMHQLLTQWAHPEFASIRGLQHNLETSVYSKGPIAVANWNQQTLPSWNDSILEGLRRPSAVLRLGPSAIVQGLRETPTLLLMRWAFARGMMQFGVFRLNGDQERSELG

SEQ ID NO: 2276 - DNA, 954 bp, Synechococcus sp. RS9916
  CDS (1)..(954): transl_table=11
atgagttcctctgctgttcttgggctggtgatcggcctgcccgtggcggttgctgctggcgttctgctgtgggcgaagcgcaaccgcgcctatcactccagtgaaagcgtcgccgcggcctatgacgcctggaccgaagatcgcttactggagaacctctggggtgagcacgtccacctcggccactacggagatccaccgcgacaacgggattttcgcgaagcgaaagccgattttgtgcatgctctcgtgcactggagtggcctggatcgcttatcaccaggcacgaagatccttgatgtgggctgtggcattggcggcagtgcgcgcatcctggcccgcgactatggcttcgatgtgctgggcatcagcatcagtcccgcccaggtggccagggccacagccctaacgcctgcaggactcagctgccgcttcgctgtgatggatgcccttgatctgcaattggcagaccaacagtttgatgcggtgtggagcgtggaggcaggaccgcacatgcccgacaagcagcgctacgccgacgaattgctgcgcgtgctcaagcccggtggaacgttggcggtggccgactggaacaggcgtgatcccagtgacggcgagatgaatcgccgcgaacgctgggtgatgcaccaactgctcacccaatgggcccaccccgaattttccagcatcaaaggattccatcgcaatctggaggccagcccccatcagcgcgggaccattgaggtgggtgactggacccgagccacacttccttcgtggatcgattccgtcgttgaaggccttcggcgccccggagcagtgctcggccttggtccttccgccgtgcttcagggcctgcgcgaaacacccaccctgctgctgatgcactgggctttcgccaccggtctgatgcagttcggagtgttccgcaccacccgccagcaggagccatga

SEQ ID NO: 2277 - protein, 317 aa, Synechococcus sp. RS9916
MSSSAVLGLVIGLPVAVAAGVLLWAKRNRAYHSSESVAAAYDAWTEDRLLENLWGEHVHLGHYGDPPRQRDFREAKADFVHALVHWSGLDRLSPGTKILDVGCGIGGSARILARDYGFDVLGISISPAQVARATALTPAGLSCRFAVMDALDLQLADQQFDAVWSVEAGPHMPDKQRYADELLRVLKPGGTLAVADWNRRDPSDGEMNRRERWVMHQLLTQWAHPEFSSIKGFHRNLEASPHQRGTIEVGDWTRATLPSWIDSVVEGLRRPGAVLGLGPSAVLQGLRETPTLLLMHWAFATGLMQFGVFRTTRQQEP

SEQ ID NO: 2278 - DNA, 1059 bp, Zea mays
  CDS (1)..(1059)
atggctcacgcggcgctgctccattgctcccagtcctccaggagcctcgcagcctgccgccgcggcagccactaccgcgccccttcgcacgtcccgcgccactcccgccgtctccgacgcgccgtcgtcagcctgcgtccgatggcctcgtcgacggctcaggcccccgcgacggcgccgccgggtctgaaggagggcatcgcggggctgtacgacgagtcgtcggggctgtgggagaacatctggggcgaccacatgcaccacggcttctacgactcgagcgaggccgcctccatggccgatcaccgccgcgcccagatccgcatgatcgaggaggcgctcgccttcgccggtgtcccagcctcagatgatccagagaagacaccaaaaacaatagtcgatgtcggatgtggcattggtggtagctcaaggtacttggcgaagaaatacggagcgcagtgcactggcaccacgttgagccctgttcaagccgagagaggaaatgctctcgctgcagcgcaggggttgtcggatcaggttactctgcaagttgctgatgctctggagcaaccgtttcctgacgggcagttcgatctggtgtggtccatggagagtggcgagcacatgccggacaagagaaagtttgttagtgagctagcacgcgtggcggctcctggagggacaataatcatcgtgacatggtgccataggaacctggatccatccgaaacctcgctaaagcccgatgaactgagcctcctgaggaggatatgcgacgcgtactacctcccggactggtgctcaccttcagactatgtgaacattgccaagtcactgtctctcgaggatatcaagacagctgactggtcggagaacgtggccccgttttggcccgccgtgataaaatcagcgctaacatggaagggcttcacctctctgctgacgaccggatggaagacgatcagaggcgcgatggtgatgccgctaatgatccagggctacaagaaggggctcatcaaattcaccatcatcacctgtcgcaagcctggagccgcgtag

SEQ ID NO: 2279 - protein, 352 aa, Zea mays
MAHAALLHCSQSSRSLAACRRGSHYRAPSHVPRHSRRLRRAVVSLRPMASSTAQAPATAPPGLKEGIAGLYDESSGLWENIWGDHMHHGFYDSSEAASMADHRRAQIRMIEEALAFAGVPASDDPEKTPKTIVDVGCGIGGSSRYLAKKYGAQCTGTTLSPVQAERGNALAAAQGLSDQVTLQVADALEQPFPDGQFDLVWSMESGEHMPDKRKFVSELARVAAPGGTIIIVTWCHRNLDPSETSLKPDELSLLRRICDAYYLPDWCSPSDYVNIAKSLSLEDIKTADWSENVAPFWPAVIKSALTWKGFTSLLTTGWKTIRGAMVMPLMIQGYKKGLIKFTIITCRKPGAA

SEQ ID NO: 2280 - DNA, 921 bp, Oryza sativa subsp
  CDS (1)..(921)
atggcaccgacgttgtcctcgtcgtcgacggcggcggcagctcccccggggctgaaggagggcatcgcggggctctacgacgagtcgtccggcgtgtgggagagcatctggggcgagcacatgcaccacggcttctacgacgccggcgaggccgcctccatgtccgaccaccgccgcgcccagatccgcatgatcgaggaatccctcgccttcgccgccgtccccgatgatgcggagaagaaacccaaaagtatagttgatgttggctgtggcattggtggtagctcaagatacttggcgaacaaatacggagcgcaatgctacggcatcacgttgagtccggtgcaggctgaaagaggaaatgccctcgcggcagagcaagggttatcagacaaggtctcctttcaagttggtgatgcattggagcagccttttcctgatgggcagtttgatcttgtctggtccatggagagtggcgagcacatgccagacaaacggcagtttgtaagcgagctggcacgcgtcgcagctcctggggcgagaataatcattgtgacctggtgccataggaacctcgagccatccgaagagtccctgaaacctgatgagctgaatctcctgaaagggatatgcgatgcatattatctcccagactggtgctctccttctgattatgtcaaaattgccgagtcactgtctcttgaggatataaggacagctgattggtcagagaacgtcgccccattctggcctgcggttataaaatcagcattgacatggaaaggtttaacttctctgctaagaagtgggtggaagacgataagaggtgcaatggtgatgcctctgatgatcgaaggatacaagaaagggctcatcaaattcaccatcatcacctgtcgcaagcccgaaacaacgcagtag

SEQ ID NO: 2281 - protein, 306 aa, Oryza sativa subsp
MAPTLSSSSTAAAAPPGLKEGIAGLYDESSGVWESIWGEHMHHGFYDAGEAASMSDHRRAQIRMIEESLAFAAVPDDAEKKPKSIVDVGCGIGGSSRYLANKYGAQCYGITLSPVQAERGNALAAEQGLSDKVSFQVGDALEQPFPDGQFDLVWSMESGEHMPDKRQFVSELARVAAPGARIIIVTWCHRNLEPSEESLKPDELNLLKGICDAYYLPDWCSPSDYVKIAESLSLEDIRTADWSENVAPFWPAVIKSALTWKGLTSLLRSGWKTIRGAMVMPLMIEGYKKGLIKFTIITCRKPETTQ

SEQ ID NO: 2282 - DNA, 921 bp, Oryza sativa subsp
  CDS (1)..(921)
atggcaccgacgttgtcctcgtcgtcgacggcggcggcagctcccccggggctgaaggagggcatcgcggggctctacgacgagtcgtccggcgtgtgggagagcatctggggcgagcacatgcaccacggcttctacgacgccggcgaggccgcctccatgtccgaccaccgccgcgcccagatccgcatgatcgaggaatccctcgccttcgccgccgtccccgatgatgcggagaagaaacccaaaagtgtagttgatgttggctgtggcattggtggtagctcaagatacttggcgaacaaatacggagcgcaatgctacggcatcacgttgagtccggtgcaggctgaaagaggaaatgccctcgcggcagagcaagggttatcagacaaggtctcctttcaagttggtgatgcattggagcagccttttcctgatgggcagtttgatcttgtctggtccatggagagtggcgagcacatgccagacaaacggcagtttgtaagcgagctggcacgcgtcgcagctcctggggcgagaataatcattgtgacctggtgccataggaacctcgagccatccgaagagtccctgaaacctgatgagctgaatctcctgaaaaggatatgcgatgcatattatctcccagactggtgctctccttctgattatgtcaaaattgccgagtcactgtctcttgaggatataaggacagctgattggtcagagaacgtcgccccattctggcctgcggttataaaatcagcattgacatggaaaggtttaacttctctgctaagaagtgggtggaagacgataagaggtgcaatggtgatgcctctgatgatcgaaggatacaagaaagggctcatcaaattcaccatcatcacctgtcgcaagcccgaaacaacgcagtag

SEQ ID NO: 2283 - protein, 306 aa, Oryza sativa subsp
MAPTLSSSSTAAAAPPGLKEGIAGLYDESSGVWESIWGEHMHHGFYDAGEAASMSDHRRAQIRMIEESLAFAAVPDDAEKKPKSVVDVGCGIGGSSRYLANKYGAQCYGITLSPVQAERGNALAAEQGLSDKVSFQVGDALEQPFPDGQFDLVWSMESGEHMPDKRQFVSELARVAAPGARIIIVTWCHRNLEPSEESLKPDELNLLKRICDAYYLPDWCSPSDYVKIAESLSLEDIRTADWSENVAPFWPAVIKSALTWKGLTSLLRSGWKTIRGAMVMPLMIEGYKKGLIKFTIITCRKPETTQ

SEQ ID NO: 2284 - DNA, 1038 bp, Vitis vinifera
  CDS (1)..(1038)
atggcagtcattcctgcgtcctgcaagtgccacctgttaccgctgctgcagccaccccagcgcctcccttctccaccccacgtgtggcctcgacctgcggtgactgcgccgacttcgaggagattcgcacgtttgacggcggcggctatatccacgatgtcgccggaggacgcgtcgctgaagaagggcatagcggagctttacgaccagtcttccggcttgtgggaggacatctggggtgaccacatgcaccacggcttctacgagccggactccgccgcttcagatgccgaccaccggttcgctcagatccgaatgatcgaagagagcctccggttcgccggagtttccgaggagggagagaagaggccaaagagagtggtggatgtggggtgtgggattggagggagctcaaggtacttggctaagaagtatggggccagttgccaagggattactctcagtcccctccaagctcaaagggctcagactcttgctgcatcccaaggtttggctgacaaggtatctttccaagttgcagatgctctggatcaaccgtttcctgatggacaatttgatctggtttggtccatggagagtggagaacacatgcctgacaaaaaaaagtttgttagtgagttggctcgagttgtagccccaggtggcacaataatacttgtaacatggtgccatagggatctctccccttctgaagaatccttaaagccagaggagaaagcactcttggacaagatttgcagtgcttattatcttccagattggtgttctactactgattatgtcaaattacttgagtctctatctcttcaggatatcaaggccgcagattggtctgagtatgttgcacccttttggccagcagtgatacgctctgctttgacgttcaagggcttcatatcactgttacgcagtggatggaaaaccataagaggagcattggtgatgccattgatgatccgagggtacaagatgggcctgattaagtttgctatcattacatgtcgaaagcccgaatga

SEQ ID NO: 2285 - protein, 345 aa, Vitis vinifera
MAVIPASCKCHLLPLLQPPQRLPSPPHVWPRPAVTAPTSRRFARLTAAAISTMSPEDASLKKGIAELYDQSSGLWEDIWGDHMHHGFYEPDSAASDADHRFAQIRMIEESLRFAGVSEEGEKRPKRVVDVGCGIGGSSRYLAKKYGASCQGITLSPLQAQRAQTLAASQGLADKVSFQVADALDQPFPDGQFDLVWSMESGEHMPDKKKFVSELARVVAPGGTIILVTWCHRDLSPSEESLKPEEKALLDKICSAYYLPDWCSTTDYVKLLESLSLQDIKAADWSEYVAPFWPAVIRSALTFKGFISLLRSGWKTIRGALVMPLMIRGYKMGLIKFAIITCRKPE

SEQ ID NO: 2286 - DNA, 1098 bp, Triticum aestivum
  CDS (1)..(1098)
atggcaaactccgccgccctgctccactcactcctctccaccgcctggacgccgcgccgccgcctcgaccgagcctcggccacgcggctcgccccgtcccccggcctgtcctgccgctcctcccggccgacgcgctccgtgcgcccgatggcgtcgtcgacgaccgcggcccgggccgacgcggcgccgccggggctgaaggagggcatcgcggggctctacgacgagtcgtccggcctgtgggagagcatctggggcgagcacatgcaccacggcttctacgactccggcgaggccgcctccatgtccgaccaccgccgcgcccagatccgcatgatcgaggaggccctcgccttcgccgccgtccccgacgatccgacaaacaaaccgaaaacgattgttgatgttggatgcggaatcggtggtagctcaagatacctggcgaacaaatatggagcacaatgctctgggatcacattgagcccagtgcaagccgagagaggaaatgccctcgcagcagcacaggggttgtcggacaaggcttctttccaagttgctgatgctctggagcaaccatttcctgatgggcagtttgatcttgtctggtctatggagagtggtgagcacatgccgaacaaacagaagtttgtaagcgagctggcacgcgtcgcagctccaggagcaactatcatcatcgtgacctggtgccataggaacctcgcgccgtcggaggactcactgaaacctgacgagctgaatcttttgaaaaagatttgtgatgcatattacctcccggattggtgctcgccctcggattatgtcaagattgccgagtcattgtctcttgaggatatcaaaacggccgactggtcagaaaacgtggccccgttctggcctgctgtcatccaatcagcactgacatggaaaggcctcacttctctactaaggagtggatggaagacgataaagggagcactggtgatgcctctcatgatccaaggctacaagaaaggcctcattaagttcagcatcatcacctgccacaaaccccaagcagccatagaaggagaacctgaggccgcatcgcccagagtgtag

SEQ ID NO: 2287 - protein, 365 aa, Triticum aestivum
MANSAALLHSLLSTAWTPRRRLDRASATRLAPSPGLSCRSSRPTRSVRPMASSTTAARADAAPPGLKEGIAGLYDESSGLWESIWGEHMHHGFYDSGEAASMSDHRRAQIRMIEEALAFAAVPDDPTNKPKTIVDVGCGIGGSSRYLANKYGAQCSGITLSPVQAERGNALAAAQGLSDKASFQVADALEQPFPDGQFDLVWSMESGEHMPNKQKFVSELARVAAPGATIIIVTWCHRNLAPSEDSLKPDELNLLKKICDAYYLPDWCSPSDYVKIAESLSLEDIKTADWSENVAPFWPAVIQSALTWKGLTSLLRSGWKTIKGALVMPLMIQGYKKGLIKFSIITCHKPQAAIEGEPEAASPRV

SEQ ID NO: 2288 - DNA, 936 bp, Ostreococcus tauri
  CDS (1)..(936)
atgcgctcgcgcgcggacgagacgacgcggtgcgacgcgcgccgcgcggtggagccgttggtgacgcgaacgtccaccctaaacgagggcatcgccaagttttacgacgaatcgagcgagctgtgggaacgcgtgtggggaagcgacgggggcgacgggacgcacatgcatcacggatactaccgcgcgggcgaaccgatcgatcacgccaaggcgcaggtggacatgatcgaggagagcttgaaattcgcgggcgtcgagggggcgaggcgggtgttggacgtcgggtgcggcatcggcgggagctcgagacacatggtgcgaaagtgggacgggtgcgcggcggagggcgtgacgctgtcgccggtgcaggcggcgcgggcgaacgcgctggcgatagagcaaggcgtggaggatcgagcgaattatcgcgtcgcggacgcgctgaatacgccgttcgaggacgcgtcgttcgatttcgtgtggtccatggaatcgggcgagcacatgccggacaagaagaaattcgtcgacgaactcgcgcgggtgtgcgaacccggggggacgattttgatcgttacctggtgtcatcgcgtgttgaaagacggcgagaccgagctcgaggctggggagaagatcttgctcgatcgcatctgcgacgcgtactacctcccggcgtggtgctccgtcgcggattacgagtcgctcgcgaaagacgctggtctggtggacatacgcacggctgattggagtgaggaggtgaagccgttctggaaaggggtcatcaagaccgcgctgacgccgagagggataatcggtctcatcaaatctggcgccgccaccttgcgcggagcgctcgtgatgccgctcatgcaaaccggcttggcgacgggaaccattaaatttaacgtcatcgtcgctcgaaaacccatctga

SEQ ID NO: 2289 - protein, 311 aa, Ostreococcus tauri
MRSRADETTRCDARRAVEPLVTRTSTLNEGIAKFYDESSELWERVWGSDGGDGTHMHHGYYRAGEPIDHAKAQVDMIEESLKFAGVEGARRVLDVGCGIGGSSRHMVRKWDGCAAEGVTLSPVQAARANALAIEQGVEDRANYRVADALNTPFEDASFDFVWSMESGEHMPDKKKFVDELARVCEPGGTILIVTWCHRVLKDGETELEAGEKILLDRICDAYYLPAWCSVADYESLAKDAGLVDIRTADWSEEVKPFWKGVIKTALTPRGIIGLIKSGAATLRGALVMPLMQTGLATGTIKFNVIVARKPI

SEQ ID NO: 2290 - DNA, 1023 bp, Ostreococcus tauri
  CDS (1)..(1023)
atgacgaatcgggacattgactacgggaagcaactcgtcgcctcggtcgctggtttggcgctcgcggcggggattttgaaggtgaagaaggttttggacacgccgagtcgaacgtacatccccggggagaacaccgtgggggcggagtacgacgcgtggaccgaggaggaaattttagagtactactggggcgagcacatccatctcgggtactaccgcgacgaagacttggccaagggcgcgggcacgctcctgggacacagagtgaaagatttcatcgaggccaaggaagatttcgtggacgagatgtacgcgtggagcggggtggaggcgaacaacggcgggaaaaagccgaagaaaatattggacgtcggttgcggcatcggcggagcgacgcgacgcttggcgtccaaatgcgtcggacccgatagccaagtgacgggcatcacgctatcttcaaagcaagcggcgcgcgcgaccgcgctcgccgagcgccaaggaattccgaacgccgatttccaagtcatggacgcgctcgcgatgacgtttgaagacgacacgtttgacatggtgtgggcgtgcgagagcggcgaacacatgccggacaagaagaagtacgtcgacgagatggttcgcgtgctcaaaccgggcgggacactcgtcatcgcgacgtggtgtcagcgacacgctccgccggagttgacggcggtggagaagagtaagcttcagtttttgtacgacgagtgggcgcatccgtacttcatctccatcaaggattattgctcgctcgccaccgacacgggcgcgatgacgcgcgtggagggggacgactggacgaaacaaacgatcgtgagctggcgtcactccatctgggctggcgtgtacgatccgattcccgtgttctctcgaccgaaaatttggtacaagacgctgcgcgacatcgtctgtctcgagcgcatgcgtcgcgcgttcggcgagggactcatgcaatacgggatgattcgcggcgtgaagaaggaatag

SEQ ID NO: 2291 - protein, 340 aa, Ostreococcus tauri
MTNRDIDYGKQLVASVAGLALAAGILKVKKVLDTPSRTYIPGENTVGAEYDAWTEEEILEYYWGEHIHLGYYRDEDLAKGAGTLLGHRVKDFIEAKEDFVDEMYAWSGVEANNGGKKPKKILDVGCGIGGATRRLASKCVGPDSQVTGITLSSKQAARATALAERQGIPNADFQVMDALAMTFEDDTFDMVWACESGEHMPDKKKYVDEMVRVLKPGGTLVIATWCQRHAPPELTAVEKSKLQFLYDEWAHPYFISIKDYCSLATDTGAMTRVEGDDWTKQTIVSWRHSIWAGVYDPIPVFSRPKIWYKTLRDIVCLERMRRAFGEGLMQYGMIRGVKKE

SEQ ID NO: 2292 - DNA, 1044 bp, Brassica juncea
  CDS (1)..(1044)
atgaaagcgactctcgcaccaccctcctctctcataagcctccccaggcacaaagtatcttctctccgttcaccgtcgcttctccttcagtcccaacggccatcctcagccttaatgacgacgacggcatcacgtggaagcgtggctgtgacggctgctgctacctcctccgctgaggcgctgcgagaaggaatagcggaattctacaacgagacgtcgggattatgggaggagatttggggagatcatatgcatcacggcttctacgatcctgattcctctgttcaactttcagattccggtcaccgggaagctcagatccggatgattgaagagtctctacgtttcgccggcgttactgaagaggagaaaaagataaagatagtggtggatgttgggtgtgggatcggaggaagctcaaggtatattgcctctaaatttggtgccgaatgcattggcatcacactcagtcccgttcaagccaagagagcaaatgatctcgccaccgctcaatcactctctcataaggtttccttccaagttgcagatgcattggaccaaccatttgaagatggtatattcgatcttgtttggtcaatggaaagcggtgagcatatgcctgacaaggccaagttcgtgaaggaattggtacgtgtgacggctccaggaggaaggataataatagtgacatggtgccacagaaatctatctcaaggggaagaatctttgcagccatgggagcagaacctcttggacagaatctgcaaaacattttatctcccggcctggtgctccaccactgattatgtcgagttgcttcaatccctctcgctccaggatattaagtatgcagattggtcagagaacgtagctcctttctggccggcggttatacgaaccgcattaacgtggaagggccttgtgtctctgcttcgtagtggtatgaagagtataaaaggagcattgacaattccattgatgattgaagggtacaagaaaggtgtcattaagtttggcatcatcacttgccagaagcctctctga

SEQ ID NO: 2293 - protein, 347 aa, Brassica juncea
MKATLAPPSSLISLPRHKVSSLRSPSLLLQSQRPSSALMTTTASRGSVAVTAAATSSAEALREGIAEFYNETSGLWEEIWGDHMHHGFYDPDSSVQLSDSGHREAQIRMIEESLRFAGVTEEEKKIKIVVDVGCGIGGSSRYIASKFGAECIGITLSPVQAKRANDLATAQSLSHKVSFQVADALDQPFEDGIFDLVWSMESGEHMPDKAKFVKELVRVTAPGGRIIIVTWCHRNLSQGEESLQPWEQNLLDRICKTFYLPAWCSTTDYVELLQSLSLQDIKYADWSENVAPFWPAVIRTALTWKGLVSLLRSGMKSIKGALTIPLMIEGYKKGVIKFGIITCQKPL

SEQ ID NO: 2294 - DNA, 1044 bp, Brassica napus
  CDS (1)..(1044)
atgaaagcgactctcgcaccaccctcctctctcataagcctcccaaggcacaaagtatcttctctccgttcaccgtcgcttctccttcagtcccaacggccatcctcagccttaatgacaacgacggcatcacgtggaagcgtagctgtgacggctgctgctacctcctccgctgaggcgctgcgagaaggaatagcggaattctacaacgagacgtcgggattatgggaggagatttggggagatcatatgcatcacggcttctacgatcccgattcctctgttcaactttcagattccggtcaccgggaagctcagatccggatgattgaagagtctctacgtttcgccggcgttactgaagaggagaaaaagataaagagagtggtggatgttgggtgtgggatcggaggaagctcaaggtatattgcctctaaatttggtgccgaatgcattggcatcacactcagtcccgttcaagccaagagagccaatgatctcgccgccgctcaatcactctctcataaggtttccttccaagttgcagatgcattggaccaaccatttgaagatggtattttcgatcttgtttggtcaatggaaagcggtgagcatatgcctgacaaggccaagttcgtgaaggaattggtacgtgtgacggctccaggaggaaggataataatagtgacatggtgccacagaaatctatctcaaggggaagaatctttgcagccatgggagcaggacctcttggacagaatctgcaaaacattttatctcccggcctggtgctccaccactgattatgtcgagttgcttcaatccctctcgctccaggatattaagtatgcagattggtcagagaacgtagctcctttctggccggcggttatacgaaccgcattaacgtggaagggccttgtgtctctgcttcgtagtggtatgaagagtataaaaggagcattgacaattccattgatgattgaagggtacaagaaaggtgtcattaagtttggcatcatcacttgccagaaacctctctaa

SEQ ID NO: 2295 - protein, 347 aa, Brassica napus
MKATLAPPSSLISLPRHKVSSLRSPSLLLQSQRPSSALMTTTASRGSVAVTAAATSSAEALREGIAEFYNETSGLWEEIWGDHMHHGFYDPDSSVQLSDSGHREAQIRMIEESLRFAGVTEEEKKIKRVVDVGCGIGGSSRYIASKFGAECIGITLSPVQAKRANDLAAAQSLSHKVSFQVADALDQPFEDGIFDLVWSMESGEHMPDKAKFVKELVRVTAPGGRIIIVTWCHRNLSQGEESLQPWEQDLLDRICKTFYLPAWCSTTDYVELLQSLSLQDIKYADWSENVAPFWPAVIRTALTWKGLVSLLRSGMKSIKGALTIPLMIEGYKKGVIKFGIITCQKPL

SEQ ID NO: 2296 - DNA, 1035 bp, Gossypium hirsutum
  CDS (1)..(1035)
atggctgccgcgttacaattacaaacacacccttgcttccatggcacgtgccaactctcacctccgccacgaccttccgtttccttcccttcttcctcccgctcgtttccatctagcagacgttccctgtccgcgcatgtgaaggcggcggcgtcgtctttgtccaccaccaccttgcaggaagggatagcggagttctacgaccagtcgtcggggatttgggaagacatatggggtgaccatatgcaccatggatattacgacccggattccaatgtttcaggctcagatcatccagccgcccagatccgaatgatcgaagaatcgctccgtttcgctggaataaccgaggacccagcaaacaaacccaagacaatagttgatgttggatgtgggataggaggcagctctagatacctagcaaggaaatatggagcaaaatgccaaggcattactttgagccctgtccaagctggaagagccaatgctcttgctaaagatcaaggactagcagacaaggtttcatttcaagttgcagatgccctgaaccaaccattccctgatgaccaatttgatctagtttggtctatggaaagcggagaacacatgcctgacaaacccaagtttgttaaagagctggcacgagtggcagctccaggaggcacaataataatagtgacatggtgccatagggatcttggtccatcagaagaggatttgcagccatgggagaaaaagctgctaaacagaatatgtaatgcttactatttaccagagtggtgttctacttctgactatgtcaaactacttcagtccctatctctccaggatataaaggcagcagattggactgagaatgtagcacccttttggccagcagtgatacgctcagcattgacatggaagggcttcacatcactgctacgaagtggattaaaaacaataaaaggtgcactagtgatgccattgatgatccaagggtaccagaaaggggtgataaagttcgctatcatcacatgccggaaacccgagtaa

SEQ ID NO: 2297 - protein, 344 aa, Gossypium hirsutum
MAAALQLQTHPCFHGTCQLSPPPRPSVSFPSSSRSFPSSRRSLSAHVKAAASSLSTTTLQEGIAEFYDQSSGIWEDIWGDHMHHGYYDPDSNVSGSDHPAAQIRMIEESLRFAGITEDPANKPKTIVDVGCGIGGSSRYLARKYGAKCQGITLSPVQAGRANALAKDQGLADKVSFQVADALNQPFPDDQFDLVWSMESGEHMPDKPKFVKELARVAAPGGTIIIVTWCHRDLGPSEEDLQPWEKKLLNRICNAYYLPEWCSTSDYVKLLQSLSLQDIKAADWTENVAPFWPAVIRSALTWKGFTSLLRSGLKTIKGALVMPLMIQGYQKGVIKFAIITCRKPE

SEQ ID NO: 2298 - DNA, 1059 bp, Zea mays
  CDS (1)..(1059)
atggctcacgcggcgctgctccattgctcccagtcctccaggagcctcgcagcctgccgccgcggcagccactaccgcgccccttcgcacgtcccgcgccactcccgccgtctccgacgcgccgtcgtcagcctgcgtccgatggcctcgtcgacggctcaggcccccgcgacggcgccgccgggtctgaaggagggcatcgcggggctgtacgacgagtcgtcggggctgtgggagaacatctggggcgaccacatgcaccacggcttctacgactcgagcgaggccgcctccatggccgatcaccgccgcgcccagatccgcatgatcgaggaggcgctcgccttcgccggtgtcccagcctcagatgatccagagaagacaccaaaaacaatagtcgatgtcggatgtggcattggtggtagctcaaggtacttggcgaagaaatacggagcgcagtgcactgggatcacgttgagccctgttcaagccgagagaggaaatgctctcgctgcagcgcaggggttgtcggatcaggttactctgcaagttgctgatgctctggagcaaccgtttcctgacgggcagttcgatctggtgtggtccatggagagtggcgagcacatgccggacaagagaaagtttgttagtgagctagcacgcgtggcggctcctggagggacaataatcatcgtgacatggtgccataggaacctggatccatccgaaacctcgctaaagcccgatgaactgagcctcctgaggaggatatgcgacgcgtactacctcccggactggtgctcaccttcagactatgtgaacattgccaagtcactgtctctcgaggatatcaagacagctgactggtcggagaacgtggccccgttttggcccgccgtgataaaatcagcgctaacatggaagggcttcacctctctgctgacgaccggatggaagacgatcagaggcgcgatggtgatgccgctaatgatccagggctacaagaagggcctcatcaaattcaccatcatcacctgtcgcaagcctggagccgcgtag

SEQ ID NO: 2299 - protein, 352 aa, Zea mays
MAHAALLHCSQSSRSLAACRRGSHYRAPSHVPRHSRRLRRAVVSLRPMASSTAQAPATAPPGLKEGIAGLYDESSGLWENIWGDHMHHGFYDSSEAASMADHRRAQIRMIEEALAFAGVPASDDPEKTPKTIVDVGCGIGGSSRYLAKKYGAQCTGITLSPVQAERGNALAAAQGLSDQVTLQVADALEQPFPDGQFDLVWSMESGEHMPDKRKFVSELARVAAPGGTIIIVTWCHRNLDPSETSLKPDELSLLRRICDAYYLPDWCSPSDYVNIAKSLSLEDIKTADWSENVAPFWPAVIKSALTWKGFTSLLTTGWKTIRGAMVMPLMIQGYKKGLIKFTIITCRKPGAA

SEQ ID NO: 2300 - DNA, 1107 bp, Solanum tuberosum
  CDS (1)..(1107)
atgggcagcccatgctattccgcttgtactatccaatcattgaaccccacgtgtccttcatcttcttcctcctctgttatcttcgctcttcataaaccccagattcacagtaatattattcaaaattatactaggagaagaatcattacttgtagtagtaatagtagaagaagaatggctagtgttactgcgatgaatgctgggtcttcatcatcagtagaagttggaatacagaatcaacaagagttgaaaaaaggaattgcagatttatatgatgagtcttctgggatttgggaagatatttggggtgaccatatgcatcatggatattatgaacctcagtcatctgtggaactttctgatcatcgtgctgctcagatccgtatgattgaaaaggcgctaagttttgctgctatttctgaagatccagcgaagaaaccaacgtccatagttgatgttggatgtggcattggtggcagttctaggtaccttgcaaagaaatatggcgctacagctaaaggtatcactttgagtcctgtacaagcagagagggctcaagctcttgctgatgctcagggattaggggataaggtttcatttcaagtagcagacgccttgaatcagccttttccagatgggcaattcgacttggtttggtccatggagagtggagaacacatgccaaacaaagaaaagtttgttggcgaattagctagagtggcagcaccaggaggcacaatcatccttgtcacatggtgccacagggacctttccccttcagaggaatctctgactccagaggagaaagagctgttaaataagatatgtaaagccttctatcttccggcgtggtgttccgctgctgattatgtgaagttacttcaatccaattctcttcaggatattaaggcagaagactggtctgagaatgttgctccattttggccagcagtcataaagtcagcactgacatggaagggcttcacatcagtactacgcagtggatggaagacaatcaaagctgcactggcaatgccactgatgattgaaggatacaagaaaggtctcatcaaatttgccatcatcacatgtcgaaaacctgaatag

SEQ ID NO: 2301 - protein, 368 aa, Solanum tuberosum
MGSPCYSACTIQSLNPTCPSSSSSSVIFALHKPQIHSNIIQNYTRRRIITCSSNSRRRMASVTAMNAGSSSSVEVGIQNQQELKKGIADLYDESSGIWEDIWGDHMHHGYYEPQSSVELSDHRAAQIRMIEKALSFAAISEDPAKKPTSIVDVGCGIGGSSRYLAKKYGATAKGITLSPVQAERAQALADAQGLGDKVSFQVADALNQPFPDGQFDLVWSMESGEHMPNKEKFVGELARVAAPGGTIILVTWCHRDLSPSEESLTPEEKELLNKICKAFYLPAWCSAADYVKLLQSNSLQDIKAEDWSENVAPFWPAVIKSALTWKGFTSVLRSGWKTIKAALAMPLMIEGYKKGLIKFAIITCRKPE

SEQ ID NO: 2302 - DNA, 1089 bp, Solanum lycopersicum
  CDS (1)..(1089)
atgggcagccaatgctattccgcttattctatccaatcattgaaccccacgtgtccatcatcttcttcctcctctgttatcttcactcttcttaaaccccagattcacagaagaagaatcattacttgttgtaatagtagtagaagaagaagaagaatggctagtgttgctgcgatgaatgctgtgtcttcgtcatctgtagaagttggaatacagaatcaacaggagctgaaaaaaggaattgcagatttatatgatgagtcttctgggatttgggaagatatttggggtgaccatatgcatcatggatattatgaacctaaatcctctgtggaactttcagatcatcgtgctgctcagatccgtatgattgaacaggctctaagttttgctgctatttctgaagatccagcgaagaaaccaacgtccatagttgatgttggatgtggcatcggtggcagttctaggtaccttgcaaagaaatatggcgctacagctaaaggtatcactttgagtcctgtacaagcagagagggctcaagctcttgctgatgctcagggattaggtgataaggtttcatttcaagtagcagacgccttgaatcagccttttccagatgggcaattcgacttggtttggtccatggagagtggagaacacatgccgaacaaagaaaagtttgttggcgaattagctcgagtggcagcaccaggaggcacaatcatccttgtcacatggtgccacagggacctttccccttcggaggaatctctgactccagaggagaaagagctgttaaataagatatgcaaagccttctatcttccggcttggtgttccactgctgattatgtgaagttacttcaatccaattctcttcaggatatcaaggcagaagactggtctgagaatgttgctccattttggccagcagtcataaagtcagcactgacatggaagggcttcacatcagtactacgcagtggatggaagacaatcaaagctgcactggcaatgccactgatgattgaaggatacaagaaaggtctcatcaaatttgccatcatcacatgtcgaaaacctgaataa

SEQ ID NO: 2303 - protein, 362 aa, Solanum lycopersicum
MGSQCYSAYSIQSLNPTCPSSSSSSVIFTLLKPQIHRRRIITCCNSSRRRRRMASVAAMNAVSSSSVEVGIQNQQELKKGIADLYDESSGIWEDIWGDHMHHGYYEPKSSVELSDHRAAQIRMIEQALSFAAISEDPAKKPTSIVDVGCGIGGSSRYLAKKYGATAKGITLSPVQAERAQALADAQGLGDKVSFQVADALNQPFPDGQFDLVWSMESGEHMPNKEKFVGELARVAAPGGTIILVTWCHRDLSPSEESLTPEEKELLNKICKAFYLPAWCSTADYVKLLQSNSLQDIKAEDWSENVAPFWPAVIKSALTWKGFTSVLRSGWKTIKAALAMPLMIEGYKKGLIKFAIITCRKPE

SEQ ID NO: 2304 - DNA, 1047 bp, Arabidopsis thaliana
  CDS (1)..(1047)
atgaaagcaactctagcagcaccctcttctctcacaagcctcccttatcgaaccaactcttctttcggctcaaagtcatcgcttctctttcggtctccatcctcctcctcctcagtctctatgacgacaacgcgtggaaacgtggctgtggcggctgctgctacatccactgaggcgctaagaaaaggaatagcggagttctacaatgaaacttcgggtttgtgggaagagatttggggagatcatatgcatcatggcttttgtgaccctgattcttctgttcaactttctgattctggtcacaaggaagctcagatccgtatgattgaagagtctctccgttttgccggtgttactgatgaagaggaggagaaaaagataaagaaagtagtggatgttgggtgtgggattggaggaagctcaagatatcttgcctctaaatttggagctgaatgcattggcattactctcagccctgttcaggccaagagagccaatgatctcgcggctgctcaatcactcgctcataaggcttccttccaagttgcggatgcgttggatcagccattcgaagatggaaaattcgatctagtgtggtcgatggagagtggtgagcatatgcctgacaaggccaagtttgtaaaagagttggtacgtgtggcggctccaggaggtaggataataatagtgacatggtgccatagaaatctatctgcgggggaggaagctttgcagccgtgggagcaaaacatcttggacaaaatctgtaagacgttctatctcccggcttggtgctccaccgatgattatgtcaacttgcttcaatcccattctctccaggatattaagtgtgcggattggtcagagaacgtagctcctttctggcctgcggttatacggactgcattaacatggaagggccttgtgtctcggcttcgtagtggtatgaaaagtattaaaggagcattgacaatgccattgatgattgaaggttacaagaaaggtgtcattaagtttggtatcatcacttgccagaagccactctaa

SEQ ID NO: 2305 - protein, 348 aa, Arabidopsis thaliana
MKATLAAPSSLTSLPYRTNSSFGSKSSLLFRSPSSSSSVSMTTTRGNVAVAAAATSTEALRKGIAEFYNETSGLWEEIWGDHMHHGFCDPDSSVQLSDSGHKEAQIRMIEESLRFAGVTDEEEEKKIKKVVDVGCGIGGSSRYLASKFGAECIGITLSPVQAKRANDLAAAQSLAHKASFQVADALDQPFEDGKFDLVWSMESGEHMPDKAKFVKELVRVAAPGGRIIIVTWCHRNLSAGEEALQPWEQNILDKICKTFYLPAWCSTDDYVNLLQSHSLQDIKCADWSENVAPFWPAVIRTALTWKGLVSRLRSGMKSIKGALTMPLMIEGYKKGVIKFGIITCQKPL

SEQ ID NO: 2306 - DNA, 945 bp, Helianthus annuus
  CDS (1)..(945)
atggctacgacggcagttggcgtatcggcgacgccgatgacggagaagctgacggcggcagatgatgaccagcaacagcagaagctcaaaaaaggaatcgcagagttctacgacgaatcctcaggtatgtgggagaacatttggggagaacacatgcatcacggatattataactccgacgacgtcgttgaactctccgatcaccgttctgctcagatccgtatgattgaacaagccctaacgttcgcctctgtttcagatgatccggaaaagaaacctaaaaccatagttgatgtcgggtgtggtataggaggtagctcaaggtatctagcaagaaaatacggagccgaatgtcacggaatcaccctcagccctgtgcaagctgagagagctaatgcccttgctgcggcccaagggttggccgataaggtttcatttcaagttgctgatgctttaaaccagccgtttcctgatggaaagtttgaccttgtttggtcaatggagagtggagagcacatgcctgacaaacttaagtttgttagtgagttgactcgggtggctgcccccggagccaccattatcatagttacatggtgccacagagatcttaaccccggagaaaaatcccttcgccccgaggaagaaaaaatcttgaataagatttgttccagcttttatcttcccgcttggtgttctacagctgattatgtaaagttactagaatccctttctcttcaggacataaaatccgcagactggtctggcaatgtggccccattttggcctgctgtaataaaaacagcattgtcttggaagggcattacttcattgctacgtagtggttggaagtccataagaggggcaatggtaatgccactaatgattgaaggatttaagaaggatgtaataaaattctccatcattacatgcaaaaagcctgaataa

SEQ ID NO: 2307 - protein, 314 aa, Helianthus annuus
MATTAVGVSATPMTEKLTAADDDQQQQKLKKGIAEFYDESSGMWENIWGEHMHHGYYNSDDVVELSDHRSAQIRMIEQALTFASVSDDPEKKPKTIVDVGCGIGGSSRYLARKYGAECHGITLSPVQAERANALAAAQGLADKVSFQVADALNQPFPDGKFDLVWSMESGEHMPDKLKFVSELTRVAAPGATIIIVTWCHRDLNPGEKSLRPEEEKILNKICSSFYLPAWCSTADYVKLLESLSLQDIKSADWSGNVAPFWPAVIKTALSWKGITSLLRSGWKSIRGAMVMPLMIEGFKKDVIKFSIITCKKPE

SEQ ID NO: 2308 - DNA, 945 bp, Helianthus annuus
  CDS (1)..(945)
atggctacgacggcagttggcgtatcggcgacgccgatgacggagaagctgacggcggcagatgatgaccagcagcagcagaagctcaaaaaaggaatcgcagagttctacgacgaatcctcaggtatgtgggagaacatatggggagaacacatgcatcacggatattataactccgacgacgtcgttgaactctccgatcaccgttctgctcagatccgtatgattgaacaagccctaacgttcgcctctgtttcagatgatctggaaaagaaacctaaaaccatagttgatgtcgggtgtggtataggaggtagctcaaggtatctagcaagaaaatacggagccgaatgtcacggaatcaccctcagccctgtgcaagctgagagagctaatgcccttgctgcggcccaagggttggccgataaggtttcatttcaagttgctgatgctttaaaccagccgtttcctgatggaaagtttgacctggtttggtcaatggagagtggagagcacatgcctgacaaacttaagtttgttagtgagttgactcgggtggctgcccccggagccaccattatcatagttacatggtgccacagagatcttaaccccggagaaaaatcccttcgccccgaggaagaaaaaatcttgaataagatttgttccagcttttatcttcccgcttggtgttctacagctgattatgttaagttactagaatccctttctcttcaggacataaaatccgcagactggtctggcaatgtggccccattttggcctgctgtaataaaaacagcattgtcttggaagggcattacttcattgctacgtagtggttggaagtccataagaggggcaatggtaatgccactaatgattgaaggatttaagaaggatgtaataaaattctccatcattacatgcaaaaagcctgaataa

SEQ ID NO: 2309 - protein, 314 aa, Helianthus annuus
MATTAVGVSATPMTEKLTAADDDQQQQKLKKGIAEFYDESSGMWENIWGEHMHHGYYNSDDVVELSDHRSAQIRMIEQALTFASVSDDLEKKPKTIVDVGCGIGGSSRYLARKYGAECHGITLSPVQAERANALAAAQGLADKVSFQVADALNQPFPDGKFDLVWSMESGEHMPDKLKFVSELTRVAAPGATIIIVTWCHRDLNPGEKSLRPEEEKILNKICSSFYLPAWCSTADYVKLLESLSLQDIKSADWSGNVAPFWPAVIKTALSWKGITSLLRSGWKSIRGAMVMPLMIEGFKKDVIKFSIITCKKPE

SEQ ID NO: 2310 - DNA, 945 bp, Helianthus annuus
  CDS (1)..(945)
atggctacgacggcagttggcgtatcggcgacgccgatgacggagaagctgacggcggcagatgatgaccagcaacagcagaagctcaaaaaaggaatcgcagagttctacgacgaatcctcaggtatgtgggagaacatatggggagaacacatgcatcacggatattataactccgacgacgtcgttgaactctccgatcaccgttctgctcagatccgtatgattgaacaagccctaacgttcgcctatgtttcagatgatccggaaaagaaacctaaaaccatagttgatgtcgggtgtggtataggaggtagctcaaggtatctagcaagaaaatacggagccgaatgtcacggaatcaccctcagccctgtgcaagctgagagagctaatgcccttgctgcggcccaagggttggccgataaggtttcatttcaagttgctgatgctttaaaccagccgtttcctgatggaaagtttgaccttgtttggtcaatggagagtggagagcacatgcctgacaaacttaagtttgttagtgagttgactcgggtggctgcccccggagccaccattatcatagttacatggtgccacagagatcttaaccccggagaaaaatcccttcgccccgaggaagaaaaaatcttgaataagatttgttccagcttttatcttcccgcttggtgttctacagctgattatgtaaagttactagaatccctttctcttcaggacataaaatccgcagactggtctggcaatgtggccccattttggcctgctgtaataaaaacagcattgtcttggaagggcattacttcattgctacgtagtggttggaagtccataagaggggcaatggtaatgccactaatgattgaaggatttaagaaggatgtaataaaattctccatcattacatgcaaaaagcctgaataa

SEQ ID NO: 2311 - protein, 314 aa, Helianthus annuus
MATTAVGVSATPMTEKLTAADDDQQQQKLKKGIAEFYDESSGMWENIWGEHMHHGYYNSDDVVELSDHRSAQIRMIEQALTFAYVSDDPEKKPKTIVDVGCGIGGSSRYLARKYGAECHGITLSPVQAERANALAAAQGLADKVSFQVADALNQPFPDGKFDLVWSMESGEHMPDKLKFVSELTRVAAPGATIIIVTWCHRDLNPGEKSLRPEEEKILNKICSSFYLPAWCSTADYVKLLESLSLQDIKSADWSGNVAPFWPAVIKTALSWKGITSLLRSGWKSIRGAMVMPLMIEGFKKDVIKFSIITCKKPE

SEQ ID NO: 2312 - DNA, 945 bp, Helianthus annuus
  CDS (1)..(945)
atggctacgacggcagttggcgtatcggcgacgccgatgacggagaagctgacggcggcagatgatgaccagcaacagcagaagctcaaaaaaggaatcgcagagttctacgacgaatcctcaggtatgtgggagaacatatggggagaacacatgcatcacggatattataactccgacgacgtcgttgaactctccgatcaccgttctgctcagatccgtatgattgaacaagccctaacgttcgcctctgtttcagatgatccggaaaagaaacctaaaacaatagttgatgtcgggtgtggtataggaggtagctcaaggtatctagcaagaaaatacggagccgaatgtcacggaatcaccctcagccctgtgcaagctgagagagctaatgcccttgctgcggcccaagggttggccgataaggtttcatttcaagttgctgatgctttgaaccagccgttttctgatggaaagtttgacctggtttggtcaatggagagtggagagcacatgcctgacaaacttaagtttgttagtgagttgactcgggtggctgcccccggagccaccattatcatagttacatggtgccacagagatcttaaccccggagaaaaatcccttcgccccgaggaagaaaaaatcttgaataagatttgttccagcttttatcttcccgcttggtgttctacagctgattatgtaaagttactagaatccctttctcttcaggacataaaatccgcagactggtctggcaatgtggccccattttggcctgctgtaataaaaacagcgttgtcttggaagggcattacttcattgctacgtagtggttggaagtccataagaggggcaatggtaatgccactaatgattgaaggatttaagaaggatgtaattaaattctccatcattacatgcaaaaagcctgaataa

SEQ ID NO: 2313 - protein, 314 aa, Helianthus annuus
MATTAVGVSATPMTEKLTAADDDQQQQKLKKGIAEFYDESSGMWENIWGEHMHHGYYNSDDVVELSDHRSAQIRMIEQALTFASVSDDPEKKPKTIVDVGCGIGGSSRYLARKYGAECHGITLSPVQAERANALAAAQGLADKVSFQVADALNQPFSDGKFDLVWSMESGEHMPDKLKFVSELTRVAAPGATIIIVTWCHRDLNPGEKSLRPEEEKILNKICSSFYLPAWCSTADYVKLLESLSLQDIKSADWSGNVAPFWPAVIKTALSWKGITSLLRSGWKSIRGAMVMPLMIEGFKKDVIKFSIITCKKPE

SEQ ID NO: 2314 - DNA, 1098 bp, Triticum aestivum
  CDS (1)..(1098)
atggcaaactccgccgccctgctccactcactcctctccaccggctggacgccgcgccgccgcctcgaccgagcctcggccacgcggctcgccccgtcccccggcctgtcctgccgctcctcccggccgacgcgctccgtgcgcccgatggcgtcgtcgacgaccgcggcccgggccgacgcggcgccgccggggctgaaggagggcatcgcggggctctacgacgagtcgtccggcctgtgggagagcatctggggcgagcacatgcaccacggcttctacgactccggcgaggccgcctccatgtccgaccaccgccgcgcccagatccgcatgatcgaggaggccctcgccttcgccgccgtccccgacgatccgacaaacaaaccgaaaacgattgttgatgttggatacggaatcggtggtagctcaagatacctggcgaacaaatatggagcacaatgctctgggatcacattgagcccagtgcaagccgagagaggaaatgccctcgcagcagtgcaggggttgtcggacaaggcttctttccaagttgctgatgctctggagcaaccatttcctgatgggcagtttgatcttgtctggtctatggagagtggtgagcacatgccgaacaaacagaagtttgtaagcgagctggcacgcgtcgcagctccaggagcaactatcatcatcgtgacctggtgccataggaacctcgcgccgtcggaggactcactgaaacctgacgagctgaatcttttgaaaaagatttgtgatgcatattacctcccagattggtgctcgccctcggattatgtcaagattgccgagtcattgtctcttgaggatatcaaaacggccgactggtctgaaaacgtggccccgttctggcctgctgtcatccaatcagcactgacatggaaaggcctcacttctctactaaggagtggatggaagacgataaagggagcactggtgatgcctctcatgatccaaggctacaagaaaggcctcattaagttcagcatcatcacctgccacaaaccccaagcagccatagaaggagaacctgaggccgcatcgcccagagtgtag

SEQ ID NO: 2315 - protein, 365 aa, Triticum aestivum
MANSAALLHSLLSTGWTPRRRLDRASATRLAPSPGLSCRSSRPTRSVRPMASSTTAARADAAPPGLKEGIAGLYDESSGLWESIWGEHMHHGFYDSGEAASMSDHRRAQIRMIEEALAFAAVPDDPTNKPKTIVDVGYGIGGSSRYLANKYGAQCSGITLSPVQAERGNALAAVQGLSDKASFQVADALEQPFPDGQFDLVWSMESGEHMPNKQKFVSELARVAAPGATIIIVTWCHRNLAPSEDSLKPDELNLLKKICDAYYLPDWCSPSDYVKIAESLSLEDIKTADWSENVAPFWPAVIQSALTWKGLTSLLRSGWKTIKGALVMPLMIQGYKKGLIKFSIITCHKPQAAIEGEPEAASPRV

SEQ ID NO: 2316 - DNA, 1077 bp, Lotus japonicus
  CDS (1)..(1077)
atggccacgatgatgatgtcaatttttccaccaccaccaagcgtggcttcattatttatactatcacactgcactcacacaattcgtgtacaatcaacaacgcagttcacaggtttttctataagaaccagaacacgtgattgtagtagaattctgttaacagaagaacgagaaatggcggtgatggaggagaagaagcttttgcagaccggaatcgctgagttctacgacgagtcgtccgggttatgggaagacatgtggggagaccacatgcatcacgggttttacgagcaggatgtcaccgtctctgtttcagaccaccgtgttgctcagatccgaatgattgaagagtctcttcgttttgctgcactttctgaggatccagctaaaaagccagagagtatagtggatgttgggtgcggcataggaggcagttctaggtacctagctaagaaatttcaggcaaagagcgttggtatcactctgagtcctgttcaagctcagagagcaaatgctcttgctgcttctcaaggcttagctgacaaggtttcctttcaagttgctgatgctctagagcaaccattccctgatggtcagtttgatctggtgtggtccatggagagtggagagcatatgcctgacaaacctaagtttgttggcgagttagctcgggtggcagcaccaggtgggaccataataattgtaacatggtgccaccgggatcttggaccagctgaagaatccctgcagccatgggagcagaatctcttgaagaggatatgcgatgcattttaccttccagcatggtgctcaactgctgattatgtcaaattgctggaatcccattcacttcaggacatcaaatcagcagattggtctccctttgttgctccattttggccagctgtgatacgctcagcatttacatggaagggtctcacttcactgttgcgcagtggaatgaaaaccataaaaggagctttggctatgccattgatgatagaaggattcaagaagggtgtcatcaagtttgccattgttacatgtagaaagcctgaaaatgtggagatagaataa

SEQ ID NO: 2317 - protein, 358 aa, Lotus japonicus
MATMMMSIFPPPPSVASLFILSHCTHTIRVQSTTQFTGFSIRTRTRDCSRILLTEEREMAVMEEKKLLQTGIAEFYDESSGLWEDMWGDHMHHGFYEQDVTVSVSDHRVAQIRMIEESLRFAALSEDPAKKPESIVDVGCGIGGSSRYLAKKFQAKSVGITLSPVQAQRANALAASQGLADKVSFQVADALEQPFPDGQFDLVWSMESGEHMPDKPKFVGELARVAAPGGTIIIVTWCHRDLGPAEESLQPWEQNLLKRICDAFYLPAWCSTADYVKLLESHSLQDIKSADWSPFVAPFWPAVIRSAFTWKGLTSLLRSGMKTIKGALAMPLMIEGFKKGVIKFAIVTCRKPENVEIE

SEQ ID NO: 2318 - DNA, 1053 bp, Glycine max
  CDS (1)..(1053)
atggccaccgtggtgaggatcccaacaatctcatgcatccacatccacacgttccgttcccaatcccctcgcactttcgccagaatccgggtcggacccaggtcgtgggctcctattcgggcatcggcagcgagctcggagagaggggagatagtattggagcagaagccgaagaaggatgacaagaagaagctgcagaagggaatcgcagagttttacgacgagtcttctggcttatgggagaacatttggggcgaccacatgcaccatggcttttatgactcggattccactgtttcgctttcggatcatcgtgctgctcagatccgaatgatccaagagtctcttcgctttgcctctgtttctgaggagcgtagtaaatggcccaagagtatagttgatgttgggtgtggcataggtggcagctctagatacctggccaagaaatttggagcaaccagtgtaggcatcactctgagtcctgttcaagctcaaagagcaaatgctcttgctgctgctcaaggattggctgataaggtttcctttcaggttgctgacgctctacagcaaccattctctgacggccagtttgatctggtgtggtccatggagagtggagagcatatgcctgacaaagctaagtttgttggagagttagctcgggtagcagcaccaggtgccactataataatagtaacatggtgccacagggatcttggccctgacgaacaatccttacatccatgggagcaagatctcttaaagaagatttgcgatgcatattacctccctgcctggtgctcaacttctgattatgttaagttgctccaatccctgtcacttcaggacatcaagtcagaagattggtctcgctttgttgctccattttggccagcagtgatacgctcagccttcacatggaagggtctaacttcactcttgagcagtggacaaaaaacgataaaaggagctttggctatgccattgatgatagagggatacaagaaagatctaattaagtttgccatcattacatgtcgaaaacctgaataa

SEQ ID NO: 2319 - protein, 350 aa, Glycine max
MATVVRIPTISCIHIHTFRSQSPRTFARIRVGPRSWAPIRASAASSERGEIVLEQKPKKDDKKKLQKGIAEFYDESSGLWENIWGDHMHHGFYDSDSTVSLSDHRAAQIRMIQESLRFASVSEERSKWPKSIVDVGCGIGGSSRYLAKKFGATSVGITLSPVQAQRANALAAAQGLADKVSFQVADALQQPFSDGQFDLVWSMESGEHMPDKAKFVGELARVAAPGATIIIVTWCHRDLGPDEQSLHPWEQDLLKKICDAYYLPAWCSTSDYVKLLQSLSLQDIKSEDWSRFVAPFWPAVIRSAFTWKGLTSLLSSGQKTIKGALAMPLMIEGYKKDLIKFAIITCRKPE

SEQ ID NO: 2320 - DNA, 1044 bp, Brassica oleracea
  CDS (1)..(1044)
atgaaagcgactctcgcaccaccctcctctctcataagcctccccaggcacaaagtatcttctctccgttcaccgtcgcttctccttcagtcccagcggccatcctcagccttaatgacaacgacggcaacacgtggaagcgtagctgtgacggctgctgctacctcctccgctgaggcgctgcgagaaggaatagcggaattctacaacgagacgtcgggattatgggaggagatttggggagatcatatgcatcacggcttctacgatcccgattcctctgttcaactttcagattccggtcaccgggaagctcagatccggatgattgaagagtctctacgtttcgccggcgttactgaagaggagaaaaagataaagagagtggtggatgttgggtgtgggatcggaggaagctcaaggtatattgcctctaaatttggtgccgaatgcattggcatcacactcagtcccgttcaagccaagagagccaatgatctcgccgccgctcaatcactctctcataaggtttccttccaagttgcagatgcattggaccaaccatttgaagatggtattttcgatcttgtttggtcaatggaaagcggtgagcatatgcctgacaaggccaagttcgtgaaggaattggtacgtgtgacggctccaggaggaaggataataatagtgacatggtgccacagaaatctatcccaaggggaagaatctttgcagccatgggagcagaacctcttggacagaatctgcaaaacattttatctcccggcctggtgctccacctctgattatgtcgagttgcttcaatccctctcgctccaggatattaagtgtgcagattggtcagagaacgtagctcctttctggccggcggttatacgaaccgcattaacgtggaagggccttgtgtctctgcttcgtagtggtatgaagagtataaaaggagcattgacaatgccattgatgattgaagggtacaagaaaggtgtcattaaatttggcatcatcgcttgccagaagcctctctaa

SEQ ID NO: 2321 - protein, 347 aa, Brassica oleracea
MKATLAPPSSLISLPRHKVSSLRSPSLLLQSQRPSSALMTTTATRGSVAVTAAATSSAEALREGIAEFYNETSGLWEEIWGDHMHHGFYDPDSSVQLSDSGHREAQIRMIEESLRFAGVTEEEKKIKRVVDVGCGIGGSSRYIASKFGAECIGITLSPVQAKRANDLAAAQSLSHKVSFQVADALDQPFEDGIFDLVWSMESGEHMPDKAKFVKELVRVTAPGGRIIIVTWCHRNLSQGEESLQPWEQNLLDRICKTFYLPAWCSTSDYVELLQSLSLQDIKCADWSENVAPFWPAVIRTALTWKGLVSLLRSGMKSIKGALTMPLMIEGYKKGVIKFGIIACQKPL

SEQ ID NO: 2322 - DNA, 909 bp, Sorghum bicolor
  CDS (1)..(909)
atggcctccgcggcggtgccggcggccacaggaggcctgaaggaggacatcgcggggctatacgacgagtcgtcgggggtgtgggaacgcatctgcggcgagcacctgcaccacggcttctacgaaccggccggcgacgccacggcggtgcggcccgacgtccgccgcgcccagatccgcaccatcgacgaggcgctcgcattcgccgccgtcccagatgatctagagaagaggcccaaaacaatagtcgacgtaggatgtggcattggaggcagctcaaggtacttggccagaaaatacggagcacaatgtacgggcatcacgttgagccctgttcaagctgagagaggaaatgctcttactgccgcccagggcttgtcagaccaggtttccctccaagttgctgatgctctagaacaaccctttcctgatggaatgtttgatcttgtatggtccatggagagtggtgagcacatgccggataaaagaaagtttgttagtgagctagcgcgtgtcgcagctcctggagggacaataatcatcgtgacatgctgccataggaacctcaatccgtctgaaacttccctgaaacccgatgaacagagactcctaaagaggatatctgatgcatactgtcttgccgactggttcctaccttcagactatgtcagcattgctaagtcactgtctctcgaggatatcaggacagctgactggtcggagaacgtggtcccgttttggcccgctgtgataaaactgtcattgtcatggaagggcctgacctctgcgttaacatgtggatggaagacgatcaatggggcgatggggatactactgctgatccaaggctacaggaaggggctcatcaaattcacagtcatcacctgccgcaagcctggaccaccatag

SEQ ID NO: 2323 - protein, 302 aa, Sorghum bicolor
MASAAVPAATGGLKEDIAGLYDESSGVWERICGEHLHHGFYEPAGDATAVRPDVRRAQIRTIDEALAFAAVPDDLEKRPKTIVDVGCGIGGSSRYLARKYGAQCTGITLSPVQAERGNALTAAQGLSDQVSLQVADALEQPFPDGMFDLVWSMESGEHMPDKRKFVSELARVAAPGGTIIIVTCCHRNLNPSETSLKPDEQRLLKRISDAYCLADWFLPSDYVSIAKSLSLEDIRTADWSENVVPFWPAVIKLSLSWKGLTSALTCGWKTINGAMGILLLIQGYRKGLIKFTVITCRKPGPP

SEQ ID NO: 2324 - DNA, 1110 bp, Perilla frutescens
  CDS (1)..(1110)
atggccgaggcggtcacgccaggtatctgcaccaccgggtggcgccgcggtggggtccacgctcccacttataatatttctataaagccagcgacagcgttgctggttggctgcaccaccaaaaccaaaagcattacttctttttccacagactccctcaggacacgtggcagagcacgtcgcccgacgatgagcctgaacgccgctgcggcggagatggagacggagatggagaccttgcgtaaagggattgcggagttctacgacgagtcgtcgggggtgtgggagaacatatggggagaccacatgcaccacggcttttacgagccggccgccgacgtctccatctccgaccatcgcgccgcccagatccgcatgattgaggagtccctccgattcgcttccttctctccgataactacgacggagaaaccgaagaatatagttgatgtgggatgtggtataggaggcagttctaggtatctggcaagaaaatatggggctaaattgtctagggctattactctttccagccctgtgcaagcgcagagagctcaacagcttgctgatgctcaaggattaaatggcaaggtttcctttgaagttgctgatgcgttgaaccaaccatttcctgaagggaagtttgatctggtttggtcgatggagagtggagaacacatgcctgataagaaaaagtttgtaaatgagctggtgcgtgtggctgctcctggtggaagaataatcatcgttacatggtgccacagggacctatcaccttctgaagaatctcttcgccaagaggagaaagatttgctaaacaaaatatgtagtgcttattatcttccagcatggtgctctactgctgactatgtcaaattactcgactccctctcaatggaggacattaagtctgcagactggtctgaccatgtcgctccattttggccggcagttataaagtcggcattgacatggaagggcataacctcactgctaaggagcggatggaagactataagaggagcaatggtgatgccattgatgatcgaaggatataagaagggcgtgatcaaatttgccatcattacatgccgaaaacctgcatcttaa

SEQ ID NO: 2325 - protein, 369 aa, Perilla frutescens
MAEAVTPGICTTGWRRGGVHAPTYNISIKPATALLVGCTTKTKSITSFSTDSLRTRGRARRPTMSLNAAAAEMETEMETLRKGIAEFYDESSGVWENIWGDHMHHGFYEPAADVSISDHRAAQIRMIEESLRFASFSPITTTEKPKNIVDVGCGIGGSSRYLARKYGAKLSRAITLSSPVQAQRAQQLADAQGLNGKVSFEVADALNQPFPEGKFDLVWSMESGEHMPDKKKFVNELVRVAAPGGRIIIVTWCHRDLSPSEESLRQEEKDLLNKICSAYYLPAWCSTADYVKLLDSLSMEDIKSADWSDHVAPFWPAVIKSALTWKGITSLLRSGWKTIRGAMVMPLMIEGYKKGVIKFAIITCRKPAS

SEQ ID NO: 2326 - DNA, 1047 bp, Arabidopsis thaliana
  CDS (1)..(1047)
atgaaagcaactctagcagcaccctcttctctcacaagcctcccttatcgaaccaactcttctttcggctcaaagtcatcgcttctctttcggtctccatcctcctcctcctcagtctctatgacgacaacgcgtggaaacgtggctgtggcggctgctgctacatccactgaggcgctaagaaaaggaatagcggagttctacaatgaaacttcgggtttgtgggaagagatttggggagatcatatgcatcatggcttttatgaccctgattcttctgttcaactttctgattctggtcacaaggaagctcagatccgtatgattgaagagtctctccgttttgccggtgttactgatgaagaggaggagaaaaagataaagaaagtagtggatgttgggtgtgggattggaggaagctcaagatatcttgcctctaaatttggagctgaatgcattggcattactctcagccctgttcaggccaagagagccaatgatctcgcggctgctcaatcactcgctcataaggcttccttccaagttgcggatgcgttggatcagccattcgaagatggaaaattcgatctagtgtggtcgatggagagtggtgagcatatgcctgacaaggccaagtttgtaaaagagttggtacgtgtggcggctccaggaggtaggataataatagtgacatggtgccatagaaatctatctgcgggggaggaagctttgcagccgtgggagcaaaacatcttggacaaaatctgtaagacgttctatctcccggcttggtgctccaccgatgattatgtcaacttgcttcaatcccattctctccaggatattaagtgtgcggattggtcagagaacgtagctcctttctggcctgcggttatacggactgcattaacatggaagggccttgtgtctctgcttcgtagtggtatgaaaagtattaaaggagcattgacaatgccattgatgattgaaggttacaagaaaggtgtcattaagtttggtatcatcacttgccagaagccactctaa

SEQ ID NO: 2327 - protein, 348 aa, Arabidopsis thaliana
MKATLAAPSSLTSLPYRTNSSFGSKSSLLFRSPSSSSSVSMTTTRGNVAVAAAATSTEALRKGIAEFYNETSGLWEEIWGDHMHHGFYDPDSSVQLSDSGHKEAQIRMIEESLRFAGVTDEEEEKKIKKVVDVGCGIGGSSRYLASKFGAECIGITLSPVQAKRANDLAAAQSLAHKASFQVADALDQPFEDGKFDLVWSMESGEHMPDKAKFVKELVRVAAPGGRIIIVTWCHRNLSAGEEALQPWEQNILDKICKTFYLPAWCSTDDYVNLLQSHSLQDIKCADWSENVAPFWPAVIRTALTWKGLVSLLRSGMKSIKGALTMPLMIEGYKKGVIKFGIITCQKPL

SEQ ID NO: 2328 - DNA, 1089 bp, Oryza sativa
  CDS (1)..(1089)
atggcccacgccgccgcggccacgggcgcactggcaccgctgcatccactgctccgctgcacgagccgtcatctctgcgcctcggcttcccctcgcgccggcctctgcctccaccaccaccgccgccgccgccgcagcagccggaggacgaaactcgccgtgcgcgcgatggcaccgacgttgtcctcgtcgtcgacggcggcggcagctcccccggggctgaaggagggcatcgcggggctctacgacgagtcgtccggcgtgtgggagagcatctggggcgagcacatgcaccacggcttctacgacgccggcgaggccgcctccatgtccgaccaccgccgcgcccagatccgcatgatcgaggaatccctcgccttcgccgccgtccccgatgatgcggagaagaaacccaaaagtgtagttgatgttggctgtggcattggtggtagctcaagatacttggcgaacaaatacggagcgcaatgctacggcatcacgttgagtccggtgcaggctgaaagaggaaatgccctcgcggcagagcaagggttatcagacaaggtctcctttcaagttggtgatgcattggagcagccttttcctgatgggcagtttgatcttgtctggtccatggagagtggcgagcacatgccagacaaacggcagtttgtaagcgagctggcacgcgtcgcagctcctggggcgagaataatcattgtgacctggtgccataggaacctcgagccatccgaagagtccctgaaacctgatgagctgaatctcctgaaaaggatatgcgatgcatattatctcccagactggtgctctccttctgattatgtcaaaattgccgagtcactgtctcttgaggatataaggacagctgattggtcagagaacgtcgccccattctggcctgcggttataaaatcagcattgacatggaaaggtttaacttctctgctaagaagtgggtggaagacgataagaggtgcaatggtgatgcctctgatgatcgaaggatacaagaaagggctcatcaaattcaccatcatcacctgtcgcaagcccgaaacaacgcagtag

SEQ ID NO: 2329 - protein, 362 aa, Oryza sativa
MAHAAAATGALAPLHPLLRCTSRHLCASASPRAGLCLHHHRRRRRSSRRTKLAVRAMAPTLSSSSTAAAAPPGLKEGIAGLYDESSGVWESIWGEHMHHGFYDAGEAASMSDHRRAQIRMIEESLAFAAVPDDAEKKPKSVVDVGCGIGGSSRYLANKYGAQCYGITLSPVQAERGNALAAEQGLSDKVSFQVGDALEQPFPDGQFDLVWSMESGEHMPDKRQFVSELARVAAPGARIIIVTWCHRNLEPSEESLKPDELNLLKRICDAYYLPDWCSPSDYVKIAESLSLEDIRTADWSENVAPFWPAVIKSALTWKGLTSLLRSGWKTIRGAMVMPLMIEGYKKGLIKFTIITCRKPETTQ

SEQ ID NO: 2330 - DNA, 1053 bp, Glycine max
  CDS (1)..(1053)
atggccaccgtggtgaggatcccaacaatctcatgcatccacatccacacgttccgttcccaatcccctcgcactttcgccagaatccgggtcggacccaggtcgtgggctcctattcgggcatcggcagcgagctcggagagaggggagatagtattggagcagaagccgaagaaggatgacaagaagaagctgcagaagggaatcgcagagttttacgacgagtcttctggcttatgggagaacatttggggcgaccacatgcaccatggcttttatgactcggattccactgtttcgctttcggatcatcgtgctgctcagatccgaatgatccaagagtctcttcgctttgcctctgtttctgaggagcgtagtaaatggcccaagagtatagttgatgttgggtgtggcataggtggcagctccagatacctggccaagaaatttggagcaaccagcgtaggcattactctgagtcctgttcaagctcaaagagcaaatgctcttgctgctgctcaaggattggctgataaggtttcctttgaggttgctgacgctctaaagcaaccattctctgacgggaagtttgatctggtgtggtccatggagagtggagagcatatgcctgacaaagctaagtttgttggagagttagctcgggtagcagcaccaggtgccactataataatagtaacatggtgccacagggatcttggccctgacgaacaatccttacatccatgggagcaagatctcttaaagaagatttgcgatgcatattacctccctgcctggtgctcaacttctgattatgttaagttgctccaatccctgtcacttcaggacatcaagtcagaagattggtctcgctttgttgctccattttggccagcagtgatacgctcagccttcacatggaagggtctaacttcactcttgagcagtggacaaaaaacgataaaaggagctttggctatgccattgatgatagagggatacaagaaagatctaattaagtttgccatcattacatgtcgaaaacctgaataa

SEQ ID NO: 2331 - protein, 350 aa, Glycine max
MATVVRIPTISCIHIHTFRSQSPRTFARIRVGPRSWAPIRASAASSERGEIVLEQKPKKDDKKKLQKGIAEFYDESSGLWENIWGDHMHHGFYDSDSTVSLSDHRAAQIRMIQESLRFASVSEERSKWPKSIVDVGCGIGGSSRYLAKKFGATSVGITLSPVQAQRANALAAAQGLADKVSFEVADALKQPFSDGKFDLVWSMESGEHMPDKAKFVGELARVAAPGATIIIVTWCHRDLGPDEQSLHPWEQDLLKKICDAYYLPAWCSTSDYVKLLQSLSLQDIKSEDWSRFVAPFWPAVIRSAFTWKGLTSLLSSGQKTIKGALAMPLMIEGYKKDLIKFAIITCRKPE

SEQ ID NO: 2332 - DNA, 21 bp, Artificial sequence
  primer
atgcccgagtatttgcttctg

SEQ ID NO: 2333 - DNA, 23 bp, Artificial sequence
  primer
ttaagcttgagtggcgttttttc

SEQ ID NO: 2334 - protein, 300 aa, Artificial sequence
  consensus sequence
  Variant (2)..(3): Xaa in position 2 to 3 is any amino acid
  Variant (6)..(11): Xaa in position 6 to 11 is any amino acid
  Variant (12)..(13): Xaa in position 12 to 13 is any or no amino acid
  Variant (15)..(16): Xaa in position 15 to 16 is any amino acid
  Variant (19)..(19): Xaa in position 19 is any amino acid
  Variant (20)..(25): Xaa in position 20 to 25 is any or no amino acid
  Variant (27)..(27): Xaa in position 27 is any amino acid
  Variant (29)..(29): Xaa in position 29 is any amino acid
  Variant (31)..(31): Xaa in position 31 is any amino acid
  Variant (33)..(42): Xaa in position 33 to 42 is any amino acid
  Variant (43)..(54): Xaa in position 43 to 54 is any or no amino acid
  Variant (56)..(76): Xaa in position 56 to 76 is any amino acid
  Variant (77)..(83): Xaa in position 77 to 83 is any or no amino acid
  Variant (93)..(93): Xaa in position 93 is any amino acid
  Variant (95)..(95): Xaa in position 95 is any amino acid
  Variant (98)..(105): Xaa in position 98 to 105 is any amino acid
  Variant (106)..(108): Xaa in position 106 to 108 is any or no amino acid
  Variant (112)..(112): Xaa in position 112 is any amino acid
  Variant (114)..(114): Xaa in position 114 is any amino acid
  Variant (116)..(116): Xaa in position 116 is any amino acid
  Variant (118)..(119): Xaa in position 118 to 119 is any amino acid
  Variant (122)..(123): Xaa in position 122 to 123 is any amino acid
  Variant (125)..(132): Xaa in position 125 to 132 is any amino acid
  Variant (133)..(135): Xaa in position 133 to 135 is any or no amino acid
  Variant (137)..(137): Xaa in position 137 is any amino acid
  Variant (139)..(139): Xaa in position 139 is any amino acid
  Variant (143)..(147): Xaa in position 143 to 147 is any amino acid
  Variant (149)..(150): Xaa in position 149 to 150 is any amino acid
  Variant (153)..(153): Xaa in position 153 is any amino acid
  Variant (157)..(157): Xaa in position 157 is any amino acid
  Variant (159)..(159): Xaa in position 159 is any amino acid
  Variant (161)..(161): Xaa in position 161 is any amino acid
  Variant (167)..(171): Xaa in position 167 to 171 is any amino acid
  Variant (173)..(174): Xaa in position 173 to 174 is any amino acid
  Variant (177)..(178): Xaa in position 177 to 178 is any amino acid
  Variant (182)..(187): Xaa in position 182 to 187 is any amino acid
  Variant (189)..(190): Xaa in position 189 to 190 is any amino acid
  Variant (192)..(198): Xaa in position 192 to 198 is any amino acid
  Variant (199)..(203): Xaa in position 199 to 203 is any or no amino acid
  Variant (205)..(217): Xaa in position 205 to 217 is any amino acid
  Variant (219)..(221): Xaa in position 219 to 221 is any amino acid
  Variant (223)..(241): Xaa in position 223 to 241 is any amino acid
  Variant (242)..(244): Xaa in position 242 to 244 is any or no amino acid
  Variant (247)..(251): Xaa in position 247 to 251 is any amino acid
  Variant (253)..(253): Xaa in position 253 is any amino acid
  Variant (255)..(257): Xaa in position 255 to 257 is any amino acid
  Variant (259)..(285): Xaa in position 259 to 285 is any amino acid
  Variant (286)..(287): Xaa in position 286 to 287 is any or no amino acid
  Variant (290)..(295): Xaa in position 290 to 295 is any amino acid
  Variant (297)..(299): Xaa in position 297 to 299 is any amino acid
AXXYDXXXXXXXXEXXWGXXXXXXXHXHXGXYXXXXXXXXXXXXXXXXXXXXXXAXXXXXXXXXXXXXXXXXXXXXXXXXXXXDVGCGIGGSXRXLAXXXXXXXXXXXGITXSXPXQXXRAXXLXXXXXXXXXXXFXVXDALXXXXXDXXFDXVWSXEXGXHMPDKXXXXXEXXRVXXPGGXXXXXXWXXRXXXXXXXXXXXXEXXXXXXXXXXXXXPXXXSXXXXXXXXXXXXXXXXXXXXXXDWXXXXXPXWXXXIXXXXXXXXXXXXXXXXXXXXXXXXXXXXXLMXXXXXXGXXXF

SEQ ID NO: 2335 - protein, 52 aa, Artificial sequence
  protein pattern
  Variant (2)..(7): Xaa in position 2 to 7 is any amino acid
  Variant (8)..(8): Xaa in position 8 is any or no amino acid
  Variant (10)..(10): Xaa in position 10 is any amino acid
  Variant (11)..(11): Xaa in position 11 is any or no amino acid
  Variant (14)..(14): Xaa in position 14 is any amino acid
  Variant (17)..(17): Xaa in position 17 is Ala, Cys, Ser or Thr
  Variant (18)..(18): Xaa in position 18 is any amino acid
  Variant (20)..(20): Xaa in position 20 is Ala or Ser
  Variant (22)..(22): Xaa in position 22 is any amino acid
  Variant (25)..(25): Xaa in position 25 is Ala, Asn, Pro or Ser
  Variant (26)..(26): Xaa in position 26 is Asp or Asn
  Variant (28)..(29): Xaa in position 28 to 29 is any amino acid
  Variant (30)..(30): Xaa in position 30 is Phe or Tyr
  Variant (31)..(31): Xaa in position 31 is Ala, Gly, Ile, Leu or Val
  Variant (32)..(32): Xaa in position 32 is any amino acid
  Variant (34)..(35): Xaa in position 34 to 35 is any amino acid
  Variant (37)..(39): Xaa in position 37 to 39 is any amino acid
  Variant (42)..(42): Xaa in position 42 is Ala or Gly
  Variant (43)..(43): Xaa in position 43 is any amino acid
  Variant (44)..(44): Xaa in position 44 is Phe, Ile, Leu or Met
  Variant (45)..(45): Xaa in position 45 is Ala, Ile, Leu or Val
  Variant (46)..(46): Xaa in position 46 is any amino acid
  Variant (47)..(47): Xaa in position 47 is Ala or Val
  Variant (48)..(48): Xaa in position 48 is Cys, Asp or Thr
  Variant (50)..(50): Xaa in position 50 is Cys or Asn
  Variant (51)..(51): Xaa in position 51 is any amino acid
AXXXXXXXDXXFDXVWXXEXGXHMXXKXXXXXEXXRXXXPGXXXXXXXWXXR

SEQ ID NO: 2336 - protein, 16 aa, Artificial sequence
  protein pattern
  Variant (8)..(8): Xaa in position 8 is Ala or Ser
  Variant (10)..(10): Xaa in position 10 is any amino acid
  Variant (11)..(11): Xaa in position 11 is Ile or Leu
  Variant (13)..(14): Xaa in position 13 to 14 is any amino acid
  Variant (15)..(15): Xaa in position 15 is Phe or Tyr
  Variant (16)..(16): Xaa in position 16 is Glu, Gly, Asn or Gln
GCGIGGSXRXXAXXXX

SEQ ID NO: 2337 - protein, 13 aa, Artificial sequence
  protein pattern
  Variant (2)..(3): Xaa in position 2 to 3 is any amino acid
  Variant (6)..(6): Xaa in position 6 is Asp or Glu
  Variant (8)..(8): Xaa in position 8 is Ile, Met or Val
  Variant (10)..(10): Xaa in position 10 is any amino acid
  Variant (12)..(12): Xaa in position 12 is Phe, His or Tyr
EXXWGXHXHXGXY

SEQ ID NO: 2338 - protein, 19 aa, Artificial sequence
  protein pattern
  Variant (2)..(3): Xaa in position 2 to 3 is any or no amino acid
  Variant (5)..(5): Xaa in position 5 is any or no amino acid
  Variant (7)..(8): Xaa in position 7 to 8 is any amino acid
  Variant (9)..(9): Xaa in position 9 is Ala or Gly
  Variant (10)..(10): Xaa in position 10 is Phe or Tyr
  Variant (11)..(12): Xaa in position 11 to 12 is any amino acid
  Variant (13)..(13): Xaa in position 13 is Asp or Gly
  Variant (14)..(14): Xaa in position 14 is Leu, Met or Val
  Variant (15)..(16): Xaa in position 15 to 16 is any amino acid
  Variant (18)..(18): Xaa in position 18 is Ala, Gly, Ser or Thr
  Variant (19)..(19): Xaa in position 19 is Ile, Met or Val
PXXLXMXXXXXXXXXXFXX

SEQ ID NO: 2339 - protein, 13 aa, Artificial sequence
  protein pattern
  Variant (2)..(2): Xaa in position 2 is Asn, Ser or Thr
  Variant (3)..(4): Xaa in position 3 to 4 is any amino acid
  Variant (5)..(5): Xaa in position 5 is Thr or Val
  Variant (6)..(6): Xaa in position 6 is any amino acid
  Variant (8)..(8): Xaa in position 8 is any amino acid
  Variant (10)..(10): Xaa in position 10 is any amino acid
  Variant (11)..(11): Xaa in position 11 is Ala, Asp or Glu
  Variant (12)..(12): Xaa in position 12 is Ser, Thr or Val
WXXXXXPXWXXXI

SEQ ID NO: 2340 - protein, 11 aa, Artificial sequence
  protein pattern
  Variant (3)..(3): Xaa in position 3 is Ser or Thr
  Variant (4)..(4): Xaa in position 4 is Ile or Leu
  Variant (7)..(7): Xaa in position 7 is any amino acid
  Variant (9)..(9): Xaa in position 9 is Ala, Cys or Val
  Variant (10)..(10): Xaa in position 10 is any amino acid
GIXXSPXQXXR

SEQ ID NO: 2341 - DNA, 354 bp, Saccharomyces cerevisiae
  CDS (1)..(354)
atgttgttcttatatacatatgtttatgtctttttatgtacaaataatgatgtttacaatgaaacatctgttatgctatcaaaaacgtcagcgcattgttttatagctgaagaagttacaacggataacggtctgatttgcggcctggcaatgcttggtaaaactaaatatcaattttacgaattatttactgtatatagtattcagtccctcactcaactggcgtcaagagtgaagaagggcggcctcattatggctcgccttattctgttcaccctctgcgctcttcccgtattatttcattttattttgtttatgcttcaatatcttgtatttgtttacattgaaaaatga

SEQ ID NO: 2342 - protein, 117 aa, Saccharomyces cerevisiae
MLFLYTYVYVFLCTNNDVYNETSVMLSKTSAHCFIAEEVTTDNGLICGLAMLGKTKYQFYELFTVYSIQSLTQLASRVKKGGLIMARLILFTLCALPVLFHFILFMLQYLVFVYIEK

SEQ ID NO: 2343 - DNA, 28 bp, Artificial sequence
  primer
atgttgttcttatatacatatgtttatg

SEQ ID NO: 2344 - DNA, 28 bp, Artificial sequence
  primer
tcatttttcaatgtaaacaaatacaaga

SEQ ID NO: 2345 - DNA, 1284 bp, SACCHAROMYCES CEREVISIAE
  CDS (1)..(1284)
atgcatcataactcacagtctttgagctctggacacatcaggagccccgaggatgaaaatgtggcacctataggtaatcttaaacacaggactggatccctcagtcatatttcatctgcgcacccgagggtcgcacttagcgacgttaccaatatagttgcgacaaactctagcaacaacagcataagtaagccaaaagtcgccccaattaaagaaagattggattcagctgcgataattgaggaagaaaggctggatgcgaatagtgttgcacagagaaaagaagctgatcataacgatttgttaacggacagggaacaagaggaacccgttgaagacgacggagaaagcgaagaggatgaagaagaagaccaggagcctctactgttgcaacattatgctagtgatacattggtctgggagcatgcatttagaacttactatagaactacattagatcccaatgatgatgacgtgtacgatgtggtcatggttgccgaattatctaatgagatattcgagtatatgaggaaattggaagacctgtataaacccaacccgtactacatggataaacaaccagagttaagatggtcgtttcgaagcacactgattgattggatcgtccaagtacatgaaaaatttcaacttttacctgaaactctatatctctgcattaatataatagacagatatctgtgcaaagaagttgttcctgtaaataagttccaacttgtgggtgcagcctcactcttcattgctgctaaatatgaggaaatcaactgtcctacaatcaaggatttcgtatacatgtcagaaaactgctactcaaggaacgacctgctggacgcagaaagaactattttgaacggcttagaatttgaattgggttggcctggtccgatgtcatttttacgaagaatcagtaaggcagacgattacgagcatgatacgagaacactggccaaatatctattggaatccacaataatggaccatcgactggtttccgctcaacctagttggttagctgccggtgcatactttctaagtaagattattctgggccaaaatcagtggtctctggcgcacgtctactattccaattatacacaagaacaaattcttccgttggccaccattattttagaaaattgcagatatgcctctaaacgtcataacgccatatggagaaaatattcttcacgtcgttatttgcattcttcacagatcgtagcgaagtggatagcattagctgaacacagagtagaaagatctaactaa

SEQ ID NO: 2346 - protein, 427 aa, SACCHAROMYCES CEREVISIAE
MHHNSQSLSSGHIRSPEDENVAPIGNLKHRTGSLSHISSAHPRVALSDVTNIVATNSSNNSISKPKVAPIKERLDSAAIIEEERLDANSVAQRKEADHNDLLTDREQEEPVEDDGESEEDEEEDQEPLLLQHYASDTLVWEHAFRTYYRTTLDPNDDDVYDVVMVAELSNEIFEYMRKLEDLYKPNPYYMDKQPELRWSFRSTLIDWIVQVHEKFQLLPETLYLCINIIDRYLCKEVVPVNKFQLVGAASLFIAAKYEEINCPTIKDFVYMSENCYSRNDLLDAERTILNGLEFELGWPGPMSFLRRISKADDYEHDTRTLAKYLLESTIMDHRLVSAQPSWLAAGAYFLSKIILGQNQWSLAHVYYSNYTQEQILPLATIILENCRYASKRHNAIWRKYSSRRYLHSSQIVAKWIALAEHRVERSN

SEQ ID NO: 2347 - DNA, 1578 bp, Bombyx mori
  CDS (1)..(1578)
atggaaattcaactaaggcggcatagatcggcacagattcaagaccaagaaaatctgtatgctggtgtccgcgggaaaggtaatggagccgtccctacaaaaaggctgggattaacagtacgtggggcgttaggtgatttgaacacaaatgtgcaagttcaacgcgaagctctcggcaaagttgccgttacaactgctgaatttgagaaaaaagccaccctaaaccgtggcgtagtacgaagcaactatagtcatgtaacatcaaaagtagacacaggattagctgtcaaaaatgttattcagccatcttcaaggcccccactccgccgtgaagagagcactgctggattgaccgccagagctgtaactcgtaccagggtcgctttaaaagataatcagaacaagccaaatgaaataaaagaatcaattaacatctacatacaaactaagaaatgtcaagacacaaaaaagacaaagctgcccatgctaaaggaaaataaagaattaagaacatccaaatcacatctaaaagatggaactgactctttacggaaaacaaaactagcattaaaagacccaatcgaatcattaggaaagttaaaactagctgaaacataccctgagaagggaatgggcttaatagataaagccaaggtagaaaagcaagctgaattctttgaaactgtgtttgatattacacctccactgcctgaggatattgaagatattgatgccggagacaacaacagccctttgctaatgtctatgtatatcaaggacatttacaaatacttgactgaattggaagagaaatattctattgagcctgatcatttaaaaaagcagactgttataactggcaaaatgagagcaacactcattgattggcttgtggaagttcaacgccaattctcattagtattggagacattccatctcactgttggcattattgacagatatttgcaggttgttccaaatgtccagcgcaatcaattacaattagtcggtgtgacggctatgttcatagcaagcaagtatgaagagatctacgctccagatgttggcgattttgtttatgtcactgataatgcctacaccaagtctgatgtattccgctgtgagagagacattatgtgcaaactgggcttctgtcttgcgagaccgatacctttgagttttcttagaagatttgtaaaagccgcacgtggtacatcgaggaatcatcatttggccaaatactttgttgatctctgtctagtcgaatatactatggcccattatcgaccgtcagaactagcagcggcagcaatctgcctctcacttcatttgctatcgagcaagacactctccgaagtatggacgtctaccttgtcttactactctgggtacgatcttgaccacatagatccgattataaggaaaatcgcaaagattgttattaacattgaaaattccaaatataaagccgtatataacaaatatttggacacgacgttggctaaagtttccagtcttccgcagttgaaaagcgaagcgatttatgaactcgcaaagatatcaagcccaagcccttag

SEQ ID NO: 2348 - protein, 525 aa, Bombyx mori
MEIQLRRHRSAQIQDQENLYAGVRGKGNGAVPTKRLGLTVRGALGDLNTNVQVQREALGKVAVTTAEFEKKATLNRGVVRSNYSHVTSKVDTGLAVKNVIQPSSRPPLRREESTAGLTARAVTRTRVALKDNQNKPNEIKESINIYIQTKKCQDTKKTKLPMLKENKELRTSKSHLKDGTDSLRKTKLALKDPIESLGKLKLAETYPEKGMGLIDKAKVEKQAEFFETVFDITPPLPEDIEDIDAGDNNSPLLMSMYIKDIYKYLTELEEKYSIEPDHLKKQTVITGKMRATLIDWLVEVQRQFSLVLETFHLTVGIIDRYLQVVPNVQRNQLQLVGVTAMFIASKYEEIYAPDVGDFVYVTDNAYTKSDVFRCERDIMCKLGFCLARPIPLSFLRRFVKAARGTSRNHHLAKYFVDLCLVEYTMAHYRPSELAAAAICLSLHLLSSKTLSEVWTSTLSYYSGYDLDHIDPIIRKIAKIVINIENSKYKAVYNKYLDTTLAKVSSLPQLKSEAIYELAKISSPSP

SEQ ID NO: 2349 - DNA, 1314 bp, Arabidopsis thaliana
  CDS (1)..(1314)
atgcatagagcttcttctaagcacactaatgcgaagaaagaagcaatctctacttcgaaaattcgagataataatgtgagagtcactagatcaagagctaaggccttaggagtgtcgaattctccatcaaaacccgcttttaaacatgaaacgaagcgtgttgctagaccgagtaataaacgaatggcatcggataatatcacagtttgtaatcagaaaagacgagcggtgctcaaggatgtgactaacactttggcagaaagtataatttctacagaaggcaatgttaaggcttgcaagcgaggtggtaaagaaactaagcaaatagaagaagatggtttggtagatgtggatggcgaaaaatctaaactagcagaagatttgtcaaagattagaatggttgaatctttagatgcatctgcttcaaagcaaaaagaagacagatctgatgtcacagattgtgttcagattgtagatatagattcaggtgtccaagatcctcagttttgtagcttatatgctgcaagtatatatgacagcattaatgttgcagagcttgaacaaagaccttcaactagctatatggtgcaagtgcagcgagatatcgatccaacgatgcgcggaattctgattgattggctcgtggaggtctctgaagagtacaagttggtttcagatacactttaccttaccgtgaatctaattgatcggttcatgtctcataattacattgaaaagcagaagctccagctacttggtatcacttgcatgttaatagcctccaaatacgaagagattagtgcaccgcggttggaggagttttgcttcattacagacaatacatacacaagactagaagtactaagtatggagattaaagttttaaactctcttcattttcggttatcagttcccaccaccaaaacgtttctcaggcggttcattcgcgccgctcaagcgtctgataaggttcctctcattgaaatggagtacttagccaactatttcgcggaactaactctcacagaatatactttcctaaggttccttccatccctaattgccgcttcagcggttttcttagcaagatggacactcgaccaatctaaccatccttggaaccaaactctacaacactatacaagatatgaaacatccgctctaaaaaacacggtacttgcaatggaggagttgcagctcaacaccagtggaagcactcttatcgctatacacaccaaatacaaccaacaaaagtttaaaagagtggcaacattaacatctcctgaacgtgtgaacacactcttctcaagatga

SEQ ID NO: 2350 - protein, 437 aa, Arabidopsis thaliana
MHRASSKHTNAKKEAISTSKIRDNNVRVTRSRAKALGVSNSPSKPAFKHETKRVARPSNKRMASDNITVCNQKRRAVLKDVTNTLAESIISTEGNVKACKRGGKETKQIEEDGLVDVDGEKSKLAEDLSKIRMVESLDASASKQKEDRSDVTDCVQIVDIDSGVQDPQFCSLYAASIYDSINVAELEQRPSTSYMVQVQRDIDPTMRGILIDWLVEVSEEYKLVSDTLYLTVNLIDRFMSHNYIEKQKLQLLGITCMLIASKYEEISAPRLEEFCFITDNTYTRLEVLSMEIKVLNSLHFRLSVPTTKTFLRRFIRAAQASDKVPLIEMEYLANYFAELTLTEYTFLRFLPSLIAASAVFLARWTLDQSNHPWNQTLQHYTRYETSALKNTVLAMEELQLNTSGSTLIAIHTKYNQQKFKRVATLTSPERVNTLFSR

SEQ ID NO: 2351 - DNA, 1575 bp, Drosophila melanogaster
  CDS (1)..(1575)
atggccgcccttgaaaagaacgcttcggagaacttcaagcaagtgcaattgaagaaattgacggttccttccatggaggcaacaacaaaacgcgcggccttgggcgatttgcagaatcgcggcataagtcgtcccatcgcagcgaaggatgcggcacagaaagactccaaggatctcaagctcacagacgccctgcgcaatgccaaagctcgggtggacagccactggaagaaacagccactgggcagcaccaatggcaatggcaatggcgccgttccgcccaaggtcaacgaggggggcgtgtcggcgtttttgcgttcgaattcggtgcgcaatcgcgttccgaccaagaccactgtagaacccactaaagttacagtcaagtccagttcttccgagaacgtgaacgagcccaccttgaagcgcgaggacagcaatctgtcgaagaagtcgctgaccaaactgcgtgccgctttggccaaacccgtgatgggagtttcaggaattcgacgggaaccagtagctgtttcccgcaaagaggcagagaccaagaaggaactgccagaaaccaagaaggactcactggaagtgaaaaaggatgcgaccaggatgccccttattaggggcaacagtgcagtcactacgaccacatctacgatgcccaccaccatgtccctttccagcaagcgcttggctggaatcgaggacattgatgccaatgacaaggagaacctggtactggtctccgaatatgtaaacgacatctacgactacttgtatcaggtggagctggagcagcccattcacaaggatcacctggccggacagaaggaggtgtcccacaagatgcgagccgtgctgatcgattggatcaacgaagtccacctgcagttccatctggctgcagagaccttccagctggcggtggctatcattgatcgctacctgcaggtggtcaaggacaccaaacgcacgtacttgcaattggtgggagtgacagcactcttcatagccaccaagtacgaggagctgttcccgccggcaatcggagatttcgtcttcatcacggacgacacctacactgcccggcagatccgacagatggagctgcaaatcttcaaggccatcgactgtaatctgtcgcgtccgctgccgattcacttccttcgacgctactcgaaggctgctggcgccgaggacgagcaccatacgatgtccaagtacttcatcgagttagcttccgtggactacgaaatggccacttacaggccatcggagattgcagctgcctcactgttcctgtcgctgcacttgctcaatggaaaccaccgggccggtacaggattcaacgaccgtcactggacgcccactctgaccttctactcgcgatactcggccgcgcacttgcgtccgattacccggctgatcgcgaaactggcccgggacgctcctcaggccaagctgaaggccatctacaacaagtaccagggcagcaagttccagaagatcgcgctgcgaacggagctgaccggtgcgctgatggactcgattgtgggccagagccagaggaaatag

SEQ ID NO: 2352 - protein, 524 aa, Drosophila melanogaster
MAALEKNASENFKQVQLKKLTVPSMEATTKRAALGDLQNRGISRPIAAKDAAQKDSKDLKLTDALRNAKARVDSHWKKQPLGSTNGNGNGAVPPKVNEGGVSAFLRSNSVRNRVPTKTTVEPTKVTVKSSSSENVNEPTLKREDSNLSKKSLTKLRAALAKPVMGVSGIRREPVAVSRKEAETKKELPETKKDSLEVKKDATRMPLIRGNSAVTTTTSTMPTTMSLSSKRLAGIEDIDANDKENLVLVSEYVNDIYDYLYQVELEQPIHKDHLAGQKEVSHKMRAVLIDWINEVHLQFHLAAETFQLAVAIIDRYLQVVKDTKRTYLQLVGVTALFIATKYEELFPPAIGDFVFITDDTYTARQIRQMELQIFKAIDCNLSRPLPIHFLRRYSKAAGAEDEHHTMSKYFIELASVDYEMATYRPSEIAAASLFLSLHLLNGNHRAGTGFNDRHWTPTLTFYSRYSAAHLRPITRLIAKLARDAPQAKLKAIYNKYQGSKFQKIALRTELTGALMDSIVGQSQRK

SEQ ID NO: 2353 - DNA, 1503 bp, Drosophila melanogaster
  CDS (1)..(1503)
atggaggcaacaacaaaacgcgcggccttgggcgatttgcagaatcgcggcataagtcgtcccatcgcagcgaaggatgcggcacagaaagactccaaggatctcaagctcacagacgccctgcgcaatgccaaagctcgggtggacagccactggaagaaacagccactgggcagcaccaatggcaatggcaatggcgccgttccgcccaaggtcaacgaggggggcgtgtcggcgtttttgcgttcgaattcggtgcgcaatcgcgttccgaccaagaccactgtagaacccactaaagttacagtcaagtccagttcttccgagaacgtgaacgagcccaccttgaagcgcgaggacagcaatctgtcgaagaagtcgctgaccaaactgcgtgccgctttggccaaacccgtgatgggagtttcaggaattcgacgggaaccagtagctgtttcccgcaaagaggcagagaccaagaaggaactgccagaaaccaagaaggactcactggaagtgaaaaaggatgcgaccaggatgccccttattaggggcaacagtgcagtcactacgaccacatctacgatgcccaccaccatgtccctttccagcaagcgcttggctggaatcgaggacattgatgccaatgacaaggagaacctggtactggtctccgaatatgtaaacgacatctacgactacttgtatcaggtggagctggagcagcccattcacaaggatcacctggccggacagaaggaggtgtcccacaagatgcgagccgtgctgatcgattggatcaacgaagtccacctgcagttccatctggctgcagagaccttccagctggcggtggctatcattgatcgctacctgcaggtggtcaaggacaccaaacgcacgtacttgcaattggtgggagtgacagcactcttcatagccaccaagtacgaggagctgttcccgccggcaatcggagatttcgtcttcatcacggacgacacctacactgcccggcagatccgacagatggagctgcaaatcttcaaggccatcgactgtaatctgtcgcgtccgctgccgattcacttccttcgacgctactcgaaggctgctggcgccgaggacgagcaccatacgatgtccaagtacttcatcgagttagcttccgtggactacgaaatggccacttacaggccatcggagattgcagctgcctcactgttcctgtcgctgcacttgctcaatggaaaccaccgggccggtacaggattcaacgaccgtcactggacgcccactctgaccttctactcgcgatactcggccgcgcacttgcgtccgattacccggctgatcgcgaaactggcccgggacgctcctcaggccaagctgaaggccatctacaacaagtaccagggcagcaagttccagaagatcgcgctgcgaacggagctgaccggtgcgctgatggactcgattgtgggccagagccagaggaaatag

SEQ ID NO: 2354 - protein, 500 aa, Drosophila melanogaster
MEATTKRAALGDLQNRGISRPIAAKDAAQKDSKDLKLTDALRNAKARVDSHWKKQPLGSTNGNGNGAVPPKVNEGGVSAFLRSNSVRNRVPTKTTVEPTKVTVKSSSSENVNEPTLKREDSNLSKKSLTKLRAALAKPVMGVSGIRREPVAVSRKEAETKKELPETKKDSLEVKKDATRMPLIRGNSAVTTTTSTMPTTMSLSSKRLAGIEDIDANDKENLVLVSEYVNDIYDYLYQVELEQPIHKDHLAGQKEVSHKMRAVLIDWINEVHLQFHLAAETFQLAVAIIDRYLQVVKDTKRTYLQLVGVTALFIATKYEELFPPAIGDFVFITDDTYTARQIRQMELQIFKAIDCNLSRPLPIHFLRRYSKAAGAEDEHHTMSKYFIELASVDYEMATYRPSEIAAASLFLSLHLLNGNHRAGTGFNDRHWTPTLTFYSRYSAAHLRPITRLIAKLARDAPQAKLKAIYNKYQGSKFQKIALRTELTGALMDSIVGQSQRK

SEQ ID NO: 2355 - DNA, 1290 bp, Nasonia vitripennis
  CDS (1)..(1290)
atgaccgttaacgatcagaatgttgctaatcaagagaatgtcaagaatgtcaagtctatggcattggctccagggcagacaaggagagctgctttgggcgaaattggcaataaagtcattattcaaaggaccaatgatttgacaggcaaatctagtcaagcaggaaaggacaaagttttgctgaaaaaaccattggtaaccaagcagcctcaagttaaggttgacagaatcgagaagattgaaaaagttgtccaaaaacctcatgtgcaaatagttaagccagtagttaaaactgatatacatgttgataatcgcccgctgcccgaggccaagaaaaatgagactgataatattaataagaaagactctgagttgaatgaagccaaaaaagatacggattcattttcttcagatctgataacaatcgaagatattgacgaagaggatagaaaaaatcccattcttgtttctgtatatagtaacgacatttacaggcatctgagaaatttggagacccagtttcctatactaaaagggtacttgcatgggcaagaggtaactcccaagatgagatgtgtacttgttgattggttaattgaagtccatgaacagtttcatctgatgcaggagacactgtatcttaccattgcaatcattgatcgattcttacaggactttcgactgattacccgaaagaggctgcagttagtaggtgtaacagctatgtttatagctagcaaatatgaagaaatgtactccccagacataagcgattttgtgtatattacggataatgcttacacaaaggcagaaattttacaaatggaaatgctcatgattaaaacactcgaattttcatttggacggccgctaccgttgcatttcctcaggagatacagcaaagctggaaaggctctgccagttcatcacacattggcaaaatactttttggagcaatgcctggttcattacgaagtttgccatcatccacctagcttgattgcagcggctgctctctatctttcattccttttgctagggaatgactctcctcaagaatcagagagcgatctcatttggactaaaactttggtacattacagtacatacaagttaagggacgtattgcccgtagtaaaagaaatttcctcaataatggttacagcggaaaagagcaagtatcaggctgcgcggagaaagtacacgaacccgaagcacatgaagatcagtctccgtcctgagttgaagtctccgactttagccgccttggcgaatcacaaggacgaataa

SEQ ID NO: 2356 - protein, 429 aa, Nasonia vitripennis
MTVNDQNVANQENVKNVKSMALAPGQTRRAALGEIGNKVIIQRTNDLTGKSSQAGKDKVLLKKPLVTKQPQVKVDRIEKIEKVVQKPHVQIVKPVVKTDIHVDNRPLPEAKKNETDNINKKDSELNEAKKDTDSFSSDLITIEDIDEEDRKNPILVSVYSNDIYRHLRNLETQFPILKGYLHGQEVTPKMRCVLVDWLIEVHEQFHLMQETLYLTIAIIDRFLQDFRLITRKRLQLVGVTAMFIASKYEEMYSPDISDFVYITDNAYTKAEILQMEMLMIKTLEFSFGRPLPLHFLRRYSKAGKALPVHHTLAKYFLEQCLVHYEVCHHPPSLIAAAALYLSFLLLGNDSPQESESDLIWTKTLVHYSTYKLRDVLPVVKEISSIMVTAEKSKYQAARRKYTNPKHMKISLRPELKSPTLAALANHKDE

SEQ ID NO: 2357 - DNA, 1968 bp, Magnaporthe grisea 70-15
  CDS (1)..(1968)
atggacgcaaggccacaacgtccctcccgtgctggagccctccagccgtctggcaacgagaacattgcaccggtcaaacaagttttgcatcagcgtcataagtcggccgggaatctgaagaccatctacaacccagctactgcgttcccggcaggtggtctcaacgttgcaccaaagcgagctgtcttcggcgagatgaacacgaacgccaagagcgcagctcaggatctgccctcaaagaaggcatccatggctccagtggtttcccatgtgggcaaggagaactctggtaaaccagcagctttgcaaaagcctgcacaacgatcgagtaaaagctacgcgatgctgcaccagcagccatccgcagctgatacccacggcgctgcacttcgcaaggccacggccgatgtactcactaagcctcaagtgaccaagaagaccactttcgtataccaagacacgactgctgcacaactcctgcccgagccgaatcagcatatgattgctgatcacccagtaatactcccaaagcccgacataatcaagaatccccgccattacaaaagccagcctcaacttaagccgaatcagcccgtcctccgccgaactcttagcagacagttcgccgaggtggcgagcttgatctcgtcagctctggcggaagaggcccaagatccaccatatgaggatgcgttggaagagattgccgacatcaatgggtcaaggggcgttccaatcaacatactaggtgactacatggaggagccaaacattgagattatctcgcatgatgctatagatgactaccccttggaggagcacgtcccagcaccgccaaccgcattcgagtccgaagacgggtgggaggaggaggacggcgatatggatgacgagcaaggttataccactgcccattcttaccgatcccatggcgaaaacaccacgggggggctcactgaactcctggcccccaaggcaacggccagagtgcaacaggaactggagcaggccaaagcaatcgtcgaggagtcgaggactattgaagaaatcgaagaggagcaatgggatgtcagcatggtggcagagtatggagaagagatctttgagtacatgcgcgagctcgagacccgtatgactcccgaccctcactacatggacatccaaacagagatacagtggtccatgcgctcagtcctgatcgattgggtcgttcaggttcaccaccgattcacgctcctccccgaaactctcttcctatgtgtcaactacatcgaccggttcctgtcacagaaggtcgtttccgttgccaagttgcaacttgtcggagccacggccatattcatcgcggccaagtacgaggagatcaactgcccctcggtcaatgagataatattcatggtcgacaacggcttctctgccgatgagattctcaaggctgagcgttttatgctcagcatgttacaattcgagcttgggtggcccggtcccatgagcttcttgcgccgaatcagcaaggccgatgactacgacctggagaccaggactctggcgaagtacttcctcgaagttactatcatggacgagagatttgttggctgcccgccaagcttcctggcagctggagcacactgcctctctcgaatgattcttgagaagggtgactgggcccacacctactggtcgggctacacctggtctcagctcaggccactggtggcgttgctatttgactgctgccagtaccccgagaagcaccatcaagccgtgtttgaaaagtactgcgaccgccgctataagggtgcgtcaacgtttgtccagagggccatcgcgcgcggctggacgccgcctttccccatccagcagccattcgttttggacgcaaactgcttcgcagagaccattgcctcatgcaggaacttctcttcaatggaagtgggacgcatgatggccaccgcgacgcaagcataa

SEQ ID NO: 2358 - protein, 655 aa, Magnaporthe grisea 70-15
MDARPQRPSRAGALQPSGNENIAPVKQVLHQRHKSAGNLKTIYNPATAFPAGGLNVAPKRAVFGEMNTNAKSAAQDLPSKKASMAPVVSHVGKENSGKPAALQKPAQRSSKSYAMLHQQPSAADTHGAALRKATADVLTKPQVTKKTTFVYQDTTAAQLLPEPNQHMIADHPVILPKPDIIKNPRHYKSQPQLKPNQPVLRRTLSRQFAEVASLISSALAEEAQDPPYEDALEEIADINGSRGVPINILGDYMEEPNIEIISHDAIDDYPLEEHVPAPPTAFESEDGWEEEDGDMDDEQGYTTAHSYRSHGENTTGGLTELLAPKATARVQQELEQAKAIVEESRTIEEIEEEQWDVSMVAEYGEEIFEYMRELETRMTPDPHYMDIQTEIQWSMRSVLIDWVVQVHHRFTLLPETLFLCVNYIDRFLSQKVVSVAKLQLVGATAIFIAAKYEEINCPSVNEIIFMVDNGFSADEILKAERFMLSMLQFELGWPGPMSFLRRISKADDYDLETRTLAKYFLEVTIMDERFVGCPPSFLAAGAHCLSRMILEKGDWAHTYWSGYTWSQLRPLVALLFDCCQYPEKHHQAVFEKYCDRRYKGASTFVQRAIARGWTPPFPIQQPFVLDANCFAETIASCRNFSSMEVGRMMATATQA

SEQ ID NO: 2359 - DNA, 1422 bp, Gibberella zeae PH-1
  CDS (1)..(1422)
atgcctacagttcgggccactcgtacgcgcaacgagaacgacgagaatagcggcacgacgcgtctcacaagagcccaggctgctgctctcaaggttgacgagctatcaatgcctgccaaggctgccctgcaaacgaagaagtccacagcaaacggtactgccgctgccaacacgcggaaacgcgctgcattgggcgatgtcagcaatgttggaaaggccgatggggttgctggaaagaaggcgaaaggattagtctccaaggctgctcagcccaccggtattgagaagaagaccgcgcgacccacaagacctgctctcgcatcccagaccgccaactccaaacctgcccagtccgggtctggtactatcaacaacaagcgaaaggtcctgacagacaccaagcccaaggcccctgtcaagaaaactgagcccacatccaaggaacccgagttgactgaagagaatgagcggtcagagacacccgaagaggctgaggttgagaagcctgaagtctctgttgagaagcccgaagttcaggacgcgcccttcaagtaccctcccggtgtcaataacctggacgaagaggatcttgaagaccctctcatggttgctgaatacgccaacgaaattttcgaatacctccgcgacctcgagtgcaagtcgattcccaaccctcaatatatgtctcaccaagacgacctcgaatggaagacgcgtggtatcctggttgactggctgattgaagtccacacgcgtttccacctgctccccgagaccctcttcctcgccatcaacgttatcgatcgattcctgtcggagaaggttgtccagcttgaccgtttccaactcgtgggcatcactgccatgtttatcgcgtccaagtacgaagaggtcctctctcctcatgtcgagaacttcaagcgcattgccgatgatggtttcagcgaggctgagatcctcagcgccgagcgatttgtactcagcacactcaactatgatctcagctaccccaaccccatgaacttcctccgccgagtctccaaggccgacaactatgacattcagtctcgcaccatcggaaagtacttgatggagatcagcctcttggaccaccgatttatggcctaccgacccagtcacgttgctgctggtgccatgtacttggcgcgacttatgcttgaccgcggtgaatgggatgccactctatcttactatgcgggttacaccgaggatgaggtcgagcctgtcgtccacctcatggtcgactacctcgctcgccctgtcgtccatgaggcctttgacaagaagtatgctgccaagaagttcttgagggcttcgctcctcgctcgccaatgggccaagaagaatgctgttctcttcggcattaccgatattgaactgggtctcgaccaaatatcatag

SEQ ID NO: 2360 - protein, 473 aa, Gibberella zeae PH-1
MPTVRATRTRNENDENSGTTRLTRAQAAALKVDELSMPAKAALQTKKSTANGTAAANTRKRAALGDVSNVGKADGVAGKKAKGLVSKAAQPTGIEKKTARPTRPALASQTANSKPAQSGSGTINNKRKVLTDTKPKAPVKKTEPTSKEPELTEENERSETPEEAEVEKPEVSVEKPEVQDAPFKYPPGVNNLDEEDLEDPLMVAEYANEIFEYLRDLECKSIPNPQYMSHQDDLEWKTRGILVDWLIEVHTRFHLLPETLFLAINVIDRFLSEKVVQLDRFQLVGITAMFIASKYEEVLSPHVENFKRIADDGFSEAEILSAERFVLSTLNYDLSYPNPMNFLRRVSKADNYDIQSRTIGKYLMEISLLDHRFMAYRPSHVAAGAMYLARLMLDRGEWDATLSYYAGYTEDEVEPVVHLMVDYLARPVVHEAFDKKYAAKKFLRASLLARQWAKKNAVLFGITDIELGLDQIS

SEQ ID NO: 2361 - DNA, 1401 bp, Candida glabrata CBS 138
  CDS (1)..(1401)
atgcagactggaaatgaggagaatgctgttccctcatggtattcagtgcctggtaaggaggtgcatagcgataaggctcatgagcaccgggtggctttgagcgatgtaactgggttggccaacagtaatttcatgcatgaaaagcttcattctaacagatgcagtggtgaaccgtctagcacggcacgtaatagtctcgagataaatctgaatcatgcggtggagtcggatcaggaaaacatggtgtccatatatgcttcgaacactctggacacacccaatagcaacgatgtgagcagccttcttgaagatcaacagctggaaagtatacgaagagtcacccagcacatgtcaaatacatcaaatggcgatgactcggactcaacaacggtggccaataaggactctcaccagggtgataacagtaacaatacaagtgatgatgctctcaggaatgagtattcagaaccaccagtgaatgatgatatacgaaggacattgatgaaagcataccagacatataagttggcatacttggatgattctgacgaggacaactacgatcctgtaatggtggtagaattagcctctgggatatttgattatatgaaacaactggagatcaaataccgtcctgacccttattacatggatttgcaatccgaactaaaaccatcatacagaagtacattactggattggatcgttcaagtagatgagagattccagctactgccagagactttattcctcacgattaacataatagacagatttttgtccaaagccgctataaaactcaacaagtttcaattggtcggtgctgtttcaatgtttatcgctgcaaaatatgaagaaataaactgtccaacaatgaaggactttctttacatgcttgataatgcatatacaaaagaagaaatgatagatgctgaacgatttatactaaacacattggatttttcaataggatggcctggcccaatgtctttcctgcgtcgtataagcaaagctgatgattatgattataacattagaacgttggctaaatacctattagaaacaacaatcatggacgctagactaataggaactccacctagctggctggcatcgggtgcctatttcctaagtaaaaccatcttgagctatggaaatgaagaaagagatgctgaagaaagatcagtttatgagactggctggaccctaaaacatgtcttttattctggctatacccaagagcaagtttttcctttatctagtctgattctcgagaactgtaggcatgcacaagaacgtcatagtgcaatttggacaaagtattccgacaggcgctatcaccgttcctcagtgatggtggataagtggatcgaggttgcagaaagcaaaatgaatagttaa

SEQ ID NO: 2362 - protein, 466 aa, Candida glabrata CBS 138
MQTGNEENAVPSWYSVPGKEVHSDKAHEHRVALSDVTGLANSNFMHEKLHSNRCSGEPSSTARNSLEINLNHAVESDQENMVSIYASNTLDTPNSNDVSSLLEDQQLESIRRVTQHMSNTSNGDDSDSTTVANKDSHQGDNSNNTSDDALRNEYSEPPVNDDIRRTLMKAYQTYKLAYLDDSDEDNYDPVMVVELASGIFDYMKQLEIKYRPDPYYMDLQSELKPSYRSTLLDWIVQVDERFQLLPETLFLTINIIDRFLSKAAIKLNKFQLVGAVSMFIAAKYEEINCPTMKDFLYMLDNAYTKEEMIDAERFILNTLDFSIGWPGPMSFLRRISKADDYDYNIRTLAKYLLETTIMDARLIGTPPSWLASGAYFLSKTILSYGNEERDAEERSVYETGWTLKHVFYSGYTQEQVFPLSSLILENCRHAQERHSAIWTKYSDRRYHRSSVMVDKWIEVAESKMNS

SEQ ID NO: 2363 - DNA, 1332 bp, Candida glabrata CBS 138
  CDS (1)..(1332)
atgaataatactgaagatatgtttagggacgttgaaaatgcaagccaaaatatggcttcaacagtgaacacttcaagaatggaccaaagacaaagaagggctttgactgatttgacatcacaaaaagtgaacagaattcatacttcaaaaacaattaaggatattccagcatatttatcaaattacactgccgatggagagaataaaaacattgaccaagcttttaatcatagtaatgaccaagatatcggtttagtaaatcaaatcaactcaggatatgccaatgttgaaaacgaaccaggaaaagaaactgatcacatatttatagatcaggatgatctgtcagatttagatattgtacaagaggactccttgagggagcaactagaagaatttgaacacgactttgagaattttgtggagccactctcaccaatatttaatgatgaaatacaagatactcttgatagagcatttaaagaatactatagagcaactccagatatggaggatgatgatacatttgatgctgttatggtaacggagtatggtagtgatatttttcgttacatgagaaagcttgaattaaaatatagaccaaatccgtactacatggcaggccaaccggaattgaaatgggaatatagaaagactgtgattgactggattgtgcaggttcacgagaggttccaattacttcctgaaacactatatctaactattaacatcatcgacagatttttatcaagaaagaatattacacttaacagattccaactagttagtgctactgcattactgatagcatccaaatacgaggaaatcaattgccctactataaaggatatagtctatatggtagacaatacttattccagggatgacatcatagaagctgaaaaatatatgattgatgcactagacttcgaagttagctggccaggtcctatgtcgttcttgcggagaataagtaaagcagatgattatgaataccgaactagaaatctagctaagtatttgctagaaaccacactaatggaatcctctttaatcagtgcactaccaagctggcttgcagctggtgcctactttttaagtagaataatattaggttacgaagagtggacccttaaacatgtctactattcgggctatactcacgaacagctttatcctctggctacacttatcttagacaactgccagaattatgaagaaagccaccaagcaatttggacgaagtatagtcaaccacaatatcatcaagtttcaatactggttacgaagttcttaggtagagtttcttcagacgatatgtcagaaatttattaa

SEQ ID NO: 2364 - protein, 443 aa, Candida glabrata CBS 138
MNNTEDMFRDVENASQNMASTVNTSRMDQRQRRALTDLTSQKVNRIHTSKTIKDIPAYLSNYTADGENKNIDQAFNHSNDQDIGLVNQINSGYANVENEPGKETDHIFIDQDDLSDLDIVQEDSLREQLEEFEHDFENFVEPLSPIFNDEIQDTLDRAFKEYYRATPDMEDDDTFDAVMVTEYGSDIFRYMRKLELKYRPNPYYMAGQPELKWEYRKTVIDWIVQVHERFQLLPETLYLTINIIDRFLSRKNITLNRFQLVSATALLIASKYEEINCPTIKDIVYMVDNTYSRDDIIEAEKYMIDALDFEVSWPGPMSFLRRISKADDYEYRTRNLAKYLLETTLMESSLISALPSWLAAGAYFLSRIILGYEEWTLKHVYYSGYTHEQLYPLATLILDNCQNYEESHQAIWTKYSQPQYHQVSILVTKFLGRVSSDDMSEIY

SEQ ID NO: 2365 - DNA, 1335 bp, Kluyveromyces lactis NRRL Y-1140
  CDS (1)..(1335)
atgatgcaaatgcagcaaagggtagcacttggtgatgttacttcacagattaacaatagggccaatcggtttagtgttgacggtgacagcaagaaagcgtttgttgatgctggattcttgaaggagaaaagggtaaagaatgcgaaggagaatgatttgtttagtggtcatgacgatgatttagtagtagcacgggctcaaaaactacgagaacagactcttgtttcttctgtgagtactgagagtatacggtcgcaacaattgtctagcaatagtaacgaaacagtacaacaccatttgattgaggttgaagcagatgatgaggatgatgcggagactgatagtgaggcactagcttttaaagaagatgaagaagcagaaacaggcggagatataagtgaggaaatggaagacgtagatgaaagttttacgccgttagtgccggtggtaacggaacattcagagaggttatatcaatatgtgtatgagaggttacaccgtgaggagcctgaccctaacgatgaggacacatgggaccctgttatggtatcggaatataccattgaaatttttgaacatttgaagtttttggagaggaaattttcgccgaatcccaggtatatcgaacatcaaccggaactaacgtggaaatacagatcaacgttgatcgattggattgttcaagtccacgataggttccagttgttacctgagacgttatttttaacggtaaacattatcgataggtttttatcaaagaaacaagtcactttgaacaggttgcaattagtcggtgcagcagctctattcattgcttccaaatacgaggagatcaactgtccaactttgaaagatatgctgtatatgctggacaatgcatacactagagaagagattctaagggcagaaagattcatgatcaatacgttaaatttcgaatttggatggccaggtccaatgtcatttttaagaagagttagtaaagcggatgattatgaatacgatacaagaaccgtggctaaatatttattggaaacttccataatggagccagaaataatagcagcgccaccatcttggcttgctgcaggtgcatattacttgagtaaaatcattatcggactcacaggttggtctgacgaacacatatattattccggttacacagaagagcaattaataccgttggcaacaatgattttggattcatgcagacatgcaacagaacgtcacaaagcaatattcgataagtactcgaggagtcgccataggaaatctgcttttgtagtagcgaagtggatttcaatggccgagagtcggttggaacagaaataa

SEQ ID NO: 2366 - protein, 444 aa, Kluyveromyces lactis NRRL Y-1140
MMQMQQRVALGDVTSQINNRANRFSVDGDSKKAFVDAGFLKEKRVKNAKENDLFSGHDDDLVVARAQKLREQTLVSSVSTESIRSQQLSSNSNETVQHHLIEVEADDEDDAETDSEALAFKEDEEAETGGDISEEMEDVDESFTPLVPVVTEHSERLYQYVYERLHREEPDPNDEDTWDPVMVSEYTIEIFEHLKFLERKFSPNPRYIEHQPELTWKYRSTLIDWIVQVHDRFQLLPETLFLTVNIIDRFLSKKQVTLNRLQLVGAAALFIASKYEEINCPTLKDMLYMLDNAYTREEILRAERFMINTLNFEFGWPGPMSFLRRVSKADDYEYDTRTVAKYLLETSIMEPEIIAAPPSWLAAGAYYLSKIIIGLTGWSDEHIYYSGYTEEQLIPLATMILDSCRHATERHKAIFDKYSRSRHRKSAFVVAKWISMAESRLEQK

SEQ ID NO: 2367 - DNA, 1422 bp, Debaryomyces hansenii CBS767
  CDS (1)..(1422)
atgaaatcctttaaacaccaaaccaagtcgtttgatgaaaacgcccggatcaagtccaaaagtaacaccagtgcaaaattgatctccaaaaattcaaataataacaatgctaataacatcacctcgagtattgataaaagagaagcacttggcgacttaacgcagcttaatgagaaccggaaaattgatttgaatctgaaaacttctcttcaaaaagttcatatttacaaacaaaaacaccaaaaaagaccacatgaagaattaggtacaaagacagaacttggcacaaacgaacattatgataatagccagaactctgatgatgtacttaagttccattttgatcgtttagggggtagttcagatgtgtccaatcttgaagatattggatttgagtttgctaaccaaaatagaattgtagagcaatttgatgatgacgaagaagagatagttcaggtagatccagaggtggacgaggaagaagaagaagaagaagaagaagaagaagaggaagaggaagattacagcaagccaatggaaccaaaatggaacaaagctatattcaatgaattacaatatgtcatgaagaaattctctaaaaatacgttggatgaaaccgatgaggatacatttgatgttactatggtagcagaatatgcaccagagatttttaactacatgcatgaactagaatacagattggttccagatctgaattatatgagtaaccaggacgaattgaaatgggaaatgagaagtgttttaatcgattgggtggtccaggttcacaatagattcaatttattaccggaaacattattcttaacggtaaattatatcgatagatttttaagtaagcgtaaggtctcgttatcgagatttcaattggtcggagctgttgcattgttcattgctgcaaagtatgaagaaattaactgtccaactgttcaagaagttgcatacatggctgataatgcgtatacagtagatgaattcttaaaagcagagagattcatgattgatgtcttagagtttgatatgggttggcctggtccaatgtcttttttaagaagaactagtaaagctgatgactatgattatgaaactagaacattggctaaatactttttagaaatcacaataatggattcaagatttgtcgcttcacagccaagttggttggcagctggggcacattacttatcaagaaagttacttaatagaggtcactggacagaagctcatgtgtattattctggctataccgaatctcaattaagaccattagcagaaatcttattgcaaaattgtcgtaatgctgaatccaaccataaagccatttttgaaaagtaccaagaacgtcgctacagaagatcctcagcattcgttcaagaatacttcgaagctcttgaacagttataa

SEQ ID NO: 2368 - protein, 473 aa, Debaryomyces hansenii CBS767
MKSFKHQTKSFDENARIKSKSNTSAKLISKNSNNNNANNITSSIDKREALGDLTQLNENRKIDLNLKTSLQKVHIYKQKHQKRPHEELGTKTELGTNEHYDNSQNSDDVLKFHFDRLGGSSDVSNLEDIGFEFANQNRIVEQFDDDEEEIVQVDPEVDEEEEEEEEEEEEEEEDYSKPMEPKWNKAIFNELQYVMKKFSKNTLDETDEDTFDVTMVAEYAPEIFNYMHELEYRLVPDLNYMSNQDELKWEMRSVLIDWVVQVHNRFNLLPETLFLTVNYIDRFLSKRKVSLSRFQLVGAVALFIAAKYEEINCPTVQEVAYMADNAYTVDEFLKAERFMIDVLEFDMGWPGPMSFLRRTSKADDYDYETRTLAKYFLEITIMDSRFVASQPSWLAAGAHYLSRKLLNRGHWTEAHVYYSGYTESQLRPLAEILLQNCRNAESNHKAIFEKYQERRYRRSSAFVQEYFEALEQL

SEQ ID NO: 2369 - DNA, 1293 bp, Yarrowia lipolytica CLIB122
  CDS (1)..(1293)
atggacagaacacgaacccacgacgaaaactcgctacatgagtacagaaagccgactgcggccggaggagcccccaccaaacgagtggcactcggaacagtgaccaacaccgcctcggtggctaccaaggccaaggttgccatctccaagccaccccaaagaatcacccgacaaccattagtcgcacagaaccaaaacattcccccattagcagcacaaacgtcaactacctcgcttgtgcagccgtgccctggttctgacgacaccgtggacgaggaggtggacacacagacggccgatgttgagccaacacagatagaagacgacttctacgagtccgacgaggaaggccccacccaacgatttgctgtgtcggagtccaacccccaggcgctgtaccccgtggtcgacaaggagtccatggccgagctcaaccgagtggccacctactttagcacaaacaacggcgtggatctggatgagaacgacgacgacacttacgacattagcatggtggcagaatatgcggaggagatcttcacatacatgaaggagctggaggtgcggttccagcccaaccccggatacatggactcgcagacggagatccactgggccatgcggtccattctggtggactggctggtgcaggtgcaccaccggttctcgctgctacccgagactctctttctcaccatcaactacattgaccggtttctgaccatcaagacagtgagtctcagcaagctgcagttggttggcgcggtggctctgtttgtggccgccaagtacgaggaaatcaactgccccagcgtgcaggaaatcgcatacatggttgataatggctaccatgtagacgagattctcaaggccgagcgatacatgatcgacttgctggattttaatctagggtggcccggccccatgtcgtttctgcgacgaacttccaaggccgacgactacgacctggaaacccggactctcgccaagtatttattggaggtgaccatcatggagaagacctttgttggcgccccaccatcgtggcttgctgccgcagcacactttctgtcgcggcgcatgcttaaccgtggccattggaccgatggccacacttattactctggctataccgaaaagcagctgctgcccgccgtcatgcggatcatccagtgctgccgggacccgcttacccaccacaaggccattttcgagaagtacaaggaccgcaagttcaagcgtgcatcggtctatgtgcaggagtggatggaccatgaggaaaacaaccactaa

SEQ ID NO: 2370 - protein, 430 aa, Yarrowia lipolytica CLIB122
MDRTRTHDENSLHEYRKPTAAGGAPTKRVALGTVTNTASVATKAKVAISKPPQRITRQPLVAQNQNIPPLAAQTSTTSLVQPCPGSDDTVDEEVDTQTADVEPTQIEDDFYESDEEGPTQRFAVSESNPQALYPVVDKESMAELNRVATYFSTNNGVDLDENDDDTYDISMVAEYAEEIFTYMKELEVRFQPNPGYMDSQTEIHWAMRSILVDWLVQVHHRFSLLPETLFLTINYIDRFLTIKTVSLSKLQLVGAVALFVAAKYEEINCPSVQEIAYMVDNGYHVDEILKAERYMIDLLDFNLGWPGPMSFLRRTSKADDYDLETRTLAKYLLEVTIMEKTFVGAPPSWLAAAAHFLSRRMLNRGHWTDGHTYYSGYTEKQLLPAVMRIIQCCRDPLTHHKAIFEKYKDRKFKRASVYVQEWMDHEENNH

SEQ ID NO: 2371 - DNA, 1212 bp, Apis mellifera
  CDS (1)..(1212)
atggctttaagaaatcggactgcacttacgaatattgtaaatcaagaaaatgttaagaaccttaagtcctcagtgactacaatacctggaaagactaaaagagctgctttgggtgaaataggtaacaaagtgaataccttaagaggtgtggagcccattgatagaactagcttgctgacaaaagatagtaaaaaaatcacagtttcaaaacaaattattaaaacatcagaaaaaggaattgagaaactacctatccaaatagttaaacctgtaaaaaagattacagtttcttatgaaaataatgtggtgtcactacctcctaaggaagttcagtcattctcctcagatctgttagcagttgaggatattgatgaagaagataaaggaaatcctagtctagtttctatttatagtaatgacatttatggatatttaagaaccttagaaaatatgtttcctatctcaaaaggatatttagatggacaagaagttacaccaaaaatgagaagtgtacttatagattggttagtagaagtacatcaacaattccatctaatgcaagagacattatatctgactgttgctactattgatagatttttacaggtttatagaaaaagattacaattagttggtgtgacagctatgtttatagctagtaagtacgaagagatgtattctccagatgtaaatgactttgtatatatcacagataatgcatattcaaggatagaaatattacaaatggaaatgcttattgtgaaaacattagattattcttttggtagaccattacctttacattttttgagaagatacagcaaagctggaaaggctcttccaatacatcatacaatggctaaatattttctagaacaaagtttagtgcattatgaaatgtgtcattatccaccaagtcttattgcagctgcagcaatatatttagctttcctaattattgataataatgacgaggacgagcataaaattgtttggaccaataccttggcacattacagcacttattctaaggacgacgtgtttcccgtggtacgggaaacagcgagtattatagttaatgcggataagatcaaatatcaagctgtaagaaagaagtacgcccaatcgaaatgcatgaagattagcacacgaccggaacttaaatcagcaacgatatttgctatatccactgcggataataaagcaatataa

SEQ ID NO: 2372 - protein, 403 aa, Apis mellifera
MALRNRTALTNIVNQENVKNLKSSVTTIPGKTKRAALGEIGNKVNTLRGVEPIDRTSLLTKDSKKITVSKQIIKTSEKGIEKLPIQIVKPVKKITVSYENNVVSLPPKEVQSFSSDLLAVEDIDEEDKGNPSLVSIYSNDIYGYLRTLENMFPISKGYLDGQEVTPKMRSVLIDWLVEVHQQFHLMQETLYLTVATIDRFLQVYRKRLQLVGVTAMFIASKYEEMYSPDVNDFVYITDNAYSRIEILQMEMLIVKTLDYSFGRPLPLHFLRRYSKAGKALPIHHTMAKYFLEQSLVHYEMCHYPPSLIAAAAIYLAFLIIDNNDEDEHKIVWTNTLAHYSTYSKDDVFPVVRETASIIVNADKIKYQAVRKKYAQSKCMKISTRPELKSATIFAISTADNKAI

SEQ ID NO: 2373 - DNA, 1890 bp, Aspergillus nidulans FGSC A4
  CDS (1)..(1890)
atggacgcgaagccccaacgcatccgtgtccgtggtgacgagaatgctccctttcccctcgccgcgaccaagacacttcaccaacgaacgaagtctactactgcattgtccgcaaccttccagaacggtgccagtaagaatggagcccgcagagccgcctttggagatgtcagcaacaccgccagcctagttcacggcaaccgagacgatgcctcccttgctggcaggaaaccatccaaattgctggagaagggatctatggctacggaaaagaagtcgaccgcgctgtcacagcccgcccaacgtcccgtttccatgtcgggtttcaagggcctgctgaacaatgtgaccaaccccaagccccttgaggtcacgaagcaggcagctgggcagcagcaaagcacaaactcccgtaagaccttgaacaagcgcgctacggttttcaaagatcacctagaaccattgacggagagcaaagaacttacatccaaggaatcgaaacccgaacctaaggaaggcaacatgaagggccattcaaaaccaagcttgggggaacatctgcagaaggacggcaaagtggagggtactgtctctttgaatgaaaaattagagagcgaaatgtgcaaactcgaggttctgttgtcccagcctggagccgaagaagacgagaaggagttcccggatcttgaggacgacgattgcaaagtgcaacctatgccgaagcaaaccggcgaagctcatatcgcagcggactccaacggacccgctattagctcgagggtcacttgcaaatccaccacagtctcccgtgcttcacaggatgacttacctcatcagtcggaacctgaagaatactgggacgatgacgatgaggagaacgaggaagacgactatatcactgcccgatcataccgctcccgtagcgagaataccaccggcggagcaacgaccctactgtttcccagatataaccagcaggtcaaacgtgagctggctctcgcaaagcagatagtcgaggctacccgcaccgtggaagatatcgaggacgactattgtgatacaagtatggtggctgaatacagcgaggagattttcgagtacatcagagagcaagagatcaagatgctgccaaatgcacattatatggacaaccaagccgagatccaatggtccatgcggtctgttctcatggactggcttgtgcaggtccaccatcggttctcactgctccctgaaactctttttctttgcgtcaactatatcgaccgtttcctctcatgcaagattgtttcgcttggcaagctgcagcttgttggtgcgactgctatttttatcgccgcgaaatatgaagagatcaactgtccgtctgtccaggagattgtttacatggttgacggcggttacactgtcgatgaaattctgaaagcagagcggttcatgctaagcatgctccagttcgagcttgggtttccaggacctatgagcttccttcgcagaatcagcaaagctgacgattacgacctcgaaactcgcacacttgcgaaatatttcctggaggttactatcatggatgagcgattcgttggtagtcctgctagtttccttgctgccggcgctcattgcttggcgaggttaatgctcaagaaaggcacctggtctcctgctcatgtgcattacgccggttatacttactctcagctatacccgctcgtctctctcattgttgagtgctgtgagatgccccgcaagcatcattcagctatttacgataagtacaacgatagacgattcaagcttgcttctgcttacgtggaagccgaaatgaggaagaacttccgtcttccagagccggctatcgaccgcaaaacaacacttggtcaaggacattag

SEQ ID NO: 2374 - protein, 629 aa, Aspergillus nidulans FGSC A4
MDAKPQRIRVRGDENAPFPLAATKTLHQRTKSTTALSATFQNGASKNGARRAAFGDVSNTASLVHGNRDDASLAGRKPSKLLEKGSMATEKKSTALSQPAQRPVSMSGFKGLLNNVTNPKPLEVTKQAAGQQQSTNSRKTLNKRATVFKDHLEPLTESKELTSKESKPEPKEGNMKGHSKPSLGEHLQKDGKVEGTVSLNEKLESEMCKLEVLLSQPGAEEDEKEFPDLEDDDCKVQPMPKQTGEAHIAADSNGPAISSRVTCKSTTVSRASQDDLPHQSEPEEYWDDDDEENEEDDYITARSYRSRSENTTGGATTLLFPRYNQQVKRELALAKQIVEATRTVEDIEDDYCDTSMVAEYSEEIFEYIREQEIKMLPNAHYMDNQAEIQWSMRSVLMDWLVQVHHRFSLLPETLFLCVNYIDRFLSCKIVSLGKLQLVGATAIFIAAKYEEINCPSVQEIVYMVDGGYTVDEILKAERFMLSMLQFELGFPGPMSFLRRISKADDYDLETRTLAKYFLEVTIMDERFVGSPASFLAAGAHCLARLMLKKGTWSPAHVHYAGYTYSQLYPLVSLIVECCEMPRKHHSAIYDKYNDRRFKLASAYVEAEMRKNFRLPEPAIDRKTTLGQGH

SEQ ID NO: 2375 - DNA, 1461 bp, Candida albicans SC5314
  CDS (1)..(1461): transl_table=12
atgcgatcttataaatcatccataacggatgaaaatgagttgacaaaacaaagacttagagccaaaagtattgccaatttgagcagcaatcacacaacagctgggcaaccatcaacaagctctcaacatagagaggcattgactgatttgacctcacaggagaataaaaatcacccaagagtgaaactaacacaaacaaacaccaatcatcacagaaacagctcaagtagttcgaacaaaatacaaatatatcaacaaatagagcaaaagaaaaccgatatccatcagttcaaaaaaccaagattggagaaggtattactaaatgacgacgacgatgaaaccgatgacgaatttgacgacgaagaagataaagaaaacagatatcatgatctagagttgaatgaagatgacagtaaacatcaactaataagtgaagcatttgaaacaattgatgatcggggaataagtgagggtgaaaatgatacagcgcaagaagcacgtgaaagattagaggaagaaacacaatcacatacacaggatatgagatcaatatatggggttcatgtgcccatgcaaccaatgtggaataatgcgataataaacgagctcaaatacgttatacaaaagtactctcgtaatacgttggacgaaaatgacgaagatacttatgatactaccatggtggcagaatattcaccggaaattttcaattacttgcatgaacttgaaaataagtttacacctgatccaaattatatggatttccaagacgatctaaagtgggagatgcgtgcagtgcttattgattgggtcgtccaagtgcatgctcgattcaacttgttttcagaaaccttgtacttgactgtaaattacattgacagattcttatccaagagaagggtgtcattatccagatttcagttagttggagcagtagcattgtttattgctgccaaatacgaagaaatcaattgtcctacagtccaagaaattgcatacatggcagacaatgcctattcaatcgacgagtttttaaaagccgagagatttatgattgatgtattggaatttgatttgggatggccagggccaatgtcgtttttgagaagaatatcaaaagctgacgattatgattatgaaactagaacacttgccaaatattttcttgaaataactataatggactcaaaatttgttgcttctccaccaagttggttggccgctggagcacattacatatcaagaatactattgggaagaggtgaatggacagaattgcatgttttttatagtggctataccgaaaagcaattgcagccattggcagacgttttgttagagaactgtcgccatgctgaaataaaccataaagccattttcgaaaaatacaaggaaagaaggtatagaaaaagttcactttttgttcaagaatattttcgtcacataatgtcccagagttga

SEQ ID NO: 2376 - protein, 486 aa, Candida albicans SC5314
MRSYKSSITDENELTKQRLRAKSIANLSSNHTTAGQPSTSSQHREALTDLTSQENKNHPRVKLTQTNTNHHRNSSSSSNKIQIYQQIEQKKTDIHQFKKPRLEKVLLNDDDDETDDEFDDEEDKENRYHDLELNEDDSKHQLISEAFETIDDRGISEGENDTAQEARERLEEETQSHTQDMRSIYGVHVPMQPMWNNAIINELKYVIQKYSRNTLDENDEDTYDTTMVAEYSPEIFNYLHELENKFTPDPNYMDFQDDLKWEMRAVLIDWVVQVHARFNLFSETLYLTVNYIDRFLSKRRVSLSRFQLVGAVALFIAAKYEEINCPTVQEIAYMADNAYSIDEFLKAERFMIDVLEFDLGWPGPMSFLRRISKADDYDYETRTLAKYFLEITIMDSKFVASPPSWLAAGAHYISRILLGRGEWTELHVFYSGYTEKQLQPLADVLLENCRHAEINHKAIFEKYKERRYRKSSLFVQEYFRHIMSQS

SEQ ID NO: 2377 - DNA, 2223 bp, Ustilago maydis 521
  CDS (1)..(2223)
atggctcaacctgccgtcagacaacctaccgtgacaaggtcacgcatcagccgaccaggaggcatcccagcttctcgtagcggcgaccgcatccatctcacagaagctgcctccacaagtcatctggcaaaagccaagtcaacaaaattggtcggcccctctaccgcaggtaaactccgagccgattccagatccatgccacaacgcgctgccctttctgacgtcagtaatcgtgctggcgtcgccagagccaatgcactagcagatggcgccgtcaagctggcgcccggccacaatggcctgcgctctcaacacacaaaaagcatgacccgtctccgcgacgcccgttcgcgatccacgtccgagcagagactctctggcccaacacgctctgtctcggaacaacgtgactgtgcaccagccgctgccgagtctatgcatgtggaggcgtcacaactcctcccacccttccagagctccgcttcagtcaaggtgggcatcagcgacgaagcaggaagcagcaggctgcacgaagacgcagacatccgcgacctcgccggctcgcagcacagtgaccatgtcgaagaggacgagatgtcagatgtcgcctctacttcgagcagcgacgacgataccgcagaggacatcggcgtagacaaggccaactggctcgattcggaacgactcgatgccgagggtttggtctcgttacatccggagctggaggaggccgcgcgacgcaaggtggccttgatcaagtctcgctaccaggaggaagtcattcagcctcgtgcggcgcgcgcgcaagcacaacatgcagaagcagtcgccgccggtcagctctcggctgagctggctgcgcacgaagacgagctgatcgtcatggggctcgatcccgaggaggtacgcgacacgagtatggtggccgagtactcgaatgagatctttagctacatggctcggtgcgagcgcgagaccatggccaacccgaattacatggagtttcagagcgagattcactggcacatgcgtgctacgctcgtcgactggctcttgcaggtgcacatgcgctaccacatgctgccagagacgttgtggattgccatcaatgtggtcgaccgcttcctgagcgtgcgcgtggtcagcctggccaagctgcagctcgtcggtgtcacggccatgtttattgcagcaaagtacgaagagatcctggcgcctagcgtcaaggagtttgtctacatgaccgagggtggctactcgcaagaggagatcctcaagggcgagcgcatcatcctctcgacgttggactttaacatttcgtcctactgctcaccttactcttgggtgcgaaagatctccaaggcggacgactacgacattcgcacccgtaccctgtccaagttcctgatggagctggcgctgctggatcatcgcttcctgcgtgctcggcccagtcttgtggccgctgtgggcatgtttttggccaaaaagatgctgggaggcgagtgggatgacgcctttgtctactactctgactttaccgaagagcagctggtccccggcgcgaatctattactcgagcgtttgctggaccaaggctttgaggagcagtttgtctaccgcaagtactcgaacaaaaagtttctccgggccagcgtctttgcgcgtgattgggccttccagaaccacagcgcactactcgccgctgctgcagcagcggcagggtcgactcaagcagtgcactcttgcttggttacaacgactgtgcagcacagatttcgcgagcagagaacctatgtgcagagaagaagagcgggtgcgagtgtgtggcgcgatgagcggaaggatccgcgcggctctacatttggaagcgggtgcggagagtggaaagacaaagatcggatcgaagcagacgtgaagcgcgaagcgagtcgaatgaaacttgttcacgcggtctctgacatggccaagctgtacttgcacactcatcctcatcactgcagccacaaaagggtacatgcatggtatgagagcgtgtctgtcatgtgcattcacgattttcgcagcgctcagcttgcttggttgaggcttgaacctgtgatcgcgcgctgcgaagctcaagccattcacgatcgtgcctgctcgcaatcactatggccgactcaacgctcttgcctgacgagaaacggaacgcacgacgagaagctgagttgcaactcataa

SEQ ID NO: 2378 - protein, 740 aa, Ustilago maydis 521
MAQPAVRQPTVTRSRISRPGGIPASRSGDRIHLTEAASTSHLAKAKSTKLVGPSTAGKLRADSRSMPQRAALSDVSNRAGVARANALADGAVKLAPGHNGLRSQHTKSMTRLRDARSRSTSEQRLSGPTRSVSEQRDCAPAAAESMHVEASQLLPPFQSSASVKVGISDEAGSSRLHEDADIRDLAGSQHSDHVEEDEMSDVASTSSSDDDTAEDIGVDKANWLDSERLDAEGLVSLHPELEEAARRKVALIKSRYQEEVIQPRAARAQAQHAEAVAAGQLSAELAAHEDELIVMGLDPEEVRDTSMVAEYSNEIFSYMARCERETMANPNYMEFQSEIHWHMRATLVDWLLQVHMRYHMLPETLWIAINVVDRFLSVRVVSLAKLQLVGVTAMFIAAKYEEILAPSVKEFVYMTEGGYSQEEILKGERIILSTLDFNISSYCSPYSWVRKISKADDYDIRTRTLSKFLMELALLDHRFLRARPSLVAAVGMFLAKKMLGGEWDDAFVYYSDFTEEQLVPGANLLLERLLDQGFEEQFVYRKYSNKKFLRASVFARDWAFQNHSALLAAAAAAAGSTQAVHSCLVTTTVQHRFREQRTYVQRRRAGASVWRDERKDPRGSTFGSGCGEWKDKDRIEADVKREASRMKLVHAVSDMAKLYLHTHPHHCSHKRVHAWYESVSVMCIHDFRSAQLAWLRLEPVIARCEAQAIHDRACSQSLWPTQRSCLTRNGTHDEKLSCNS

SEQ ID NO: 2379 - DNA, 1233 bp, Oryza sativa subsp
  CDS (1)..(1233)
atggatagggcgagcgagaaccggaggctggcggcggtggggaagcccgtgccggggatcggagagatggggaaccggaggccgctcagggacatcaacaacctcgtcggggcgccgccgcacccgtccgcgatcgccaagaagccgatgctagagaagagtgggaaggaagagcagaagcctgcattggtggtgagccaccggcctatgacgaggaatttcgcggcctccttgacgcgaaaagaacagcttgaccatcaggtttccgtggctgatgcagcggtcgtctgcactgatccacagaagaaccccatccccgatggcacagttgacgacgatgtggaatcgtgcgaatcgaacgactatattgccgtggatgaatgcaatgatactgatgaggatgagtccatgatggacattgacagtgccgactcagggaatccgcttgcagcaaccgagtacgtcgaagagttgtacaagttctatagagaaaatgaggaaatgagttgtgtgcagcctgattacatgtccagtcaaggagacataaatgaaaagatgagagcaattctgattgattggctcattgaggtccatcacaagtttgagctgatggatgagactctctttcttactgttaacatagtagacagattcttggaaaaacaagttgtgccaaggaagaagttgcagctagttggagtgacagctatgctccttgcttgcaaatatgaggaagtcgcagtccctgtcgtcgaggatctagtgctaatttctgaccgggcttatacaaaaggacaaattctggaaatggaaaagttgatcctaaacacactccagttcaacatgtctgtaccaacaccttacgtttttatgagacggtttctgaaggcagctcagtctgacaagcagctctccctggtggaataccaaatgctcaagtaccgaccttcgcttcttgctgctgctgcagtttacacagcacaatgtgctctcactcgttgccagcagtggacaaagacctgcgaactacatagtagatataccggagagcagcttcttgagtgttctaggatgatggtagatttccaccagaaggcgggagcaggcaagctcaccggcgtgcaccggaaatacagtacgttcaagtttgggtgtgcagccaaaacggagcctgctctcttcttgcttgagtcaggagcaggaggttacaaccttcagaagcagccttgttga

SEQ ID NO: 2380 - protein, 410 aa, Oryza sativa subsp
MDRASENRRLAAVGKPVPGIGEMGNRRPLRDINNLVGAPPHPSAIAKKPMLEKSGKEEQKPALVVSHRPMTRNFAASLTRKEQLDHQVSVADAAVVCTDPQKNPIPDGTVDDDVESCESNDYIAVDECNDTDEDESMMDIDSADSGNPLAATEYVEELYKFYRENEEMSCVQPDYMSSQGDINEKMRAILIDWLIEVHHKFELMDETLFLTVNIVDRFLEKQVVPRKKLQLVGVTAMLLACKYEEVAVPVVEDLVLISDRAYTKGQILEMEKLILNTLQFNMSVPTPYVFMRRFLKAAQSDKQLSLVEYQMLKYRPSLLAAAAVYTAQCALTRCQQWTKTCELHSRYTGEQLLECSRMMVDFHQKAGAGKLTGVHRKYSTFKFGCAAKTEPALFLLESGAGGYNLQKQPC

SEQ ID NO: 2381 - DNA, 1305 bp, Dreissena polymorpha
  CDS (1)..(1305)
atgaatacaagagcagcgtctgctaatttagctggcaggatggcactgcagcaaatcaacagtgacaatattgaccaaattcctggcaaggcccaacttctgcaaagacctcaaacctcacacctaatgcaaagaaatacccttagtgacattggaaatcaagtatctgcaatcacaatatcagatgccagtaaaaagggtcctattaaaaaagaaattgtgcaagtaaatcccagacagcagaaagcattgaccaagaccaaagcaactacatccctcaaagcattggcagagaagaaggaaaccaaaaaggagcatgatgaattccatttcgttgagccttcatttccttcgcgaattccagtcccaacagccactgttcacccattgccatctgcacatgtgcctatggacacaagtgatgcgggaaaagatgcattttcgaaagctttgctaaatgtacagggcattgatgcaaatggcaggggaaacccccaactagtcagtgaatatgtcaacgatatatacgagtacatgagaatattagagaaaaagtacccaattgcggacagctacttagaaaagcaagaaatctccgggaagatgcgtgccattctcattgactggttgtgccaagttcatcacagatttcatcttctccaagaaacactctacctgactgttggcataatcgatagatttctccaggaatctcctgtgaccaaaaacaaattgcagttggtcggtgtcacatccatgttgattgcctccaaatatgaagagatgtacgcacctgaagttgcagactttgtttatattacagacaatgcttacactaaaaaggaaattttggaaatggaacaaactatcttacggacattaaactttagttttggaaagccattgtgtttgcatttcttgaggaggaattcaaaggctggtcaggttgatgccagcaagcatacgctggccaagtacctgatggagttgacgatagtggagtacgatatggtgcaatatctcccttctcaaatagctgccgcagccctatgtctttctatgaaacttctgggcgactgtaaatggacggagacattggcgcactatagctcttatacagaggaagaacttgtgccaaccatgcgtaaacttgccagtctagtcatgaaacaggaggattccaaactcaaactcactgccataaggaccaaatattcaagttcaaaattcatgaagataagcaccataccagctttgaagtctccactggtgcaggaacttgcaggtgcttcagactgctcctaa

SEQ ID NO: 2382 - protein, 434 aa, Dreissena polymorpha
MNTRAASANLAGRMALQQINSDNIDQIPGKAQLLQRPQTSHLMQRNTLSDIGNQVSAITISDASKKGPIKKEIVQVNPRQQKALTKTKATTSLKALAEKKETKKEHDEFHFVEPSFPSRIPVPTATVHPLPSAHVPMDTSDAGKDAFSKALLNVQGIDANGRGNPQLVSEYVNDIYEYMRILEKKYPIADSYLEKQEISGKMRAILIDWLCQVHHRFHLLQETLYLTVGIIDRFLQESPVTKNKLQLVGVTSMLIASKYEEMYAPEVADFVYITDNAYTKKEILEMEQTILRTLNFSFGKPLCLHFLRRNSKAGQVDASKHTLAKYLMELTIVEYDMVQYLPSQIAAAALCLSMKLLGDCKWTETLAHYSSYTEEELVPTMRKLASLVMKQEDSKLKLTAIRTKYSSSKFMKISTIPALKSPLVQELAGASDCS

SEQ ID NO: 2383 - DNA, 1524 bp, Candida albicans
  CDS (1)..(1524): transl_table=12
atgcgatcttataaatcatccataacggatgagaatgagttgacaaaacaaagacttagagccaaaagtattgccaatttgagcagcaatcacgcaacagctgggcaaacatcaacaagctctcaacatagagaggcattgactgatttgacctcacaggagaataaaaatcacccaagagtgaaactcacacaaacaaacaccaatcatcacagaaacagctcaagtagttcgaacaaaatacaaatatatcaacaaatagagcaaaagaaaaccgatatccatcaattcaaaaaaccaagattggagaaggtattactaaatgacgacgacgatgaaaccgatgacgaatttgacgacgaagaagataaagaaaacagatatcatgatctagagttgaatgacgatgacagtaaacatcaactaataagtgaagcatttgaaacaattgatgaccggggaataagtgaaggtgagaatgatacagcgcaagaagcacgtgaaagattagaggaagaaacacaatcacatacacaggatatgagatcgatatatggggttcatgtacccatgcaaccaatgtggaataatgcgataataaacgagctcaaatacgttatacaaaagtactctcgtaatacgttggacgaaaatgacgaagatacttatgatactaccatggtggcagaatattcaccggaaattttcaattacttgcatgaacttgaaaataagtttacacctgatccaaattatatggatttccaagacgatctaaagtgggagatgcgtgcagtgcttattgattgggtcgtccaagtgcatgctcgattcaacttgttttcagaaaccttgtacttgactgtaaattacattgacagattcttatccaagagaagggtgtcattatccagatttcagttagttggggcagtagcattgtttattgctgccaaatacgaagaaatcaattgtcctacagtccaagaaattgcatacatggcagacaatgcctattcaattgacgagtttttaaaagccgagagatttatgattgatgtattggaatttgatttgggatggccagggccaatgtcgtttttgagaagaatatcaaaagctgacgattatgattatgaaactagaacacttgccaaatattttcttgaaataactataatggactcaaaatttgttgcttctccaccaagttggttggccgctggagcacattacatatcaagaatactattgggaagaggtgaatggacagaattgcatgttttttatagtggctataccgaaaagcaattgcagccattggcagacgttttgttagagaactgtcgccatgctgaaataaaccataaagccattttcgaaaaatacaaggaaagaaggtatagaaaaagttcactttttgtacaagaatattttcgtcacataatgtccagagttgatctaaagacaagtttccaacaatgcggtactttacattttattcaatctagccaaaatcattaa

SEQ ID NO: 2384 - protein, 507 aa, Candida albicans
MRSYKSSITDENELTKQRLRAKSIANLSSNHATAGQTSTSSQHREALTDLTSQENKNHPRVKLTQTNTNHHRNSSSSSNKIQIYQQIEQKKTDIHQFKKPRLEKVLLNDDDDETDDEFDDEEDKENRYHDLELNDDDSKHQLISEAFETIDDRGISEGENDTAQEARERLEEETQSHTQDMRSIYGVHVPMQPMWNNAIINELKYVIQKYSRNTLDENDEDTYDTTMVAEYSPEIFNYLHELENKFTPDPNYMDFQDDLKWEMRAVLIDWVVQVHARFNLFSETLYLTVNYIDRFLSKRRVSLSRFQLVGAVALFIAAKYEEINCPTVQEIAYMADNAYSIDEFLKAERFMIDVLEFDLGWPGPMSFLRRISKADDYDYETRTLAKYFLEITIMDSKFVASPPSWLAAGAHYISRILLGRGEWTELHVFYSGYTEKQLQPLADVLLENCRHAEINHKAIFEKYKERRYRKSSLFVQEYFRHIMSRVDLKTSFQQCGTLHFIQSSQNH

SEQ ID NO: 2385 - DNA, 1380 bp, Pneumocystis carinii
  CDS (1)..(1380)
atgaacgcagcgaggcgtgtaacacgtcagacggcaacgtttaatcttaatgatgagaacaaattgcatggacaaatatctcgggtgaagcaagtatctacacaaggattagaaggggtaaataagccatggacggcggcgacgcgaaagagagcagcattaggagatgtaagcaatgtgcataataaggagaatcagacggcgaaaacgaaaacgcagccgttatcaaccaaagcacgcgtggtgacgaaaaccggagttcaaagtcatcaaagcaaagaatccgttcatacggtaccaacgggagaattgcgtggtgaagaaacaacacgaaaaagacggacatcaaaggttttaacggagcaagaagtgatcattgaggtggaacaaacacaagcaagtaaaaaagtgagaaccgatggccttttaaacggatcggtacaagagcatccagcatcacaagattgggatgatttagatgcggatgatgctcatgatccattgatggtatcggaatacgttgaagaaatcatgggttacatgagggaattagaggtgttaacacttcctttaccagattatatggatcgacagaaagaacttcaatggaaaatgcgaggaatcttggtagattggctaattgaggttcatgcgaaatttcgtcttcttccagaaacgttatttctttctgtcaatattattgatcgatttttatccctacgagtatgttcgcttcctaagcttcaattagtagggattacagcactttttatcgcagcaaaatatgaagaagtgatgtgtccatcgatacaaaattttatgtacatggcagatggtggatatacgaatgaagaaattctaaaagcagaacaatacgttttacaagttcttggatatgatatgtcatatccaaatcccattaattttctaagaagagtatcaaaggcagataattatgatattcagacacgtacagtggcaaaatatcttatggaaattagtcttcttgatcatcgatttttgccttttgtgccatctaatattgcagcttcgggcatttatttggctagaattatggttactggtggcaattggaatgctaatttaatacattattcgggatataaagaatcagatcttgttccatgttctaaaatgatgctggattatctttcacgatcagttataaaacatgaagcattttttaaaaaatatgccagcaaaaaattcatgaaagctagtttatttgttcgcgattgggttaaaaaacattacgatcttgaggcaaacgtgcgattaaacactatctctttcgattacgataaccatgaatcaaatgaaatacatcaggacttagaagaggaagaaggatccctatag

SEQ ID NO: 2386 - protein, 459 aa, Pneumocystis carinii
MNAARRVTRQTATFNLNDENKLHGQISRVKQVSTQGLEGVNKPWTAATRKRAALGDVSNVHNKENQTAKTKTQPLSTKARVVTKTGVQSHQSKESVHTVPTGELRGEETTRKRRTSKVLTEQEVIIEVEQTQASKKVRTDGLLNGSVQEHPASQDWDDLDADDAHDPLMVSEYVEEIMGYMRELEVLTLPLPDYMDRQKELQWKMRGILVDWLIEVHAKFRLLPETLFLSVNIIDRFLSLRVCSLPKLQLVGITALFIAAKYEEVMCPSIQNFMYMADGGYTNEEILKAEQYVLQVLGYDMSYPNPINFLRRVSKADNYDIQTRTVAKYLMEISLLDHRFLPFVPSNIAASGIYLARIMVTGGNWNANLIHYSGYKESDLVPCSKMMLDYLSRSVIKHEAFFKKYASKKFMKASLFVRDWVKKHYDLEANVRLNTISFDYDNHESNEIHQDLEEEEGSL

SEQ ID NO: 2387 - DNA, 1338 bp, Sesbania rostrata
  CDS (1)..(1338)
atggcttcaagacccattgttccacaacagcccagaggtgacgcagccttgggggcagggaagcagcagaagaagaacggtgcagcagatggaaggaaccgtaaagcacttggtgatattggaaacttggtcactgtaagaggagttgaggtcaagcctaatcgtcccatcacaaggagtttctgtgcccaactacttgccaatgcacaagctgcagctgctgctgaaaataacaagaaacaggcttgtcccaatgtggctgggcctcctcctgttgttgaaggagttgcagtggctaaaagagtggcccccaaaccaggtcagaagaaagtcaccacaaaaccaaagcctgaggaagtcattgaaataagtccagacgaagaggtccacaaagacaataataagaaaaaggaaggtgatgccaacaccaagaagaaatcacacacttattcttctgtgctcacagctcgaagcaaggcagcatgtggtctgactaataaacctaaagagattattgacattgatgctgctgacactgccaatgagcttgctgctgtggaatatattgaagacatttacaaattctataaaatggttgagaatgaaagccgtccccatgactacatggactcacaacctgagatcaatgagaggatgagagctatacttgttgattggctgatagatgtacacagcaaatttgacctttcacttgaaaccctttatttgaccatcaacatagttgataggttcttagcagttaagactgtgccaaggagggaactgcaattggttggcatcagtgccatgctgatggcatccaagtatgaagaaatctggcccccagaggttaatgactttgtctgcctctcagacagagcttacactcatgaacagatacttttcatggagaaaatcatattggggaagctagaatggaccttgactgtgcctaccccttttgttttcctagttcgttttatcaaggcatcagtgccagatgaggcattggaaaacatggcacatttcctttctgaattggggatgatgcattatgccaccttaatgtattgttcatcaatggttgctgcctcagcagtctatgctgcaagatgcactctgaataagagccctgtttggaatgagacacttaagcagcacactggttactctgaagaacaacttatggattgtgctagactactggtgagcttgcactccacagttgggaatgggaagcttaaggttgtgtatagaaagtactctgatcctgagagaggatctgttgcagtgcttccaccggctaaaaatcttctgtctgaagggaagagcctctaa

SEQ ID NO: 2388 - protein, 445 aa, Sesbania rostrata
MASRPIVPQQPRGDAALGAGKQQKKNGAADGRNRKALGDIGNLVTVRGVEVKPNRPITRSFCAQLLANAQAAAAAENNKKQACPNVAGPPPVVEGVAVAKRVAPKPGQKKVTTKPKPEEVIEISPDEEVHKDNNKKKEGDANTKKKSHTYSSVLTARSKAACGLTNKPKEIIDIDAADTANELAAVEYIEDIYKFYKMVENESRPHDYMDSQPEINERMRAILVDWLIDVHSKFDLSLETLYLTINIVDRFLAVKTVPRRELQLVGISAMLMASKYEEIWPPEVNDFVCLSDRAYTHEQILFMEKIILGKLEWTLTVPTPFVFLVRFIKASVPDEALENMAHFLSELGMMHYATLMYCSSMVAASAVYAARCTLNKSPVWNETLKQHTGYSEEQLMDCARLLVSLHSTVGNGKLKVVYRKYSDPERGSVAVLPPAKNLLSEGKSL

SEQ ID NO: 2389 - DNA, 1926 bp, Aspergillus oryzae
  CDS (1)..(1926)
atggatgcaaagccccagcgaattcgcgtccgtggggacgagaatgctgccttccctctgactagcaaaacggttcatcagaaaaacaaatcgacccccgccttgtccactatgttccagaatggcgtgacgaagaatgggccaagaagagccgcttttggagatgtcagcaatactgtgaaaaccgtccaaggcattcgggatgacatctctgttgcagcaaagaaacagatcaagccattggagaagccttccgtgcaggccacggagaggaaatcctctgtcttggcccaacctgcccagcggccaatgtcggtggcgggagtcaaaggcctatcgagcaatgtgacgacttccaaacccctggagcccatcggaaagtcgatcggcgtgccgcagcataccgccaacgcccgaaaggccctgaacaagcgaggaacagtgttcaaagatcacatggaaccattgacggaaaaacgcgaacttacatccaaggaaacaacacaaactaaggaagggattactgggggccaactcgcgcattcgtctacggcgccgtcgcagctcagcagcctgaaggaaaaggacgtggtcaacgagggatcaaatgatgagtcggagacccatgacgaacattccattgtcagctctgaagttgatggagaggagaaggacgcacccaagctcgacgaggatgtttgtaaggtccagggtattaaggaactcagggaagcctctgaacccggtacggcaacggatgccgacggctcagaccgcgctgtgaagccacaacgtgtatctgttcctggcgcacatatgtctcatgaacatgtgcccgcccactcggagccggaagagtcctgggacgacgaggatgacgaaaatgaagaagaggatgagtatatcactgctcgctcctatcgatcccgtggcgaaaacacaactggcgcgactactacaatactctttccgaaatatacgcagcaagtgagacgggagttggcactggccaagcaaatcgtcgaggcaacacggacagtggaggatattgaggacgaatattgggatacgagcatggtcgcggaatatagtgaagatatattcgattacatgcgggaacaggagatcaaaatgctgccaaacgcgcactatatggacaaccaagcggaaatccaatggtctatgcggtctgtcctgatggactggcttgtccaggtccaccatcggttctctctgcttcctgagacccttttcttgtgtgtcaactatatcgaccgcttcctgtcctgcaagatagtctctctaggcaaattgcagcttgttggtgctaccgcgatcttcattgctgccaagtacgaagagataaactgtccttccgtgcaagagattgtttatatggtcgacggaggctacacagccgatgagattctcaaggcggaacgcttcatgctcactatgctgcagttcgagctcggatggcccggtcccatgagctttctgcggaagatcagcaaagctgatgactacgacctggagacccggacactggcgaagtatttcttggagattaccatcatggatgaacgcttcgtcggatgcccaccaagctttacagctgctggcgctcattgtcttgcaaggatgatgttgagaaaagggaactggacgcctgcccatgtccattacgcgggatacacctattcacagctttacccgcttatttccctcatggtggaatgctgcgagatccctcgcaagcaccatgcggctatttatgaaaagtacactgacaaacggttcaagcgcgcttcgcttttcgtcgaggctgaaatgagaaaaggctttcatctgccggaggtcactcgggaaaagagtctttgcaatccgccatctcttgacgccggacatcagtggaagcgcgcataa

SEQ ID NO: 2390 - protein, 641 aa, Aspergillus oryzae
MDAKPQRIRVRGDENAAFPLTSKTVHQKNKSTPALSTMFQNGVTKNGPRRAAFGDVSNTVKTVQGIRDDISVAAKKQIKPLEKPSVQATERKSSVLAQPAQRPMSVAGVKGLSSNVTTSKPLEPIGKSIGVPQHTANARKALNKRGTVFKDHMEPLTEKRELTSKETTQTKEGITGGQLAHSSTAPSQLSSLKEKDVVNEGSNDESETHDEHSIVSSEVDGEEKDAPKLDEDVCKVQGIKELREASEPGTATDADGSDRAVKPQRVSVPGAHMSHEHVPAHSEPEESWDDEDDENEEEDEYITARSYRSRGENTTGATTTILFPKYTQQVRRELALAKQIVEATRTVEDIEDEYWDTSMVAEYSEDIFDYMREQEIKMLPNAHYMDNQAEIQWSMRSVLMDWLVQVHHRFSLLPETLFLCVNYIDRFLSCKIVSLGKLQLVGATAIFIAAKYEEINCPSVQEIVYMVDGGYTADEILKAERFMLTMLQFELGWPGPMSFLRKISKADDYDLETRTLAKYFLEITIMDERFVGCPPSFTAAGAHCLARMMLRKGNWTPAHVHYAGYTYSQLYPLISLMVECCEIPRKHHAAIYEKYTDKRFKRASLFVEAEMRKGFHLPEVTREKSLCNPPSLDAGHQWKRA

SEQ ID NO: 2391 - DNA, 1449 bp, Aspergillus oryzae
  CDS (1)..(1449)
atgaacgagaatgacgagaatagaccttcgacgcgtctgacacgggcgaaggctgccgctctttccgcaggtgacgtctccactgccgccactaagaaacctcttgagtccaagaaagccgctacctcgaccgcgaccgctggtaccacaaggaagcgcgctgctttgggtgatgtcagcaatgtcaccaagggtgagaacggcgccgcgaaggagggaaagaagccagccggggccaaggtcggcttgacttcgaaagccacaatgcaagctggcggtgttgcgaagctcacccgcaccaactcgtcgcgtactactgccctgacaaacaagaccaccaacacgaagaagcctacggaggacaaggagaaacgctcgggacccggatctatcaaggatagtgcacagaagcgccaaaaaaccacgaaagacaacgcgttggtcgaggagccaccccgcaagaaggtggaagtggaaaagaagcttaccgagaagaagcttgtcgctgaagaggctcccgccaaggaaaatgtcgaagcccctgtcgagccaaagacgctgcagaagccttctcaagatctcgtggaggatttggataccgaggatttggacgaccccttgatggtggcagaatatgtggtggagattttcgaatacatgaaggaccttgaactggagacactacctaacccccattacattgaccatcaacctgatctggagtggaagatgcgtggtatcctggttgactggctcatcgaggttcacactcgtttccgcctgttgcctgaaacccttttcctcgctgtcaacatcatcgaccgtttcctgtcggccgaggtggtggctctggatcgtctgcagcttgttggagttgctgctatgttcatcgcgtctaaatacgaggaggtcctctcgccgcatgtggccaatttcagtcacgtcgccgacgagactttcaccgacaaggagattttggacgctgagcgccacatcctggcgactctcgagtacaacatgagctatcccaatccgatgaacttcctgcgtcgtatttccaaggcggacaactatgatatccaaacgcgtacccttggaaagtaccttatggaaatcagtctgctagatcaccggttcatggcttaccgtcaaagtcacgtgtcagctgccgctatgtatctggcacgtctcattctggagcgtgggccttgggatgcaaccctggcttattacgccggatatgatgaagagcagatcgaccctgtcttccgtctaatgatcgactaccttcaccgcccggtctgccacgaggcgttcttcaagaaatatgccagcaagaagttcctcaaagcgtccatcttgacccgccaatgggccaagaagtatcaccacctgtacatcgacagctccctctcagaaccgtacaactatatcaaggatcacgaataa

SEQ ID NO: 2392 - protein, 482 aa, Aspergillus oryzae
MNENDENRPSTRLTRAKAAALSAGDVSTAATKKPLESKKAATSTATAGTTRKRAALGDVSNVTKGENGAAKEGKKPAGAKVGLTSKATMQAGGVAKLTRTNSSRTTALTNKTTNTKKPTEDKEKRSGPGSIKDSAQKRQKTTKDNALVEEPPRKKVEVEKKLTEKKLVAEEAPAKENVEAPVEPKTLQKPSQDLVEDLDTEDLDDPLMVAEYVVEIFEYMKDLELETLPNPHYIDHQPDLEWKMRGILVDWLIEVHTRFRLLPETLFLAVNIIDRFLSAEVVALDRLQLVGVAAMFIASKYEEVLSPHVANFSHVADETFTDKEILDAERHILATLEYNMSYPNPMNFLRRISKADNYDIQTRTLGKYLMEISLLDHRFMAYRQSHVSAAAMYLARLILERGPWDATLAYYAGYDEEQIDPVFRLMIDYLHRPVCHEAFFKKYASKKFLKASILTRQWAKKYHHLYIDSSLSEPYNYIKDHE

SEQ ID NO: 2393 - DNA, 1218 bp, Allium cepa
  CDS (1)..(1218)
atggcaggtgctgatgaaaatcatggagctgttaagcttgcaaattttagagaaactacaaacagaagagcattaaaggacattaagaactttgttggcgcgccttcttttccttgtgccgctaataagagacaattaaaagaagtcgtatgtggcaacaatgatagtgttatacctcgaagaccaataacaaggcaatttgcttctactttagcaagcaaatcacaacaaagtcatggggaaactagtaataaacacggtcagattactgggaatgagaagcacaatcccattattattgatgaggatgtgccaatggttgaagaatcagaagagatggaggagtgtgagctcgttgaggaaattacgatggaagatattgtgattgacagtgcacaagatattgatataggtgatgtaggaaatccactagctgttgtggattatgttgatgatatatacaactactacaggcgagttgaggctagcagttgtgttcatcctgattacatgtctaaccaatttgacattaacgacaaaatgagagctattcttattgactggctcgtagaggttcactacaagtttgagctgatggaggaaacgctgtaccttactgtgaacataatagatagatttctatcaaggcaagcagttgttaggaagaagcttcaattagtaggagttactgccatgcttcttgcttgcaaatatgaagaagtatcggttccagtagtcgatgacttagttaccatatccgatcgtgcatatacacgaaaagaagtgcttgacatggaaaaatcgatagtgaaaactttgcagttcaacacgtctgtgccgaccccgtttgtatttttgagaaggttccttaaggcagctggttctgaaaagaagctggagctgctttcatccttcattatagagcttagtcttgttgagtatcaaatgcttaagtttcaaccttcattgctggctgccgccgccatatacactgctcaatgcagtctcaaaggattcaagttttggacaaggacttgtgagcagtacaccatgtatactgaagatcagcttctggaatgctcgaagatgatggtgggatttcatagaaatgcaggatcaggaaaattaacgggggtgcatagaaaatacagcacttcaaaatttggttttgcagggaagtcgtatccagcacttttcttgttggataacagactttga

SEQ ID NO: 2394 - protein, 405 aa, Allium cepa
MAGADENHGAVKLANFRETTNRRALKDIKNFVGAPSFPCAANKRQLKEVVCGNNDSVIPRRPITRQFASTLASKSQQSHGETSNKHGQITGNEKHNPIIIDEDVPMVEESEEMEECELVEEITMEDIVIDSAQDIDIGDVGNPLAVVDYVDDIYNYYRRVEASSCVHPDYMSNQFDINDKMRAILIDWLVEVHYKFELMEETLYLTVNIIDRFLSRQAVVRKKLQLVGVTAMLLACKYEEVSVPVVDDLVTISDRAYTRKEVLDMEKSIVKTLQFNTSVPTPFVFLRRFLKAAGSEKKLELLSSFIIELSLVEYQMLKFQPSLLAAAAIYTAQCSLKGFKFWTRTCEQYTMYTEDQLLECSKMMVGFHRNAGSGKLTGVHRKYSTSKFGFAGKSYPALFLLDNRL

SEQ ID NO: 2395 - DNA, 1410 bp, Glycine max
  CDS (1)..(1410)
atggataaagtaaatagagtttgtgccaaagatgaagagcgtccactccgaatcaccagagcaagagctagagccttgagagggattactccctactcaagaccctccttaaaaaatgagcagaaaaacgtgcttcgagctaattccaaaagagcagcaagttctggaaacaaaacttttgcggttgttcctgctgttgtccagcaaaagggaagggcagtgctttcagatatatcaaacatgtgtgcaaaaccacatgataagtgtactaaggcatcaaaatttcaggccaaaggagtttgtacaaagaaaaacaccaagcttgcagcctcaagtgtttccactgacgtttcatcctcacatgacgatgttagagcaaagttagctgaagaattatccacaataaagatggttgaatcaaatgacaccttaagagaaggtgtaacagcagacacctcactttcaatgcaaaactctgtgaaatctgatgaactccggaactctccaaacaaagacatagatataatttgtgagaagctgggagcctcagactccctgactattgtggacattgattcagagttaaaggatcctcaactgtggagtttttatgcccctgacatatacagcaatattcgagtcacagagcttcaaaggaaaccattgaccaactacatggacaagttgcagaaagatattaatccaagcatgcgtggaattctggttgattggcttgtggaggtttctgaggaatacaagttggttccagacactctttacctgaccgtgaacctcattgatcggtatctctcaacaagactcattcagaagcaaaagctccagttgctcggtgttacttgcatgttgattgcatcaaaatatgaagagatgtgtgcacctcgagtggaggaattttgcttcatcacagataatacatacacaaaagaagaggtattgaaaatggagagagaagtactgaatcttgtgcattttcagttatctgtccccacaatcaaaacttttctcaggagattcatccaagcagcacaatcttcttacaaggctccttatgttgaactggaattcctggcaaattatttagcagagcttgctcttgttgaatgcagcttcttccagtttctaccttcccttatagctgcatctgctgtgttccttgccaaatggaccctgaatgagtcagaacatccatggaatccaactctggagcactatacaaaatacaaagcttcagacctcaaaactgttgttcttgcactgcaagatctgcaacttaataccaaaggatgcttcctgaatgctgtccgcgagaagtataagcaacagaagttcaattgtgtggcaaacttgtctccaaaatcggtgcagtcactcttccagaaccaagtgtaa

SEQ ID NO: 2396 - protein, 469 aa, Glycine max
MDKVNRVCAKDEERPLRITRARARALRGITPYSRPSLKNEQKNVLRANSKRAASSGNKTFAVVPAVVQQKGRAVLSDISNMCAKPHDKCTKASKFQAKGVCTKKNTKLAASSVSTDVSSSHDDVRAKLAEELSTIKMVESNDTLREGVTADTSLSMQNSVKSDELRNSPNKDIDIICEKLGASDSLTIVDIDSELKDPQLWSFYAPDIYSNIRVTELQRKPLTNYMDKLQKDINPSMRGILVDWLVEVSEEYKLVPDTLYLTVNLIDRYLSTRLIQKQKLQLLGVTCMLIASKYEEMCAPRVEEFCFITDNTYTKEEVLKMEREVLNLVHFQLSVPTIKTFLRRFIQAAQSSYKAPYVELEFLANYLAELALVECSFFQFLPSLIAASAVFLAKWTLNESEHPWNPTLEHYTKYKASDLKTVVLALQDLQLNTKGCFLNAVREKYKQQKFNCVANLSPKSVQSLFQNQV

SEQ ID NO: 2397 - DNA, 1275 bp, Zea mays
  CDS (1)..(1275)
atggagaatctgagatctcaaaactgccaccaaggtgttgccatggagggagtcaagtttgcgccggagaaggccaacaccaaccggagagccctcagcgacatcaagaacataataggaggcccacaccagcacttggcggtcagcaagagggctctgtcagaaaaaccagctgctgctgctgctgcaaatgctaaagatcaagctggctttgttggacaccgtccagtcaccaggaaattcgctgcaacattggcaacccaacctacagttgcccttctggacccaattggaagtgaaagactgaaaagaaacgctgatacggcatttcacacacctgcagatatggaaagcacaaaaatgacagatgacagtcccttgcctatggtgtcggagatggatgaaatgatgagtcctgaactgaaagagatcgagatggaagatattgaggaggcagcacctgatattgacagtggtgatgcaggaaattctctggctgtggctgactatgtagatgaaatttacagattttacaggaaaactgagggtgcaagctgcgtccctacaaattatatgtcaagccaaactgatataaatgagaagatgcgtggcattctaattgactggctcatagaggtacactacaaactagagctgttggaggagacccttttcctaaccgtgaacatcatagacagattcttggcacgtgaaaatgtggtgcggaagaagcttcagttagctggtgtaactgctatgttgctcgcgtgcaagtatgaagaagtgagcgtacctgtggtcgaggatctgatcttgatctgtgatcgtgcatacacaagggctgacattcttgagatggagaggaggatagtgaacacacttaatttcaatatgtcggtgccgactccatactgtttcatgagaaggtttctaaaggcagcacaatcagagaagaagctcgaactcctgtctttcttcatgatcgagttgagtcttgtcgaatatgagatgctccagttctgcccgtctatgctagcagccgctgccatctacaccgctcaatgcaccataaatgggttcaagtcctggaacaaatgctgtgaactgcacacaagatattcagaagaacatctaatggtttgctctaggatgatggttgaactgcaccaaagagcagctcatgggaaacttacaggggtccatagaaagtacaacacttctagatatagctatgctgcgaaatcggaacccgcaactttcttgctggatgcctga

SEQ ID NO: 2398 - protein, 424 aa, Zea mays
MENLRSQNCHQGVAMEGVKFAPEKANTNRRALSDIKNIIGGPHQHLAVSKRALSEKPAAAAAANAKDQAGFVGHRPVTRKFAATLATQPTVALLDPIGSERLKRNADTAFHTPADMESTKMTDDSPLPMVSEMDEMMSPELKEIEMEDIEEAAPDIDSGDAGNSLAVADYVDEIYRFYRKTEGASCVPTNYMSSQTDINEKMRGILIDWLIEVHYKLELLEETLFLTVNIIDRFLARENVVRKKLQLAGVTAMLLACKYEEVSVPVVEDLILICDRAYTRADILEMERRIVNTLNFNMSVPTPYCFMRRFLKAAQSEKKLELLSFFMIELSLVEYEMLQFCPSMLAAAAIYTAQCTINGFKSWNKCCELHTRYSEEHLMVCSRMMVELHQRAAHGKLTGVHRKYNTSRYSYAAKSEPATFLLDA

SEQ ID NO: 2399 - DNA, 1605 bp, Cryptococcus neoformans var
  CDS (1)..(1605)
atgcctagtggtatccctactcgccgcgtccgtctggtcgacgagaatgccccacctccccccggcgccgttgtcacccgtacgcgttctcgggctttggcctccaccacttctactgccaccaacgtgaaaccgaccaccacctctatccctatgatgaaacgacaacgctccactatctcatccgaaaacaagattgtcgacaagtctgatgtgaggcgtaatgctcttggtgaggtacggaatggcaagggcggagaaaaggagaaggagagtgggaagggaaaggtcgtggcaatcgaacgaaagccgttggcgacgactcaggcaaaggcgcaaagagtcacacgttcagcgtctgctcagccggtaatgggtgtcaaggatggagataagaagcgaaaggctgtcattaccagcaaaattccgtctcgttctcgatcgaccggtgctgaacctgctcaagtcgaagtgaaacccactatcaagactgaagaggagcctgttcgtaagcgtcggaaaacgtcgagccccgttgtagaagttggagaggatggaccaacagtggatggaaaggaattgctgttgtcaagtggaagcaaaaatgcgacagccttcaggtcacccaagattaaagccaaggatgacggatggacggatctggatgctgaggacgaaggggacccaacaatggtcagcgaatatgtcgttgaagcttttaagtacatgatggatatccaaggccaaacaatgcccgatcccgagtacatggacaaccaagctgaactccaatggaagatgcgtcaaatcctcatggattggatcatcgaagtccactccaaattccgactcctccccgaaaccctcttcatcgccaccaaccttgttgatcgcttcctctccaagcgcgtcatttccctcgtcaagttccagctagtcggtcttaccgccctctttatcgcatcaaaatatgaagaagtctgttgcccaggtgttgagcatttcctacatatgtcggacggaggatacaccgtcgaggaattgcttaaagcagagcgttacatgttgtccacgttgcaattcgacatgtcgtaccctaacccgctcaattttataaggcggatcagtaaagccgatgggtacgatatccaatcgaggacggttgcaaagtatcttgtcgagattagttgtgtcgaccatcggcttttgggttatacacctagtatgttggctgccgcgtccatgtggctcgcgagattatgtcttgagcgtggggaatggaacgcgaaccttgtgcactactcgacgtattccgaagatgagattcgtccttgtgcgcaggtcatgttggatcgtattctcgatcccgatttcgacgagtctacttcattctacaaaaagtatgcaagcaagaaacacatgaaggcgagtgtgtacgtacgcgaatgggcaactcagctgtggcctgcgtcggcggatgggagtgcagttgagaggggcacagagcttgaacttttaaagatgtttttggaggatgaagaggaagagaataacaaggggagtaagaggaggatgaaggcggttgatgaggaagaggagtattaa

SEQ ID NO: 2400 - protein, 534 aa, Cryptococcus neoformans var
MPSGIPTRRVRLVDENAPPPPGAVVTRTRSRALASTTSTATNVKPTTTSIPMMKRQRSTISSENKIVDKSDVRRNALGEVRNGKGGEKEKESGKGKVVAIERKPLATTQAKAQRVTRSASAQPVMGVKDGDKKRKAVITSKIPSRSRSTGAEPAQVEVKPTIKTEEEPVRKRRKTSSPVVEVGEDGPTVDGKELLLSSGSKNATAFRSPKIKAKDDGWTDLDAEDEGDPTMVSEYVVEAFKYMMDIQGQTMPDPEYMDNQAELQWKMRQILMDWIIEVHSKFRLLPETLFIATNLVDRFLSKRVISLVKFQLVGLTALFIASKYEEVCCPGVEHFLHMSDGGYTVEELLKAERYMLSTLQFDMSYPNPLNFIRRISKADGYDIQSRTVAKYLVEISCVDHRLLGYTPSMLAAASMWLARLCLERGEWNANLVHYSTYSEDEIRPCAQVMLDRILDPDFDESTSFYKKYASKKHMKASVYVREWATQLWPASADGSAVERGTELELLKMFLEDEEEENNKGSKRRMKAVDEEEEY

SEQ ID NO: 2401 - DNA, 1491 bp, Scutellaria baicalensis
  CDS (1)..(1491)
atggcgagttctgctggcgttaggaggccaacgacgtcgtctttggccaagcgccatgcttcttccgcgtcggataatgtcgggaaggtggcgtcgtccgcttccgcctccaagaaacgcccggcgcttgctaatgtcaccaaccagaggcatggaaccggttctgctaatgcgggtcgggcccctttgcccgaatcatccaaaattgcgccatgtacaaccaaaatcgtaagcatcaagaagggaccttcggcttccacaaattccggcttcccaggagctatcctgcccacgtcctcctctgtaaaacagaatattgttgcagttggaagatctacattcatcccaaaaagtgatgttgtgcttcccaagacacttgctgccccggtttcatgcagcatggatgtgtctccagataaatcagattcactctctgtttccatggatgaatccatgtccacatgtgattccttgaagagtcctgatgtcgaacatgtggactatattgatgtagctgcagttgattccattgagaggaaggcatcaaacatgctttgcatttctgaccatatggaaattgcagggaatctatgcaagagagatgctctggcatcattagaatcaggggacaagattgtagatgtcgatgagaatctagacgacccacagttatgtgcaaccattgcttgtgatatctacaaacacttgagagcatcagaggcaaagaaaaggccagctacaaacttcatggaaagagtccaaaaggatatcaatgcaagcatgcgcgctattctcattgattggcttgttgaggtagcggaggaatacaggctcgttcctgacacattgtatctaactgttaactatatagatcgttatctttctggaaatgtcatggacaggcaaaggttacaattgcttgggatagcctgcatgatgattgcatcaaaatatgaagagatttgtgcacctcaagtggaagagttttgctacataacagacaacacatactttaaggacgaggttttggaaatggaatctgctgttttgaattacctaaaatttgaaatgacagccccaacagcgaaatgtttcttaaggaggtttgttagggctgcacaaggtgttaatgagactccattactccagtttgagtgcttggctaactacataactgagctatctctcctagagtatagtatgctgtgttttgccccatcattgatagcagctgcatcaattttcttggccagatttattcttcttccttccaagaggccttggaatcatacattgagacattataccctctaccagccctatgatttacgtgattgtgtcttagcattacatgggttttgctgcaacagtcacaattctagtttacctgcaattcgggagaagtacagtcagcacaagtacaaatttgttgcaaaaaaatactgccctctatctatacctccagaatacttccacaatgtgagcagctag

SEQ ID NO: 2402 - protein, 496 aa, Scutellaria baicalensis
MASSAGVRRPTTSSLAKRHASSASDNVGKVASSASASKKRPALANVTNQRHGTGSANAGRAPLPESSKIAPCTTKIVSIKKGPSASTNSGFPGAILPTSSSVKQNIVAVGRSTFIPKSDVVLPKTLAAPVSCSMDVSPDKSDSLSVSMDESMSTCDSLKSPDVEHVDYIDVAAVDSIERKASNMLCISDHMEIAGNLCKRDALASLESGDKIVDVDENLDDPQLCATIACDIYKHLRASEAKKRPATNFMERVQKDINASMRAILIDWLVEVAEEYRLVPDTLYLTVNYIDRYLSGNVMDRQRLQLLGIACMMIASKYEEICAPQVEEFCYITDNTYFKDEVLEMESAVLNYLKFEMTAPTAKCFLRRFVRAAQGVNETPLLQFECLANYITELSLLEYSMLCFAPSLIAAASIFLARFILLPSKRPWNHTLRHYTLYQPYDLRDCVLALHGFCCNSHNSSLPAIREKYSQHKYKFVAKKYCPLSIPPEYFHNVSS

SEQ ID NO: 2403 - DNA, 1107 bp, Helobdella triserialis
  CDS (1)..(1107)
atggcattcgctcgttccgttgcagtttctaatttattgaatgccaaagacaaaaaaaatactggaaagattactcatcgaggagcattggggaacatttcaaatgcgccagtcagtaaggcaactgaaggaaagcagttgtccaagctgcctcccgttaagcatgaaaagtgtgaaaagattgaagaagttgaaaataaagctccaattatagttcaacaacaagaagaaataataaaagaaattatattgggacccatagatgatattgacaaagatgacaaggagaatcctcagctaatgagtgaatacgtaaaagacatatacggctatatgagaattcttgaaagcagatatataatcaggcccgactacttgtcagaacaaacagaagtaaatggtagaatgagagccatattagttgactggcttgttcaggttcatttacgattccatttgctacaagaaacgttgttcttgtcagttgccattctagacagatatctacagaaaaatcaagtggcgaagtcaaagttacaactggttggagttacttctgtgtggattgcttcaaagtatgaggagatgcatgccccagaggtggctgactttgtctacatcaccgacaatgcgtacacaaaatcagaaatgagacagatggagtgtaccatcatgaaggcacttgacttccaacttggcagacctctccctattcatttccttcgcagattctcaaaagctggagaggttgaaggagaaacgcataacttggcaaaatattttatggagatgattctggttgaatatgacatggtgcattatctcccatcgaaaattgctgcagctgctttgttgctttcgaagctgatacttgaagggacacaatggacagcatcgctggttcattacagtacatacacagaagccgaacttttacctcttgtgtacaagcttgctagttttgtcataaaaaccaattctgccacaaagttggtggcggtcaagaacaaatttgccagtagcaagtttctccgcataagtaaatcagaaaagttgagcagtcaggttgtggcctcattggccgataagagcggtaatcattcataa

SEQ ID NO: 2404 - protein, 368 aa, Helobdella triserialis
MAFARSVAVSNLLNAKDKKNTGKITHRGALGNISNAPVSKATEGKQLSKLPPVKHEKCEKIEEVENKAPIIVQQQEEIIKEIILGPIDDIDKDDKENPQLMSEYVKDIYGYMRILESRYIIRPDYLSEQTEVNGRMRAILVDWLVQVHLRFHLLQETLFLSVAILDRYLQKNQVAKSKLQLVGVTSVWIASKYEEMHAPEVADFVYITDNAYTKSEMRQMECTIMKALDFQLGRPLPIHFLRRFSKAGEVEGETHNLAKYFMEMILVEYDMVHYLPSKIAAAALLLSKLILEGTQWTASLVHYSTYTEAELLPLVYKLASFVIKTNSATKLVAVKNKFASSKFLRISKSEKLSSQVVASLADKSGNHS

SEQ ID NO: 2405 - DNA, 1815 bp, Ustilago maydis
  CDS (1)..(1815)
atggctcaacctgccgtcagacaacctaccgtgacaaggtcacgcatcagccgaccaggaggcatcccagcttctcgtagcggcgaccgcatccatctcacagaagctgcctccacaagtcatctggcaaaagccaagtcaacaaaattggtcggcccctctaccgcaggtaaactccgagccgattccagatccatgccacaacgcgctgccctttctgacgtcagtaatcgtgctggcgtcgccagagccaatgcactagcagatggcgccgtcaagctggcgcccggccacaatggcctgcgctctcaacacacaaaaagcatgacccgtctccgcgacgcccgttcgcgatccacgtccgagcagagactctctggcccaacacgctctgtctcggaacaacgtgactgtgcaccagccgctgccgagtctatgcatgtggaggcgtcacaactcctcccacccttccagagctccgcttcagtcaaggtgggcatcagcgacgaagcaggaagcagcaggctgcacgaagacgcagacatccgcgacctcgccggctcgcagcacagtgaccatgtcgaagaggacgagatgtcagatgtcgcctctacttcgagcagcgacgacgataccgcagaggacatcggcgtagacaaggccaactggctcgattcggaacgactcgatgccggtgcaagacccgagagcgtcacctctgccgaggacggcgacatgctcgacttcaacattgatccagagggtttggtctcgttacatccggagctggaggaggccgcgcgacgcaaggtggccttgatcaagtctcgctaccaggaggaagtcattcagcctcgtgcggcgcgcgcgcaagcacaacatgcagaagcagtcgccgccggtcagctctcggctgagctggctgcgcacgaagacgagctgatcgtcatggggctcgatcccgaggaggtacgcgacacgagtatggtggccgagtactcgaatgagatctttagctacatggctcggtgcgagcgcgagaccatggccaacccgaattacatggagtttcagagcgagattcactggcacatgcgtgctacgctcgtcgactggctcttgcaggtgcacatgcgctaccacatgctgccagagacgttgtggattgccatcaatgtggtcgaccgcttcctgagcgtgcgcgtggtcagcctggccaagctgcagctcgtcggtgtcacggccatgtttattgcagcaaagtacgaagagatcctggcgcctagcgtcaaggagtttgtctacatgaccgagggtggctactcgcaagaggagatcctcaagggcgagcgcatcatcctctcgacgttgggctttaacatttcgtcctactgctcaccttactcttgggtgcgaaagatctccaaggcggacgactacgacattcgcacccgtaccctgtccaagttcctgatggagctggcgctgctggatcatcgcttcctgcgtgctcggcccagtcttgtggccgctgtgggcatgtttttggccaaaaagatgctgggaggcgagtgggatgacgcctttgtctactactctgactttaccgaagagcagctggtccccggcgcgaatctattactcgagcgtttgctggaccaaggctttgaggagcagtttgtctaccgcaagtactcgaacaaaaagtttctccgggccagcgtctttgcgcgtgattgggccttccagaaccacagcgcactactcgccgctgctgcagcagcggcagggtcgactcaagcaggtcagccttga

SEQ ID NO: 2406 - protein, 604 aa, Ustilago maydis
MAQPAVRQPTVTRSRISRPGGIPASRSGDRIHLTEAASTSHLAKAKSTKLVGPSTAGKLRADSRSMPQRAALSDVSNRAGVARANALADGAVKLAPGHNGLRSQHTKSMTRLRDARSRSTSEQRLSGPTRSVSEQRDCAPAAAESMHVEASQLLPPFQSSASVKVGISDEAGSSRLHEDADIRDLAGSQHSDHVEEDEMSDVASTSSSDDDTAEDIGVDKANWLDSERLDAGARPESVTSAEDGDMLDFNIDPEGLVSLHPELEEAARRKVALIKSRYQEEVIQPRAARAQAQHAEAVAAGQLSAELAAHEDELIVMGLDPEEVRDTSMVAEYSNEIFSYMARCERETMANPNYMEFQSEIHWHMRATLVDWLLQVHMRYHMLPETLWIAINVVDRFLSVRVVSLAKLQLVGVTAMFIAAKYEEILAPSVKEFVYMTEGGYSQEEILKGERIILSTLGFNISSYCSPYSWVRKISKADDYDIRTRTLSKFLMELALLDHRFLRARPSLVAAVGMFLAKKMLGGEWDDAFVYYSDFTEEQLVPGANLLLERLLDQGFEEQFVYRKYSNKKFLRASVFARDWAFQNHSALLAAAAAAAGSTQAGQP

SEQ ID NO: 2407 - DNA, 1962 bp, Neurospora crassa
  CDS (1)..(1962)
atggacgcaaagccccagcgtcctctgtgggctcctcccgttcgatacggtgacgagaatatcccacctgccgatccgactcatcaaagtaagaggtcggacagcaagatcaaggcaatgatggcggttaacggcaccttgaacgcaccacccaagagggctgcctgcttcgacaagagcaacacctcgaagccactagccgacggcgggaacaaggacatgctgaagaacagggtgaaaccgatggtcacaaccagcagcactcgagacctacggtcggatggcagggagaataaccgctcggcagcggaggagcattatatgcggccaacggcgacctcgaaggcagcatcacacggccaccaaaagtattcttcgacggctcccctatcatcccatgccgccagcggggcatacggtggcattcgctcacacaatgccatcgccaaactctccgcaccggtcaagaaaacgaccaacgtataccgcgacaacaaagtcaaggaggagagcacatctcatgcgcccacttcctcgtcagttgatgatcttgttgcgatggtcgacaagcatattaaggatccacgccactacaaaagtcaaccgcaactcaagtcggaccagcagcataccctacaccggaatcagagcaaatacgtgcccaattacgagaacctgaatgacgtggatgatcccgacgattcaaatgccgattacgccgagtcttacgaggacgcggtcgagcaattatccagagatctcgatattcctgcgaacactgatcctgcagctatcgtccacgcaaatcacatgtcaatcgcccaagccagttatgactcgatgcctcaaggcgcaccactcgcaccctcgaaaccagtcagggcccttccactgccccccaacgtctctgatcccgaagagtattctgaagatgacgacgatcaggacctctacgacgaccaaggatataccaccgcccattcttatcgatctcattgcgacaataccacaggaggacctcccacattagtcgcgcccaaatttaccgcggacatccagaaggaacttgacattgcgaaggcatgggttttggagcatcaaacggaggaagaggttgaggaagagaattgggatgtgagcatggtagctgagtacggcgacgagatctttgagtacttgcgcgagcttgaggaacggatgcttccgaatcctcactacatggacatccaaaccgagatccggtggtccatgcgatccgtcctcatggactggctggtccaggttcaccatcgcttcagtcttctcccggagaccctctttctcaccgtgaactacatcgaccgctttctttcagttaaggttgtttcgctgggcaagcttcaactggttggcgcgactgccattttcgtcgcagccaagtacgaggagatcaactgcccttccattcaggaacttgtgtacatggtggatcagggatactctgttgaggagattctaaaggcagagaagttcatgctcaccatgctgaacttcgaacttggttggccaggcccgatgagcttccttcggcgcattagcaaagccgatgactacgatttggaaactcgaactcttgcaaagtacttgctcgaagtgactatcatggatgagcgttttgtgggctgccctgcgagttatcttgctgccggtgcccattgcctctcccgctttttcctgcaaagagggccatggacacatgcccatgttcacttttccggctatacgctggctcaattgaggccactcatcattagcatcctcgactgctgccaggaaccacgcaaacatcacggcgcggtatacgacaagtactctcatcagaggttcaagtccgcgtctactttcgtggaaggcaaaattgcgaacggtttcgtgctgccgattcgaacgaacgcttctatcagcgacagtgcgcaatcatag

SEQ ID NO: 2408 - protein, 653 aa, Neurospora crassa
MDAKPQRPLWAPPVRYGDENIPPADPTHQSKRSDSKIKAMMAVNGTLNAPPKRAACFDKSNTSKPLADGGNKDMLKNRVKPMVTTSSTRDLRSDGRENNRSAAEEHYMRPTATSKAASHGHQKYSSTAPLSSHAASGAYGGIRSHNAIAKLSAPVKKTTNVYRDNKVKEESTSHAPTSSSVDDLVAMVDKHIKDPRHYKSQPQLKSDQQHTLHRNQSKYVPNYENLNDVDDPDDSNADYAESYEDAVEQLSRDLDIPANTDPAAIVHANHMSIAQASYDSMPQGAPLAPSKPVRALPLPPNVSDPEEYSEDDDDQDLYDDQGYTTAHSYRSHCDNTTGGPPTLVAPKFTADIQKELDIAKAWVLEHQTEEEVEEENWDVSMVAEYGDEIFEYLRELEERMLPNPHYMDIQTEIRWSMRSVLMDWLVQVHHRFSLLPETLFLTVNYIDRFLSVKVVSLGKLQLVGATAIFVAAKYEEINCPSIQELVYMVDQGYSVEEILKAEKFMLTMLNFELGWPGPMSFLRRISKADDYDLETRTLAKYLLEVTIMDERFVGCPASYLAAGAHCLSRFFLQRGPWTHAHVHFSGYTLAQLRPLIISILDCCQEPRKHHGAVYDKYSHQRFKSASTFVEGKIANGFVLPIRTNASISDSAQS

SEQ ID NO: 2409 - DNA, 1380 bp, Pneumocystis carinii
  CDS (1)..(1380)
atgaacgcagcgaggcgtgtaacacgtcagacggcaacgtttaatcttaatgatgagaacaaattgcatggacaaatatctcgggtgaagcaagtatctacacaaggattagaaggggtaaataagccatggacggcggcgacgcgaaagagagcagcattaggagatgtaagcaatgtgcataataaggagaatcagacggcgaaaacgaaaacgcagccgttatcaaccaaagcacgcgtggtgacgaaaaccggagttcaaagtcatcaaagcaaagaatccgttcatacggtaccaacgggagaattgcgtggtgaagaaacaacacgaaaaagacggacatcaaaggttttaacggagcaaaaagtgatcattgaggtggaacaaacacaagcaagtaaaaaagtgagaaccgatggccttttaaacggatcggtacaagagcatccagcatcacaagattgggatgatttagatgcggatgatgctcatgatccattgatggtatcggaatacgttgaagaaatcatgggttacatgagggaattagaggtattaacacttcctttaccagattatatggatcgacagaaagaacttcaatggaaaatgcgaggaatcttggtagattggttaattgaggttcatgcgaaatttcgtcttcttccagaaacgttatttctttctgtcaatattattgatcgatttttatccctacgagtatgttcgcttcctaagcttcaattagtagggattacagcactttttatcgcagcaaaatatgaagaagtgatgtgtccatcgatacaaaattttatgtacatggcagatggtggatatacgaatgaagaaattctaaaagcagaacaatacgttttacaagttcttggatatgatatgtcatatccaaatcccattaattttctaagaagagtatcaaaggcagataattatgatattcagacacgtacagtggcaaaatatcttatggaaattagtcttcttgatcatcgatttttgccttttgtgccatctaatattgcagcttcgggcatttatttggctagaattatggttactggtggcaattggaatgctaatttaatacattattcgggatataaagaatcagatcttgttccatgttctaaaatgatgctggattatctttcacgatcagttataaaacatgaagcattttttaaaaaatatgccagcaaaaaattcatgaaagctagtttatttgttcgcgattgggttaaaaaacattacgatcttgaggcaaacgtgcgattaaacactatctctttcgattacgataaccatgaatcaaatgaaatacatcaggacttagaagaggaagaaggatccctatag

SEQ ID NO: 2410 - protein, 459 aa, Pneumocystis carinii
MNAARRVTRQTATFNLNDENKLHGQISRVKQVSTQGLEGVNKPWTAATRKRAALGDVSNVHNKENQTAKTKTQPLSTKARVVTKTGVQSHQSKESVHTVPTGELRGEETTRKRRTSKVLTEQKVIIEVEQTQASKKVRTDGLLNGSVQEHPASQDWDDLDADDAHDPLMVSEYVEEIMGYMRELEVLTLPLPDYMDRQKELQWKMRGILVDWLIEVHAKFRLLPETLFLSVNIIDRFLSLRVCSLPKLQLVGITALFIAAKYEEVMCPSIQNFMYMADGGYTNEEILKAEQYVLQVLGYDMSYPNPINFLRRVSKADNYDIQTRTVAKYLMEISLLDHRFLPFVPSNIAASGIYLARIMVTGGNWNANLIHYSGYKESDLVPCSKMMLDYLSRSVIKHEAFFKKYASKKFMKASLFVRDWVKKHYDLEANVRLNTISFDYDNHESNEIHQDLEEEEGSL

SEQ ID NO: 2411 - DNA, 1477 bp, Arabidopsis thaliana
  CDS (149)..(1477)
aaaataattccgcgtttttcattttccgttttgtttctcgtcgtctccttcaagatctctctctctcactctcgcagaagagaaaccctaaatctcaccggaaaacgagaacgccgagcctgagatattttcgattgcttcatcaacaatgtcttcttcgtcgagaaatctatctcaggagaatccgattcctcgtccgaacttagccaagactcgaacctcactccgcgatgttggaaaccgtcgtgctcccctcggcgacatcacaaatcagaagaatggatctagaaatccttcaccgtcgtctactctggtgaattgttcaaataagatcggccaatctaagaaagcaccaaaacctgctttatctcgtaattggaatttgggaattctcgattccggtttacctcccaagccaaatgcgaaatcaaacataatcgttccttacgaagacaccgaattgctccaaagcgatgatagtcttctatgttcttcacctgcattatccttggatgcctctcctactcaatctgacccgtcaatttccactcatgactctttgacgaaccacgttgtagattacatggtcgagagcactactgatgatggaaatgatgatgatgatgatgagattgttaacattgatagtgacttgatggatccacagctttgtgcttcttttgcttgtgatatctacgagcatttgcgtgtatctgaggtgaacaaaagaccggctctagattacatggaaagaactcagtcaagcatcaatgctagcatgcgttctatactgattgactggcttgtggaggttgctgaagagtataggctttcgcccgagacgttgtatttggcagtaaactacgttgatcggtatcttacaggaaatgcaatcaacaagcaaaatctgcagctacttggtgttacctgcatgatgatagcagcaaaatatgaagaagtgtgtgtgccgcaagtggaggatttctgttacatcactgataacacatacttaagaaatgagcttttggagatggagtcttctgttctgaactacttgaagttcgaattaacaactccaacagcaaaatgtttcttgaggcgctttcttcgtgctgctcaaggcagaaaggaggtaccatcactgctgtctgagtgtctggcctgctatctcaccgaattatcgctgttagattacgctatgcttcgatacgctccatcacttgttgcagcctctgcagttttcttggcacaatacactctacacccttcaagaaaaccatggaatgctacgctagagcattacacatcgtacagggctaaacatatggaagcatgcgttaagaatcttcttcagctgtgtaatgagaaactctcatctgatgtggttgcaatcagaaagaagtacagtcaacacaaatacaagtttgcagcaaagaagctttgtcccacgtcactaccgcaagagcttttcctctga

SEQ ID NO: 2412 - protein, 442 aa, Arabidopsis thaliana
MSSSSRNLSQENPIPRPNLAKTRTSLRDVGNRRAPLGDITNQKNGSRNPSPSSTLVNCSNKIGQSKKAPKPALSRNWNLGILDSGLPPKPNAKSNIIVPYEDTELLQSDDSLLCSSPALSLDASPTQSDPSISTHDSLTNHVVDYMVESTTDDGNDDDDDEIVNIDSDLMDPQLCASFACDIYEHLRVSEVNKRPALDYMERTQSSINASMRSILIDWLVEVAEEYRLSPETLYLAVNYVDRYLTGNAINKQNLQLLGVTCMMIAAKYEEVCVPQVEDFCYITDNTYLRNELLEMESSVLNYLKFELTTPTAKCFLRRFLRAAQGRKEVPSLLSECLACYLTELSLLDYAMLRYAPSLVAASAVFLAQYTLHPSRKPWNATLEHYTSYRAKHMEACVKNLLQLCNEKLSSDVVAIRKKYSQHKYKFAAKKLCPTSLPQELFL

SEQ ID NO: 2413 - DNA, 1335 bp, Arabidopsis thaliana
  CDS (1)..(1335)
atgcatagagcttcttctaagcacactaatgcgaagaaagaagcaatctctacttcgaaaattcgagataataatgtgagagtcactagatcaagagctaaggccttaggagtgtcgaattctccatcaaaacccgcttttaaacatgaaacgaagcgtgttgctagaccgagtaataaacgaatggcatcggataatatcacagtttgtaatcagaaaagacgagcggtgctcaaggatgtgactaacactttggcagaaagtataatttctacagaaggcaatgttaaggtagcttgcaagcgaggtggtaaagaaactaagcaaatagaagaagatggtttggtagatgtggatggcgaaaaatctaaactagcagaagatttgtcaaagattagaatggttgaatctttagatgcatctgcttcaaagcaaaaattagtggattgtgcagaagaagacagatctgatgtcacagattgtgttcagattgtagatatagattcaggtgtccaagatcctcagttttgtagcttatatgctgcaagtatatatgacagcattaatgttgcagagcttgaacaaagaccttcaactagctatatggtgcaagtgcagcgagatatcgatccaacgatgcgcggaattctgattgattggctcgtggaggtctctgaagagtacaagttggtttcagatacactttaccttaccgtgaatctaattgatcggttcatgtctcataattacattgaaaagcagaagctccagctacttggtatcacttgcatgttaatagcctccaaatacgaagagattagtgcaccgcggttggaggagttttgcttcattacagacaatacatacacaagactagaagtactaagtatggagattaaagttttaaactctcttcattttcggttatcagttcccaccaccaaaacgtttctcaggcggttcattcgcgccgctcaagcgtctgataaggttcctctcattgaaatggagtacttagccaactatttcgcggaactaactctcacagaatatactttcctaaggttccttccatccctaattgccgcttcagcggttttcttagcaagatggacactcgaccaatctaaccatccttggaaccaaactctacaacactatacaagatatgaaacatccgctctaaaaaacacggtacttgcaatggaggagttgcagctcaacaccagtggaagcactcttatcgctatacacaccaaatacaaccaacaaaagtttaaaagagtggcaacattaacatctcctgaacgtgtgaacacactcttctcaagatga

SEQ ID NO: 2414 - protein, 444 aa, Arabidopsis thaliana
MHRASSKHTNAKKEAISTSKIRDNNVRVTRSRAKALGVSNSPSKPAFKHETKRVARPSNKRMASDNITVCNQKRRAVLKDVTNTLAESIISTEGNVKVACKRGGKETKQIEEDGLVDVDGEKSKLAEDLSKIRMVESLDASASKQKLVDCAEEDRSDVTDCVQIVDIDSGVQDPQFCSLYAASIYDSINVAELEQRPSTSYMVQVQRDIDPTMRGILIDWLVEVSEEYKLVSDTLYLTVNLIDRFMSHNYIEKQKLQLLGITCMLIASKYEEISAPRLEEFCFITDNTYTRLEVLSMEIKVLNSLHFRLSVPTTKTFLRRFIRAAQASDKVPLIEMEYLANYFAELTLTEYTFLRFLPSLIAASAVFLARWTLDQSNHPWNQTLQHYTRYETSALKNTVLAMEELQLNTSGSTLIAIHTKYNQQKFKRVATLTSPERVNTLFSR

SEQ ID NO: 2415 - DNA, 1272 bp, Oryza sativa subsp
  CDS (1)..(1272)
atggatagggcgagcgagaaccggaggctggcggcggtggggaagcccgtgccggggatcggagagatggggaaccggaggccgctcagggacatcaacaacctcgtcggggcgccgccgcacccgtccgcgatcgccaagaagccgatgctagagaagagtgggaaggaagagcagaagcctgcattggtggtgagccaccggcctatgacgaggaatttcgcggcctccttgacgcgaaaagaacagcttgaccatcaggtttccgtggctgatgcagcggtcgtctgcactgatccacagaagaaccccatccccgatggcacagttgacgacgatgtggaatcgtgcgaatcgaacgactatattgccgtggatgaatgcaatgatactgatgaggatgagtccatgatggacattgacagtgccgactcagggaatccgcttgcagcaaccgagtacgtcgaagagttgtacaagttctatagagaaaatgaggaaatgagttgtgtgcagcctgattacatgtccagtcaaggagacataaatgaaaagatgagagcaattctgattgattggctcattgaggtccatcacaaatttgagctgatggatgagactctctttcttactgttaacatagtagacagattcttggaaaaacaagttgtgccaaggaagaagttgcagctagttggagtgacagctatgctccttgcttgcaaatatgaggaagtcgcagtccctgtcgtcgaggatctagtgctaatttctgaccgggcttatacaaaaggacaaattctggaaatggaaaagttgatcctaaacacactccagttcaacatgtctgtaccaacaccttacgtttttatgagacggtttctgaaggcagctcagtctgacaagcagctacagctactttcctttttcattctggagctctccctggtggaataccaaatgctcaagtaccgaccttcgcttcttgctgctgctgcagtttacacagcacaatgtgctctcactcgttgccagcagtggacaaagacctgcgaactacatagtagatataccggagagcagcttcttgagtgttctaggatgatggtagatttccaccagaaggccggagcaggcaagctcaccggcgtgcaccggaaatacagtacgttcaagtttgggtgtgcagccaaaacggagcctgctctcttcttgcttgagtcaggagcaggaggttacaaccttcagaagcacctacagcaagcatgttga

SEQ ID NO: 2416 - protein, 423 aa, Oryza sativa subsp
MDRASENRRLAAVGKPVPGIGEMGNRRPLRDINNLVGAPPHPSAIAKKPMLEKSGKEEQKPALVVSHRPMTRNFAASLTRKEQLDHQVSVADAAVVCTDPQKNPIPDGTVDDDVESCESNDYIAVDECNDTDEDESMMDIDSADSGNPLAATEYVEELYKFYRENEEMSCVQPDYMSSQGDINEKMRAILIDWLIEVHHKFELMDETLFLTVNIVDRFLEKQVVPRKKLQLVGVTAMLLACKYEEVAVPVVEDLVLISDRAYTKGQILEMEKLILNTLQFNMSVPTPYVFMRRFLKAAQSDKQLQLLSFFILELSLVEYQMLKYRPSLLAAAAVYTAQCALTRCQQWTKTCELHSRYTGEQLLECSRMMVDFHQKAGAGKLTGVHRKYSTFKFGCAAKTEPALFLLESGAGGYNLQKHLQQAC

SEQ ID NO: 2417 - DNA, 1593 bp, Drosophila melanogaster
  CDS (1)..(1593)
atggtgggcacaacactgaaaatgcgtggcgatgagaacgcttcggagaacttcaagcaagtgcaattgaagaaattgacggttccttccatggaggcaacaacaaaacgcgcggccttgggcgatttgcagaatcgcggcataagtcgtcccatcgcagcgaaggatgcggcacagaaagactccaaggatctcaagctcacagacgccctgcgcaatgccaaagctcgggtggacagccactggaagaaacagccactgggcagcaccaatggcaatggcaatggcgccgttccgcccaaggtcaacgaggggggcgtgtcggcgtttttgcgttcgaattcggtgcgcaatcgcgttccgaccaagaccactgtagaacccactaaagttacagtcaagtccagttcttccgagaacgtgaacgagcccaccttaaagcgcgaggacagcaatctgtcgaagaagtcgctgaccaaactgcgtgccgctttggccaaacccgtgatgggagtttcaggaattcgacgggaaccagtagctgtttcccgcaaagaggcagagaccaagaaggaactgccagaaaccaagaaggactcactggaagtgaaaaaggatgcgaccaggatgccccttattaggggcaacagtgcagtcactacgaccacatctacgatgcccaccaccatgtccctttccagcaagcgcttggctggaatcgaggacattgatgccaatgacaaggagaacctggtactggtctccgaatatgtaaacgacatctacgactacttgtatcaggtggagctggagcagcccattcacaaggatcacctggccggacagaaggaggtgtcccacaagatgcgagccgtgctgatcgattggatcaacgaagtccacctgcagttccatctggctgcagagaccttccagctggcggtggctatcattgatcgctacctgcaggtggtcaaggacaccaaacgcacgtacttgcaattggtgggagtgacagcactcttcatagccaccaagtacgaggagctgttcccgccggcaatcggagatttcgtcttcatcacggacgacacctacactgcccggcagatccgacagatggagctgcaaatcttcaaggccatcgactgtaatctgtcgcgtccgctgccgattcacttccttcgacgctactcgaaggctgctggcgccgaggacgagcaccatacgatgtccaagtacttcatcgagttagcttccgtggactacgaaatggccacttacaggccatcggagattgcagctgcctcactgttcctgtcgctgcacttgctcaatggaaaccaccgggccggtacaggattcaacgaccgtcactggacgcccactctgaccttctactcgcgatactcggccgcgcacttgcgtccgattacccggctgatcgcgaaactggcccgggacgctcctcaggccaagctgaaggccatctacaacaagtaccagggcagcaagttccagaagatcgcgctgcgaacggagctgaccggtgcgctgatggactcgattgtgggccagagccagaggaaatag

SEQ ID NO: 2418 - protein, 530 aa, Drosophila melanogaster
MVGTTLKMRGDENASENFKQVQLKKLTVPSMEATTKRAALGDLQNRGISRPIAAKDAAQKDSKDLKLTDALRNAKARVDSHWKKQPLGSTNGNGNGAVPPKVNEGGVSAFLRSNSVRNRVPTKTTVEPTKVTVKSSSSENVNEPTLKREDSNLSKKSLTKLRAALAKPVMGVSGIRREPVAVSRKEAETKKELPETKKDSLEVKKDATRMPLIRGNSAVTTTTSTMPTTMSLSSKRLAGIEDIDANDKENLVLVSEYVNDIYDYLYQVELEQPIHKDHLAGQKEVSHKMRAVLIDWINEVHLQFHLAAETFQLAVAIIDRYLQVVKDTKRTYLQLVGVTALFIATKYEELFPPAIGDFVFITDDTYTARQIRQMELQIFKAIDCNLSRPLPIHFLRRYSKAAGAEDEHHTMSKYFIELASVDYEMATYRPSEIAAASLFLSLHLLNGNHRAGTGFNDRHWTPTLTFYSRYSAAHLRPITRLIAKLARDAPQAKLKAIYNKYQGSKFQKIALRTELTGALMDSIVGQSQRK

SEQ ID NO: 2419 - DNA, 1227 bp, Patella vulgata
  CDS (1)..(1227)
atgactacagttacacgctcttcatcggctaatcttggtgctagtcaaaagttggctgtgaagaaaggtgatgcaatgatgtcgagtaaaggtatttccaaccgaagcaatcggtctgctttaggagacataggaaataaagtttctaatatgactattgacccaacgaaaaaagcattaggcctacctgtaatcaaaaaggagataattcagaaatccaagtttacaagaagtaagactaccgtttcggaatcggatatcttgttacaggagaaagagtctgcctgttgtagtagagcttataccatctttaaagatgccatcgaaccaattgtgtcgactgttgatcttatggacattagtgaagacaaaccagacgccttctccaaagttttattaacagttgaagatattgacgccaacgacaaagataacccccaacttgtcagtgactatgtcaatgatatttaccattacatgagacatttagaggaaacgtttgccgtaaaagctaactttcttgaaggacaagaagtaactggtaaaatgagatcaatcttgattgattggttatgccaagttcatcacagattccatctattacaagaaactttatatttaacggtttctataatagacaggtttttgcaggttcatccgatttctagaaataagttgcagttagttggggttacctcaatgctgcttgcttcaaaatatgaagaaatgtacgcccccgaagtggcggattttgtgtacataacggacaatgcttataccaaagccgatattaggactatggaacaaacaatattaaaaacactagattttagttttggaaagccattgtgtttacattttttacgaaggaattctaaagctggtcaggttgatgcaaccaaacatacacttgccaagtatttaatggaacttaccattatagagtatgatatggtgcattgtaatccatctattatagctgctgcagctttatgtttatctatgaaggtgctagatgattcacaatggtctgaaaccttagctcattacagtaactactcggaaaaagagatttatccagtaatgcagaaattagctcagttggtggttaaagcagaaactagtaaattaacggctgtaaagataaaatattccagttcaaggtttatgaaaatcagttccattccagaattgaaatctaatgctataacggatctcgtattatag

SEQ ID NO: 2420 - protein, 408 aa, Patella vulgata
MTTVTRSSSANLGASQKLAVKKGDAMMSSKGISNRSNRSALGDIGNKVSNMTIDPTKKALGLPVIKKEIIQKSKFTRSKTTVSESDILLQEKESACCSRAYTIFKDAIEPIVSTVDLMDISEDKPDAFSKVLLTVEDIDANDKDNPQLVSDYVNDIYHYMRHLEETFAVKANFLEGQEVTGKMRSILIDWLCQVHHRFHLLQETLYLTVSIIDRFLQVHPISRNKLQLVGVTSMLLASKYEEMYAPEVADFVYITDNAYTKADIRTMEQTILKTLDFSFGKPLCLHFLRRNSKAGQVDATKHTLAKYLMELTIIEYDMVHCNPSIIAAAALCLSMKVLDDSQWSETLAHYSNYSEKEIYPVMQKLAQLVVKAETSKLTAVKIKYSSSRFMKISSIPELKSNAITDLVL

SEQ ID NO: 2421 - DNA, 1479 bp, Candida albicans
  CDS (1)..(1479): transl_table=12
atgccacaagtcactaaaactaataatgaaaatgagtttagacttactagatcaaaagtacagcatcaagagtcgataagtaccatcaaaaatacgaccatatccaattctcagcataaacaacaaacacaacaacaaatttcatcaccacctcaagtctctgtaacatcatctgaaggagtttcacatgtcaatacacgtcaatatttgggtgatgtttcaaatcaatacataacaaatgctaaaccaacaaataaaagaaaaccattgggtggagacaatgcccctctacaaaaacaacagcatagaccatctagaccaatacccattgccagtgataacaacaataatggtagtaccagtagcagtagcaacagtagcaacaacaataacaacgacgcaaatagactagcatctttggcagttccatctcgattaccccaaaaacgacaagctactgaatcgtcgacaaatttagtagagaaattaagagtaccacaaccagaagtaggggaaagaagtcagtcataccataagaaatcacgtttaattgattatgaatggcaggatttggatgaagaagataatgacgaccaattaatggttagtgaatatgttaacgaaatattttcgtactattacgaattagaaacacgaatgttacctgatccgcaatatcttttcaaacaaacattgttaaaaccaagaatgagatcgatattggttgattggcttgttgaaatgcatttaaaattcaagttattacctgaatcactttttttggcagtcaatgtaatggatagattcatgtctgttgaagtggttcaaatagataaattacaattattggctacagcagctttatttactgctgccaaaaatgaagaagtattttctcccctggttaaaaattatgcatatttcactgatggttcatatactccagaagaagtggtacaagcagaaaaatacatgcttaccattcttaactttgatttgaattaccccaatccaatgaatttcttgagaagaatttctaaagctgatgattatgatgtccaatcaagaacgctaggaaaatatcttttggaaatcactatagttgattacaaatttattggtatgagaccatctttatgttgtgccctggccatgtatttagcaagactaatattgggcaaattgccagtttggaatgggaatttgattcattatagtggaggttatagaatcagtgatatgagagaatgtatcgaattaatgtttcaatatcttattgctcctatagaacatgatgaatttttcaaaaaatatgccatgagaaaatttatgagagcaagtactctttgtcgaaattgggctaaaaaattccaagcatcaggaagagatttgtttgatgaacgattatcgacccataggctaacattagaagatgatgacgaagaagaagaaatagtggtagcagaagcagaagagtaa

SEQ ID NO: 2422 - protein, 492 aa, Candida albicans
MPQVTKTNNENEFRLTRSKVQHQESISTIKNTTISNSQHKQQTQQQISSPPQVSVTSSEGVSHVNTRQYLGDVSNQYITNAKPTNKRKPLGGDNAPLQKQQHRPSRPIPIASDNNNNGSTSSSSNSSNNNNNDANRLASLAVPSRLPQKRQATESSTNLVEKLRVPQPEVGERSQSYHKKSRLIDYEWQDLDEEDNDDQLMVSEYVNEIFSYYYELETRMLPDPQYLFKQTLLKPRMRSILVDWLVEMHLKFKLLPESLFLAVNVMDRFMSVEVVQIDKLQLLATAALFTAAKNEEVFSPSVKNYAYFTDGSYTPEEVVQAEKYMLTILNFDLNYPNPMNFLRRISKADDYDVQSRTLGKYLLEITIVDYKFIGMRPSLCCASAMYLARLILGKLPVWNGNLIHYSGGYRISDMRECIELMFQYLIAPIEHDEFFKKYAMRKFMRASTLCRNWAKKFQASGRDLFDERLSTHRLTLEDDDEEEEIVVAEAEE

SEQ ID NO: 2423 - DNA, 1248 bp, Schizosaccharomyces pombe
  CDS (1)..(1248)
atggacgtttcgactcaaacaagacacgcaacatattttcaagatgagaatcagctacaaaaggatcacatttatgtgaagaagaaaagtcacatcaagttaaatacgggtgttcgtgcacctttcaaggcagtagataacatcaatcaacaagatgaaccaacattgattgaagggaataatgaatcctccatctcttcgtccactggcgacacttttgaagaggattttgcataccaggacaaagtcgagatagaggaacggtcaattcgctccactcctaagtctattggagatgatgatttggaaaaccgtgagggcagctttgacgcacctgaaggaattcttacacacgggaagcatagactaccaacaattcccgagtggaccaaggaagatttagccgccctgtctgaagctgctgctcgattacaagctaacccatcgcctgaggatatagaaactgatccatccatggtaccagactatgatcctgagatatttcactacatgcaatctttggaaaggaagctggctccacctcctaattacatgtcagttcagcaagagattgactgggttacaagacatatgcttgttgattggattgtgcaagttcaaatacattttcgtttacttcctgagacattatttttggcggtaaaccttatcgaccggtttctttccataaaagtcgtatctttgcaaaaagtccagttggtaggtttatcagctttgctgattgcctgtaagtatgaagagatacaccctccaagcatctacaactttgcgcatgttgtccaagggatcttcaccgttgacgaaatcattagagccgagcgctatatgctgatgcttttggattttgacattagttggccagggcccatgtcgtttttgcgtcgtataagtcgagctgattcttacgatcacgacattcgcatgctcgccaaatatcttcaagaagtaaccttgatggatgaaatttttataggtgcccatattagcttcattgctgctactgcctactacttgtctatgcagatgttgggtcatttggattggactccttgccatgtatattatagtgggtacacggctcgtcaattgaaaccgtgtgccataatcattatggaatgtttggtcgatgcccctaaccatcacaatgccatttaccgaaagtactcggagaatagaatgaagcgagttagcgcctttgctcacaactgggtactaagtgtgatttga

SEQ ID NO: 2424 - protein, 415 aa, Schizosaccharomyces pombe
MDVSTQTRHATYFQDENQLQKDHIYVKKKSHIKLNTGVRAPFKAVDNINQQDEPTLIEGNNESSISSSTGDTFEEDFAYQDKVEIEERSIRSTPKSIGDDDLENREGSFDAPEGILTHGKHRLPTIPEWTKEDLAALSEAAARLQANPSPEDIETDPSMVPDYDPEIFHYMQSLERKLAPPPNYMSVQQEIDWVTRHMLVDWIVQVQIHFRLLPETLFLAVNLIDRFLSIKVVSLQKVQLVGLSALLIACKYEEIHPPSIYNFAHVVQGIFTVDEIIRAERYMLMLLDFDISWPGPMSFLRRISRADSYDHDIRMLAKYLQEVTLMDEIFIGAHISFIAATAYYLSMQMLGHLDWTPCHVYYSGYTARQLKPCAIIIMECLVDAPNHHNAIYRKYSENRMKRVSAFAHNWVLSVI

SEQ ID NO: 2425 - DNA, 1416 bp, Saccharomyces cerevisiae
  CDS (1)..(1416)
atgtcacgatcccttttggtagagaatagtagaaccattaatagtaatgaagagaagggggtaaacgaaagtcaatatatcttacaaaagagaaacgtcccaaggaccattctcggtaatgtcacaaataatgcaaatatcctgcaagagatttctatgaacagaaaaattgggatgaagaacttctcaaaattgaacaacttctttcctttaaaggatgatgtttcgagagccgatgacttcacctcctcttttaatgacagtagacagggggtgaaacaagaagtactaaacaataaggaaaatattcctgaatatggatattccgagcaagaaaagcagcagtgctcaaatgatgactcttttcatacgaattcgactgccttgagctgtaatcggttgatatactctgagaacaagtctatttccactcaaatggaatggcagaaaaaaataatgagagaagattccaaaaaaaaaaggccaatatcaactcttgtagagcaggatgaccagaaaaagttcaaactccatgaattgactacagaagaagaggttctggaggagtacgaatgggatgacctagatgaagaagattgtgatgatcccttaatggtgagcgaagaggttaatgatatcttcgattatttgcatcacttggaaataatcacattgccaaataaggcgaatctctataagcataaaaatattaagcaaaacagagacattttggtgaactggataatcaagattcataataagtttggccttctgccggaaactctatatttggccataaacataatggatagatttctttgtgaagaggtggttcagttaaatagattgcaactggttggtacatcatgcctgttcatcgcatctaagtatgaggaaatatactcccctagcataaaacattttgcgtacgagacagacggtgcatgctctgtggaagatattaaagagggtgaaagatttatattggaaaaactcgattttcaaattagtttcgctaacccaatgaatttcttaaggagaatatcaaaagcggatgactatgatatccagtctaggacgttagcgaagttcctaatggaaatatctatagtggacttcaagttcatcgggatattaccgtcattatgtgcctcagcggcaatgttcctttcgagaaaaatgctgggcaagggcacctgggatggcaacttaatccattatagtggtggttacacaaaggcaaaactatatcccgtttgccaattactgatggattatcttgttggatctactattcacgacgagttcttgaaaaaatatcaatcgagaagatttttaaaggcttccataatttctatcgaatgggcattgaaggtaaggaaaaatggatatgatattatgacattgcatgagtga

SEQ ID NO: 2426 - protein, 471 aa, Saccharomyces cerevisiae
MSRSLLVENSRTINSNEEKGVNESQYILQKRNVPRTILGNVTNNANILQEISMNRKIGMKNFSKLNNFFPLKDDVSRADDFTSSFNDSRQGVKQEVLNNKENIPEYGYSEQEKQQCSNDDSFHTNSTALSCNRLIYSENKSISTQMEWQKKIMREDSKKKRPISTLVEQDDQKKFKLHELTTEEEVLEEYEWDDLDEEDCDDPLMVSEEVNDIFDYLHHLEIITLPNKANLYKHKNIKQNRDILVNWIIKIHNKFGLLPETLYLAINIMDRFLCEEVVQLNRLQLVGTSCLFIASKYEEIYSPSIKHFAYETDGACSVEDIKEGERFILEKLDFQISFANPMNFLRRISKADDYDIQSRTLAKFLMEISIVDFKFIGILPSLCASAAMFLSRKMLGKGTWDGNLIHYSGGYTKAKLYPVCQLLMDYLVGSTIHDEFLKKYQSRRFLKASIISIEWALKVRKNGYDIMTLHE

SEQ ID NO: 2427 - DNA, 1236 bp, Schizosaccharomyces pombe
  CDS (1)..(1236)
atggctctctattcaatttcaaagcctgttggttctaaaatcaataagcatagttatcaagatgaaaacacacttgttggcaaacaagctttatcaaaagggactgagaagacaaaattatctacaaattttgaaattaatctgccacgtcgaactgtcctatctgatgtttccaatgtaggtaaaaataatgctgatgagaaggatacgaaaaaagcgaaaagatcgttcgatgaatctaatttatctacaaatgaagaagctgataaacctgtcgaatctaaattcgtgaaaaagttgaaagtttatagcaaaaatgcggatccatctgtagaaactttacaaaaggacagagtctctaatgttgatgatcatttatcctccaatcctttgatggctgaggaatacgcacccgaaatatttgagtacatcagaaagctggatttaaagtgtcttcccaatccaaaatatatggaccaacaaaaagaattaacctggaaaatgagggaaattttgaatgaatggttggtggaaatacattccaacttttgtttaatgcccgaaaccctttatttggcagtcaatataattgatcgattcttgtcgcgtcgttcatgctctttgtctaaatttcaattaacaggcattactgctcttctcatcgctagcaaatatgaggaggttatgtgtccttcgatacaaaactttgtttacatgactgatggtgcttttaccgtagaagatgtctgtgtcgctgaacgttatatgttaaatgttctcaattttgacttgtcctatccaagtcctttaaattttcttcgcaaaatatctcaagcagaaggttatgatgcacaaacaaggacattggggaaatacctaacagaaatttatctgtttgaccacgatttattacgatatcctatgtctaaaattgctgctgccgcaatgtatttgagccgccgattattgcgtcgcggcccatggacgccaaagttagttgaaagctctggtgggtatgaagagcatgaattaaaggagatagcgtatattatgcttcattatcataacaagcctctagaacacaaagcctttttccaaaaatactcctcaaaaaggttcctgaaggctagtatttttgttcatcaactcgtccgtcaacgatactcagtcaatcgtacggacgatgatgaccttcaatcagaaccgtcttcttctttaacaaatgatggtcactaa

SEQ ID NO: 2428 - protein, 411 aa, Schizosaccharomyces pombe
MALYSISKPVGSKINKHSYQDENTLVGKQALSKGTEKTKLSTNFEINLPRRTVLSDVSNVGKNNADEKDTKKAKRSFDESNLSTNEEADKPVESKFVKKLKVYSKNADPSVETLQKDRVSNVDDHLSSNPLMAEEYAPEIFEYIRKLDLKCLPNPKYMDQQKELTWKMREILNEWLVEIHSNFCLMPETLYLAVNIIDRFLSRRSCSLSKFQLTGITALLIASKYEEVMCPSIQNFVYMTDGAFTVEDVCVAERYMLNVLNFDLSYPSPLNFLRKISQAEGYDAQTRTLGKYLTEIYLFDHDLLRYPMSKIAAAAMYLSRRLLRRGPWTPKLVESSGGYEEHELKEIAYIMLHYHNKPLEHKAFFQKYSSKRFLKASIFVHQLVRQRYSVNRTDDDDLQSEPSSSLTNDGH

SEQ ID NO: 2429 - DNA, 1476 bp, Saccharomyces cerevisiae
  CDS (1)..(1476)
atgtccaacccaatagaaaacacagaaaactcacagaatactagttcatcaaggtttttgaggaatgtacaaaggttggccttaaacaatgtaacaaatacgacatttcaaaagagtaatgcgaataatccagccctaacaaatttcaaatctacactaaactcagtaaagaaggagggaagtcggattcctcaatttactagagaaagcgtatcaagatcaacagccgcacaagaggagaaaagaaccctgaaagaaaatggtatccaactccccaaaaacaatcttttagatgataaagaaaaccaagacccaagtagtcagcaatttggtgcgctaacttctataaaggaggggagagctgagctgcctgcaaatataagtttacaagaatcctcctcagcgaaggagataatccagcatgatcccctaaaaggcgttggatcaagcactgaggtagtccataactcggtagaaaacgaaaaacttcatccagctagaagtcaacttcaagttagaaataccgaaagtgaaactgatagtggaaaaaaaagaccaatttctacaattgttgaacaagaactgcccaaaaagtttaaagtgtgcgatgaaaatggcaaagaagaatatgaatgggaagacctagatgcagaagatgtaaatgatccattcatggtcagcgagtacgtcaatgatatattcgaatatctccaccaactagaggtcattactcttccaaagaaggaagatctctatcagcatagaaatattcatcaaaatcgagatatcctagttaattggttggttaaaatccataataaattcggcttattaccggagactttgtatcttgccattaacataatggacaggtttttaggtaaagagctagttcaactggataagttacaattggttggcacatcatgccttttcattgcctctaaatatgaagaggtctattctcctagtataaaacatttcgcatcagagacagacggtgcatgtacggaagatgaaatcaaagaaggggagaaattcattttaaagacattgaaatttaacctaaattatcccaatccgatgaattttctgagaagaatttcgaaagcagatgactacgatatacagtctcgaactcttgccaaattcttattagagatatcattggtagatttcagatttattgggatactaccctcattgtgtgcagcagctgcgatgtttatgtcgagaaaaatgttaggtaaaggtaaatgggatggaaatctaatacactatagcggcgggtatactaaagaagaacttgcgcccgtgtgtcacatgataatggattatctagtgagtccaattgttcatgatgaatttcatagaaaatatcaatctagaagatttatgaaagcttctataatttccgtccaatgggctttaaaggttagaaaaaacggctatgatataatgaccttgcatgaatga

SEQ ID NO: 2430 - protein, 491 aa, Saccharomyces cerevisiae
MSNPIENTENSQNTSSSRFLRNVQRLALNNVTNTTFQKSNANNPALTNFKSTLNSVKKEGSRIPQFTRESVSRSTAAQEEKRTLKENGIQLPKNNLLDDKENQDPSSQQFGALTSIKEGRAELPANISLQESSSAKEIIQHDPLKGVGSSTEVVHNSVENEKLHPARSQLQVRNTESETDSGKKRPISTIVEQELPKKFKVCDENGKEEYEWEDLDAEDVNDPFMVSEYVNDIFEYLHQLEVITLPKKEDLYQHRNIHQNRDILVNWLVKIHNKFGLLPETLYLAINIMDRFLGKELVQLDKLQLVGTSCLFIASKYEEVYSPSIKHFASETDGACTEDEIKEGEKFILKTLKFNLNYPNPMNFLRRISKADDYDIQSRTLAKFLLEISLVDFRFIGILPSLCAAAAMFMSRKMLGKGKWDGNLIHYSGGYTKEELAPVCHMIMDYLVSPIVHDEFHRKYQSRRFMKASIISVQWALKVRKNGYDIMTLHE

SEQ ID NO: 2431 - DNA, 1449 bp, Schizosaccharomyces pombe
  CDS (1)..(1449)
atgactacccgtcgtttaactcgccagcacctattggcaaataccttgggcaacaatgacgaaaatcatccttcaaaccatattgcccgtgcaaaaagctctttgcactcttcagaaaattctttagtaaatggcaagaaagccactgtgtcttccaccaacgttcctaagaagcgtcatgcgttggatgatgtttccaattttcacaacaaagaaggtgttccattagctagtaaaaacacaaatgtcagacacactactgcttctgtcagtacccgtcgtgctctcgaggaaaagtctataatccctgcaacagatgatgaacccgcttccaagaagcgtcgccaaccttctgtttttaattcatcagtcccctcgttacctcaacacttgtcaacgaaatcacactctgtttcaacccatggggttgatgctttccataaggatcaagcaactattccaaaaaaattaaagaaagatgttgatgaacgcgttgtttcgaaagatattcccaaacttcaccgtgatagtgttgagagtcccgaatctcaagattgggatgacttggatgcagaagattgggctgaccctcttatggtttctgaatatgtcgttgatatttttgaatatttgaatgagttggaaattgaaactatgccctctcctacttatatggatcgtcaaaaagagcttgcatggaagatgcgtggaatacttaccgattggttaattgaagtgcattctcgtttccgactgcttcctgaaacattgtttttggccgtaaatattattgatagatttttatcattgcgggtatgctctcttaacaaactacaattggttggcattgctgccttgttcatcgctagcaagtatgaggaggtgatgtgcccttcagtccaaaactttgtatatatggcggatggtgggtatgatgaagaggaaattcttcaagccgagcgctacattttgcgtgtcctagagtttaatcttgcttacccgaatcctatgaatttcctacgtcgtatctcaaaagccgacttttacgatattcaaacaagaactgttgcaaagtatcttgttgaaattggtcttttagatcataaacttttaccttatcccccttcccaacagtgtgctgccgctatgtaccttgccagggaaatgcttggacgtggaccgtggaatcgtaatcttgtgcattactcaggttatgaggagtaccaattaatttccgttgttaagaagatgattaattatttacaaaagcctgttcaacatgaagcttttttcaagaagtatgcctccaaaaagtttatgaaagctagtctttttgttcgtgactggatcaagaagaattctatccctcttggcgatgacgctgatgaagattatacttttcacaagcaaaaacgtatacaacatgacatgaaagatgaagaatggtaa

SEQ ID NO: 2432 - protein, 482 aa, Schizosaccharomyces pombe
MTTRRLTRQHLLANTLGNNDENHPSNHIARAKSSLHSSENSLVNGKKATVSSTNVPKKRHALDDVSNFHNKEGVPLASKNTNVRHTTASVSTRRALEEKSIIPATDDEPASKKRRQPSVFNSSVPSLPQHLSTKSHSVSTHGVDAFHKDQATIPKKLKKDVDERVVSKDIPKLHRDSVESPESQDWDDLDAEDWADPLMVSEYVVDIFEYLNELEIETMPSPTYMDRQKELAWKMRGILTDWLIEVHSRFRLLPETLFLAVNIIDRFLSLRVCSLNKLQLVGIAALFIASKYEEVMCPSVQNFVYMADGGYDEEEILQAERYILRVLEFNLAYPNPMNFLRRISKADFYDIQTRTVAKYLVEIGLLDHKLLPYPPSQQCAAAMYLAREMLGRGPWNRNLVHYSGYEEYQLISVVKKMINYLQKPVQHEAFFKKYASKKFMKASLFVRDWIKKNSIPLGDDADEDYTFHKQKRIQHDMKDEEW

SEQ ID NO: 2433 - DNA, 1383 bp, Saccharomyces cerevisiae
  CDS (1)..(1383)
atgatgcttgaagggtatacggtacaacctccacagtctactttgataggtgacattgaaattcaggacgaaaatgcaaaccaagaagttaagaacgtactttaccaaggagttcaaaagggtataaaaaggctagaaaaaagacaaaggagggttgcattaggtgatgtaacctctcaaaaggcaaacaaaatacacaatgctatacataataaattccatcagacgaagaacaattttgaaatagagaacatacgctcatcggccttggtaaaagaacaacaacgagacgtaaggcatgaagatagcgactattttttaattgatagttctgaaggctcttctactgatgacgaacaagttaatgaagatgctattgatgatttgttaagtcgaagagtaaatgatcagcagattcaagccgatgaagtgtatgaagatttcgatggagaaatgcaagatgtcattgaagaggatgttgatagtcaaattgaaccactatcaccaataaacaacgatgaaattcagactgagctggacagggcgtttgaaaaatattttcggtcggttcccaatccgctggatgatgatacccatgatgttgtgatggttgtggagtacgcttccgacatattctattacttgagagaacttgaagtgaaatataggcctaatccctactatatgcaaaatcaagtagagcttacatggccgttcagacgaactatgatagattggctagttcaactgcattttagatttcaacttttaccagaaacgctatacctgacgattaatatagtggatagatttctgtcaaagaagaccgttactttgaacaggtttcaattggttggtgtatcggctttatttattgctgccaagtttgaagagattaactgccccactttggatgatctagtttacatgctggaaaatacatacactagagatgacattattagagcggaacagtatatgatagatactctggaatttgaaataggttggccaggacccatgccatttttaagaaggataagtaaagcagatgactatgacttcgaaccaagaacattagcaaagtacttattggaaactacaatagtagaacccaaactagtggctgcggcaccaagctggttagctgctggcgcgtattttctgagcagaacaattcttggttcaaatgattggtctttaaaacatgtattctactctggctatacatccagccaaataattcctttagcatcactgatattggagaattgcaagaacgcatctcgacgccatcattcaatttggaaaaaatactttgaccaaaagcattaccgctgttctcaaattgtagaagaatggattgtttcgacagaagcctaa

SEQ ID NO: 2434 - protein, 460 aa, Saccharomyces cerevisiae
MMLEGYTVQPPQSTLIGDIEIQDENANQEVKNVLYQGVQKGIKRLEKRQRRVALGDVTSQKANKIHNAIHNKFHQTKNNFEIENIRSSALVKEQQRDVRHEDSDYFLIDSSEGSSTDDEQVNEDAIDDLLSRRVNDQQIQADEVYEDFDGEMQDVIEEDVDSQIEPLSPINNDEIQTELDRAFEKYFRSVPNPLDDDTHDVVMVVEYASDIFYYLRELEVKYRPNPYYMQNQVELTWPFRRTMIDWLVQLHFRFQLLPETLYLTINIVDRFLSKKTVTLNRFQLVGVSALFIAAKFEEINCPTLDDLVYMLENTYTRDDIIRAEQYMIDTLEFEIGWPGPMPFLRRISKADDYDFEPRTLAKYLLETTIVEPKLVAAAPSWLAAGAYFLSRTILGSNDWSLKHVFYSGYTSSQIIPLASLILENCKNASRRHHSIWKKYFDQKHYRCSQIVEEWIVSTEA

SEQ ID NO: 2435 - DNA, 1308 bp, Saccharomyces cerevisiae
  CDS (1)..(1308)
atgggagagaaccacgaccatgagcagagtattaaaagaaattctatgatttataatgaaaatgagaggcagttgtgcaattcaaacctaaagattcttcaaaataaaagggccctttcaaaaaatgacagctctagtaagcagcaggttcaggattctaaaccaagaagggctttaacagatgtaccagtgaacaataatcctttaagccagaacaagagaatagtagcagggagcaaggcggccaaagtacgaagagaagaaaacattagacctattgttagcgccgttcaaaaaagacagatatataacgatcgaacggcagcagagcaagaagaagaagaagaagaagaaggagaagatgatgatgctgcttcgatagtgaacaaaaaacgcagaatagacgctgaaggagtgagtgaaatagtaggctggcaggacctagattatgttgaaaaagatgatactgcaatggtagcagaatattctgctgaaatttttgcatttttatatagaagagaattagaaacgttaccatcgcacaactatttactcgacaaaacgtccaagtattatttgaggccttccatgagaacaatattagtggattggctggtagaggtgcacgaaaaatttcaatgctatccggaaacgttattcctatccataaacttaatggatagatttttagctaaaaataaagttacgatgaacaagttacaattattggcagttacctcacttttcatcgcggcaaaatttgaagaggtaaatttgcccaaactagctgaatacgcttatatcactgacggcgcggcttctaaaaacgacataaaaaatgcggaaatgttcatgctcacttccttagaattcaacattggttggcccaacccactcaatttcctaaggaggatctccaaggcagatgattacgatccggttaatagaaatattggtaagtttattttagagtatgcctactgctgccaccaattcattcatttacctccatctaccgtaagcgcaatggcaatgtatatagcgagaagaatgaccaacagaaacaagaacgagctatggaatggaacactacagcattacagtggtggtatcgatccaatacacgatgaagcgtttcagtctctctgcattgatctagtcaaagacatcgctagttccaaaactcatttagattcattgattttgaagtacaagaaaccaaggtatggctctgtttatttccaaactttcaagtggtgtacatccgaaatgcatagcaactttcaaaatctatttaatcttaagtag

SEQ ID NO: 2436 - protein, 435 aa, Saccharomyces cerevisiae
MGENHDHEQSIKRNSMIYNENERQLCNSNLKILQNKRALSKNDSSSKQQVQDSKPRRALTDVPVNNNPLSQNKRIVAGSKAAKVRREENIRPIVSAVQKRQIYNDRTAAEQEEEEEEEGEDDDAASIVNKKRRIDAEGVSEIVGWQDLDYVEKDDTAMVAEYSAEIFAFLYRRELETLPSHNYLLDKTSKYYLRPSMRTILVDWLVEVHEKFQCYPETLFLSINLMDRFLAKNKVTMNKLQLLAVTSLFIAAKFEEVNLPKLAEYAYITDGAASKNDIKNAEMFMLTSLEFNIGWPNPLNFLRRISKADDYDPVNRNIGKFILEYAYCCHQFIHLPPSTVSAMAMYIARRMTNRNKNELWNGTLQHYSGGIDPIHDEAFQSLCIDLVKDIASSKTHLDSLILKYKKPRYGSVYFQTFKWCTSEMHSNFQNLFNLK

SEQ ID NO: 2437 - DNA, 1515 bp, Oryza sativa
  CDS (1)..(1515)
atggcggcgaagcggcccgcggcgggggagggaggagggaaggcggcagcgggcgccgcggcggccaagaagcgcgtcgcgcttgtcaacatcaccaacgttgccgccgcggccaacaatgcgaaatttaattcagctacctgggctgcacctgtgaagaagggatctttggccagtggccgcaatgtgtgcacgaatcgggtctcagcggtgaaatcggcttccgccaagccagctccggccatatcccgccatgagagcgccccacagaaggagtcagttattcctcctaaagtgcttagcattgttccgactgctgcacccgcacctgtcactgtaccctgcagcagcttcgtctcccctatgcattcaggagattcagtttcggttgacgagacgatgtcgatgtgtgactcaatgaaaagcccagactttgagtacattgataatggggattcctcctcagttctaggttccttgcagcgaagagcaaacgagaacctgcgtatctcagaggatagagatgttgaagaaactaagtggaataaggatgctccttccccaatggaaatcgaccaaatttgtgatgttgacaataactacgaggatccgcagttgtgtgctactcttgcttctgatatctacatgcacttgcgcgaggccgagaccaggaaacgtccatcaactgattttatggaaacaatccaaaaggatgtaaacccaagcatgagagcgatcctgatagactggcttgtggaagtcgctgaagaatatcgtcttgttcctgatacattatacctgacagttaactacattgatcgttatctttctggcaatgagatcaatcgtcaaagactgcaattacttggagttgcttgtatgcttattgctgcaaaatacgaggagatatgtgcacctcaagtagaagaattctgctatataactgacaacacatacttcagagatgaggttttggaaatggaagcttctgtcctgaattacctgaagtttgaagtgactgcacctacagcaaaatgctttttgaggagatttgtccgtgttgcacaagtatcggatgaggatccagcattgcatcttgagttcctagccaattatgttgctgagctatcactgctggagtacaatctactttcttaccctccttcactagtagcggcatcggctattttcttggccaaattcatactgcagccaacaaagcacccttggaattccacccttgctcactacacacaatacaagtcgtcagagttaagcgactgtgtaaaggcattgcaccgcctttttagcgttggtcccgggagtaaccttcctgcaatcagggagaagtatacccaacataagatactgcatgcagctgatgtgatcgacttgaacatggcaaatgcatttaagaatgtgaaaatattatgtcaatgtccctgtcaatgcaaccttcttgaagaagtcatgctcaagctatttccatactggaagctaagcacagctgtttag

SEQ ID NO: 2438 - protein, 504 aa, Oryza sativa
MAAKRPAAGEGGGKAAAGAAAAKKRVALVNITNVAAAANNAKFNSATWAAPVKKGSLASGRNVCTNRVSAVKSASAKPAPAISRHESAPQKESVIPPKVLSIVPTAAPAPVTVPCSSFVSPMHSGDSVSVDETMSMCDSMKSPDFEYIDNGDSSSVLGSLQRRANENLRISEDRDVEETKWNKDAPSPMEIDQICDVDNNYEDPQLCATLASDIYMHLREAETRKRPSTDFMETIQKDVNPSMRAILIDWLVEVAEEYRLVPDTLYLTVNYIDRYLSGNEINRQRLQLLGVACMLIAAKYEEICAPQVEEFCYITDNTYFRDEVLEMEASVLNYLKFEVTAPTAKCFLRRFVRVAQVSDEDPALHLEFLANYVAELSLLEYNLLSYPPSLVAASAIFLAKFILQPTKHPWNSTLAHYTQYKSSELSDCVKALHRLFSVGPGSNLPAIREKYTQHKILHAADVIDLNMANAFKNVKILCQCPCQCNLLEEVMLKLFPYWKLSTAV

SEQ ID NO: 2439 - DNA, 1272 bp, Oryza sativa
  CDS (1)..(1272)
atggcgtcgaggaggcagtggggagccggtgccggcgccgtcgatgttcctgctcaggaacgcaagggagaggctgccaagattgcgaggaggccaaagaccacgacggttgttgctcagcaaccgccaagaatccgtcgagccctcgccgacgtcagtaatctcgtcaatggccgggctgctctgcctgtcgtaaatcgccagaaggcagcagcagcagcagctgacaagtgcaggaaaccaatcaagcagcgcaacgagaacaacaaggcggccaagccagaagtcatcgtgatcagttcagactccgagaaacataagaaaaatccagcccagagagcagcctcccggagggcgccaatccaaacgctcacctcgattctgaccaagtgcagcagggcttctgacggtgtgatcagcccgaaaaaggagctgatatacgacatcgatgcatctgattctcacaacgagctggcagtggttgattacgtcgaagatatctacagattctacaggaacaccgagaacacctaccggcctctctgcacctacatggtgtcacagaccgagatcaacgagagaatgagagcaatcctgactgattggctcatcgaagtgcactacaggcttatgctgatgccagagacactgtacctcactgtctacataattgatcagtacctgtccctggagaatgtgcccaggaaggagctgcagcttgtcggtgtaagcgccatgttgatagcctgcaagtatgaggagacttgggctccattggttaaggacttccttgtcatatcagacaactccttcagcaggcagcaggtcctgagcacagagaagtccatacttaacaagctccagtggaacctgactgttccgacaatgtacatgttcatccttcgatacctgaaagctgcattgggtgacgaggagctggagcacatgactttcttctacgcagagctcgcactggttcagtactccatgctcttttttgcgccatcggtgatagcagccgctgccgtctacgctgctcggtgtacccttggcctgagcccactatggagcgatcttctggagtaccacaccggcttagctgagccgcaattgctggagtgtgcgaggcggctggtgagcctgcacgcggcggcgccggagagcaggcagaaggtggtgtacaagaagtacgcgagccccaagctcggagccgtctccctccactcgccggccaagaagcttctcccgccgccgtcgccggtggcggcttga

SEQ ID NO: 2440 - protein, 423 aa, Oryza sativa
MASRRQWGAGAGAVDVPAQERKGEAAKIARRPKTTTVVAQQPPRIRRALADVSNLVNGRAALPVVNRQKAAAAAADKCRKPIKQRNENNKAAKPEVIVISSDSEKHKKNPAQRAASRRAPIQTLTSILTKCSRASDGVISPKKELIYDIDASDSHNELAVVDYVEDIYRFYRNTENTYRPLCTYMVSQTEINERMRAILTDWLIEVHYRLMLMPETLYLTVYIIDQYLSLENVPRKELQLVGVSAMLIACKYEETWAPLVKDFLVISDNSFSRQQVLSTEKSILNKLQWNLTVPTMYMFILRYLKAALGDEELEHMTFFYAELALVQYSMLFFAPSVIAAAAVYAARCTLGLSPLWSDLLEYHTGLAEPQLLECARRLVSLHAAAPESRQKVVYKKYASPKLGAVSLHSPAKKLLPPPSPVAA

SEQ ID NO: 2441 - DNA, 1263 bp, Oryza sativa
  CDS (1)..(1263)
atggatagggcgagcgagaaccggaggctggcggcggtggggaagcccgtgccggggatcggagagatggggaaccggaggccgctcagggacatcaacaacctcgtcggggcgccgccgcacccgtccgcgatcgccaagaagccgatgctagagaagagtgggaaggaagagcagaagcctgcattggtggtgagccaccggcctatgacgaggaatttcgcggcctccttgacgcgaaaagaacagcttgaccatcaggtttccgtggctgatgcagcggtcgtctgcactgatccacagaagaaccccatccccgatggcacagttgacgacgatgtggaatcgtgcgaatcgaacgactatattgccgtggatgaatgcaatgatactgatgaggatgagtccatgatggacattgacagtgccgactcagggaatccgcttgcagcaaccgagtacgtcgaagagttgtacaagttctatagagaaaatgaggaaatgagttgtgtgcagcctgattacatgtccagtcaaggagacataaatgaaaagatgagagcaattctgattgattggctcattgaggtccatcacaagtttgagctgatggatgagactctctttcttactgttaacatagtagacagattcttggaaaaacaagttgtgccaaggaagaagttgcagctagttggagtgacagctatgctccttgcttgcaaatatgaggaagtcgcagtccctgtcgtcgaggatctagtgctaatttctgaccgggcttatacaaaaggacaaattctggaaatggaaaagttgatcctaaacacactccagttcaacatgtctgtaccaacaccttacgtttttatgagacggtttctgaaggcagctcagtctgacaagcagctacagctactttcctttttcattctggagctctccctggtggaataccaaatgctcaagtaccgaccttcgcttcttgctgctgctgcagtttacacagcacaatgtgctctcactcgttgccagcagtggacaaagacctgcgaactacatagtagatataccggagagcagcttcttgagtgttctaggatgatggtagatttccaccagaaggcgggagcaggcaagctcaccggcgtgcaccggaaatacagtacgttcaagtttgggtgtgcagccaaaacggagcctgctctcttcttgcttgagtcaggagcaggaggttacaaccttcagaagcagccttgttga

SEQ ID NO: 2442 - protein, 420 aa, Oryza sativa
MDRASENRRLAAVGKPVPGIGEMGNRRPLRDINNLVGAPPHPSAIAKKPMLEKSGKEEQKPALVVSHRPMTRNFAASLTRKEQLDHQVSVADAAVVCTDPQKNPIPDGTVDDDVESCESNDYIAVDECNDTDEDESMMDIDSADSGNPLAATEYVEELYKFYRENEEMSCVQPDYMSSQGDINEKMRAILIDWLIEVHHKFELMDETLFLTVNIVDRFLEKQVVPRKKLQLVGVTAMLLACKYEEVAVPVVEDLVLISDRAYTKGQILEMEKLILNTLQFNMSVPTPYVFMRRFLKAAQSDKQLQLLSFFILELSLVEYQMLKYRPSLLAAAAVYTAQCALTRCQQWTKTCELHSRYTGEQLLECSRMMVDFHQKAGAGKLTGVHRKYSTFKFGCAAKTEPALFLLESGAGGYNLQKQPC

SEQ ID NO: 2443 - DNA, 1473 bp, Oryza sativa
  CDS (1)..(1473)
atggctggaaggaaggaaaatccggtgcttactgcttgccaagcacccagtggtcgaatcacacgagctcaagctgctgcaaatcgtggacggtttgggtttgctccctccgtatcactacccgcaagaactgaacgaaagcagacagcaaaaggaaagacaaaaaggggagctttggatgaaatcactagtgcaagtactgcaacttcagctcctcagcctaaacggcgcacagtgctcaaggatgtaaccaacatcggctgtgccaactcatccaaaaattgcaccaccacgagcaagctgcagcaaaagtcaaagcccacccaaagggtgaaacaaatcccgagcaaaaagcagtgtgcaaagaaggttcctaagctaccccctccggctgttgctggaacttcatttgtgattgattctaaaagttctgaagaaactcaaaaggtggagcttttggcaaaagcagaggaacccacaaatttgtttgaaaacgaggggttactgtcattgcagaatattgagcgaaacagggacagtaattgccatgaggcattctttgaggcaagaaacgccatggataaacatgaactcgctgactccaagcctggtgactctagtggtttaggttttatagatattgacaatgataatggaaatcctcaaatgtgtgcttcctatgcttcagagatatacacaaatctgatggcctctgagcttatcagaagacccaggtcaaattacatggaggctttgcaacgtgacatcacaaagggcatgcgaggcattctcattgattggcttgttgaggtttctgaagaatataagcttgtgccagacacactctacctaaccattaatcttattgaccgatttctttctcaacattatattgaaagacagaaactccaacttcttggaataacaagcatgctgattgcctcgaaatatgaagagatatgtgctcctcgtgttgaagaattttgtttcataactgacaatacatacacaaaagctgaggtgctgaaaatggagggcctggtgcttaatgatatggggtttcatctatctgttccaacaacaaaaacatttctcaggagattccttagagccgcacaggcttctcgtaatgttccttcaattaccttgggatatctggccaattatcttgcagagctgaccctgatcgattacagtttcctcaaatttcttccttcagtggtggcagcatctgcagtctttcttgcaagatggacacttgaccaatctgacattccatggaatcatactcttgagcactacacttcttacaaaagctctgatattcaaatatgtgtctgtgctctacgggaactgcagcataacaccagtaattgccctctcaatgctatacgtgaaaagtataggcaacaaaagtttgagtgtgtagccaacctgacatcaccggagctggggcagtcactcttcagctga

SEQ ID NO: 2444 - protein, 490 aa, Oryza sativa
MAGRKENPVLTACQAPSGRITRAQAAANRGRFGFAPSVSLPARTERKQTAKGKTKRGALDEITSASTATSAPQPKRRTVLKDVTNIGCANSSKNCTTTSKLQQKSKPTQRVKQIPSKKQCAKKVPKLPPPAVAGTSFVIDSKSSEETQKVELLAKAEEPTNLFENEGLLSLQNIERNRDSNCHEAFFEARNAMDKHELADSKPGDSSGLGFIDIDNDNGNPQMCASYASEIYTNLMASELIRRPRSNYMEALQRDITKGMRGILIDWLVEVSEEYKLVPDTLYLTINLIDRFLSQHYIERQKLQLLGITSMLIASKYEEICAPRVEEFCFITDNTYTKAEVLKMEGLVLNDMGFHLSVPTTKTFLRRFLRAAQASRNVPSITLGYLANYLAELTLIDYSFLKFLPSVVAASAVFLARWTLDQSDIPWNHTLEHYTSYKSSDIQICVCALRELQHNTSNCPLNAIREKYRQQKFECVANLTSPELGQSLFS

SEQ ID NO: 2445 - DNA, 1470 bp, Zea mays
  CDS (1)..(1470)
atggctatgcgaaaagaaaaccctgtgcttaatgcttgtcaagcatccaatggccggatcacgcgagctcaagctgctgcaaatcgtcgaagctttggagctttcccttctgttccattgcctgcaaaaaccgaacgaaaacagactgcacaagggaaggcaaaacgaggttcttcatatgacaacaccagtgcaagcgttgcactttcaggcccccagcctaaaaggcgcacagtactcagggatgtgaccaatttgagcaatgctaactctaacaaaagttttgctgctgcaccgaagcttcagacaaagccctctctaaggactggaagaaccgtgagcaaaagcaagccgtgcgcaaaaaagattcctaaaaaaccaccaccagctggtaatggaagtgcattgactaatgttttgaacattgctgaagaaacacaagcggagaagattttggcagagagagtggaacccgttctgttgcttgagaacagggggccactgtcattgcagaatgttgaaaggaacagggacagtgcttgtcatgaggtattctttgaggaaagaaacctcagggataaatgtgaaccttctgtgtcaaagaatggggactcttatgtgttagacattgtagatatcgacaaagataatggcaatcctcaaatgtgtgcttcctacgttgtggagatatactcaaacctaatggcttcagagcttatgagaagaccaagtccaaattacatggagggtttgcaacgggacatcacaaagggcatgagagaaatactcattgattggcttgtggaggtttctgaagaatacaagcttgttccagacacgctgtacctaactgtatatcttattgaccggtttctttctcggaactacattgaaagacagagactacaacttgtgggaataacaagcatgcttgttgcctcgaaatatgaagagatatgtgctcctcgagtagaagagttctgtttcataaccgacaatacatacacaaaagcagaggtgctgaaaatggagagccagctgctgaatgacctgggatttaacctttctgttccaacaacaaaaacatttctcaggagattccttagagcggcacaagcatctcgtaaaactccttctatgactttaggatttctggccaattatctcgcggagttgactttgaccgaatatgagttcttgaaatttcttccgtcgttggtggcagcatcggccgtgtttctcgctagatggacgcttgaccaatccgaccttccatggaaccagactctagagcactacacctcttacaaatgctctgacattcaattgtgtgtctgtgctctacgggaactccagcataacaccagtaactgccctcttaacgccatccgcgagaagtacaggcatcaaaagtttgaatgcgtagcgaacctaacttcaccggagttccctcggtcgttcttcagctga

SEQ ID NO: 2446 - protein, 489 aa, Zea mays
MAMRKENPVLNACQASNGRITRAQAAANRRSFGAFPSVPLPAKTERKQTAQGKAKRGSSYDNTSASVALSGPQPKRRTVLRDVTNLSNANSNKSFAAAPKLQTKPSLRTGRTVSKSKPCAKKIPKKPPPAGNGSALTNVLNIAEETQAEKILAERVEPVLLLENRGPLSLQNVERNRDSACHEVFFEERNLRDKCEPSVSKNGDSYVLDIVDIDKDNGNPQMCASYVVEIYSNLMASELMRRPSPNYMEGLQRDITKGMREILIDWLVEVSEEYKLVPDTLYLTVYLIDRFLSRNYIERQRLQLVGITSMLVASKYEEICAPRVEEFCFITDNTYTKAEVLKMESQLLNDLGFNLSVPTTKTFLRRFLRAAQASRKTPSMTLGFLANYLAELTLTEYEFLKFLPSLVAASAVFLARWTLDQSDLPWNQTLEHYTSYKCSDIQLCVCALRELQHNTSNCPLNAIREKYRHQKFECVANLTSPEFPRSFFS

SEQ ID NO: 2447 - DNA, 1413 bp, Glycine max
  CDS (1)..(1413)
atggataaagtaaatagagtttgtgccaaagatgaagagcgtccactccgaatcaccagagcaagagctagagccttgagagggattactccatactcaagaccctccttaaaaaatgagcagaaaaatgtgcttcgagcacatccgaaaagagcagcatcttctgaaaacaaaacttctgtggttgttcctgctgttgtccaacagaagggaagggcagtgctttcagatgtatcaaacatgtgtgcaaaaccacatgataagtgtactaagtcatcaaagtttcaggccaaaggagtttatacaaagaaaaccaccaagctagcagcctcaagtgtttccactgacgtttcatcaacacaagacaatgttagagcaaagttagctgaagaattatccacaataaagatggtagaatcaaaggacaccttaagagaaggtgtaacagcagacacctcactttcaatgcaaaactctgtgaaatctgatgaactccggaactctccaaacaaagacatagatataatttgtgagaagctgggagcctcagactccctgaccattgtggacattgattcagtggagttaaaggatcctcaactgtggagttcatatgcccctgacatatacaacaatatacgagtcacagagcttcaaaggaaaccattaaccaactacatggacaagttacagaaagatatcaatccaagcatgcgaggaattctgattgattggcttgtggaggtttctgaggaatacaagctagttccagacactctttacctgaccgtgaacctcattgatcggtatctctcaaaaagactcattcagaagcaaaggctccagttgctcggtgttacttgcatgctgattgcatcaaaatatgaagagatttgtgcacctcgagtggaggaattttgcttcatcacagataatacatacacaaaagaagaggtattgaaaatggagagagaagtactggatcttgtgcattttcagttatctgttcccacaatcaaaacttttctaaggagattcatccaagcagcacaatcttcttacaaggctccttgcgttgaactggaattcctggcaaattatttagcagagcttgctcttgttgaatgcaactttttccagtttctaccttcccttgtagctgcatccgctgtgttccttgccaaatggaccctgaatgagtcagaacatccatggaatccaactctgaagcactatacaaaatacaaagcttcagagctcaagactgttgttcttgcactgcaagatctgcaacttaataccaaaggaagctccctgaatgctgtccctgagaagtataagcaacagaagttcaattgtgtggcaaacttgtctccaaaaccggtgcagtcactcttccaggacaaagtgtaa

SEQ ID NO: 2448 - protein, 470 aa, Glycine max
MDKVNRVCAKDEERPLRITRARARALRGITPYSRPSLKNEQKNVLRAHPKRAASSENKTSVVVPAVVQQKGRAVLSDVSNMCAKPHDKCTKSSKFQAKGVYTKKTTKLAASSVSTDVSSTQDNVRAKLAEELSTIKMVESKDTLREGVTADTSLSMQNSVKSDELRNSPNKDIDIICEKLGASDSLTIVDIDSVELKDPQLWSSYAPDIYNNIRVTELQRKPLTNYMDKLQKDINPSMRGILIDWLVEVSEEYKLVPDTLYLTVNLIDRYLSKRLIQKQRLQLLGVTCMLIASKYEEICAPRVEEFCFITDNTYTKEEVLKMEREVLDLVHFQLSVPTIKTFLRRFIQAAQSSYKAPCVELEFLANYLAELALVECNFFQFLPSLVAASAVFLAKWTLNESEHPWNPTLKHYTKYKASELKTVVLALQDLQLNTKGSSLNAVPEKYKQQKFNCVANLSPKPVQSLFQDKV

SEQ ID NO: 2449 - DNA, 1374 bp, Glycine max
  CDS (1)..(1374)
atgatctattggggtgagcctgtgtgtcaggagaatggatggattgtaacgtactggtccttgctcaccacaaagaggaaatcgattcagaacagttctaaaccaatcaaccctacaagttttcaaggagggatagaatgtgtggggaacagaaagatggggcagaacagaagggctttaagcgtgatcaatcaggatctggtggcggaagggagaccttacccttgtgttgttaacaagagggcattggcagaaaaacacaatgtttgtgagaagaagcaggcggatccggggcatcgacccatcacaaggaggtttgctgcacaaattgctagcacacagaaaaatcgtgcagagggaaccaagaagtcaaacttggggaattcaaattcgaatggatttggagagcacatatttgtcgatgaagaacacaagtcaacaacggatgaccagccagtgccaatgtctttagagaagacagagccaatgcatagtgaatcagatcagatggaggaagttgagatggaggatataatcgaagaagagactgttttggacattgatacctgtgatgcaaacaaccctcttgcagtcgtagactatattgaagatctttatgcccactacagaaaaatggagggtactagctgtgtctcgccggattatatggcacaacaatctgacattaatgaaaggatgagggctatactgattgactggcttattgaggtgcacgacaaatttgacctcttgcacgagacattgtttctcacagtcaatcttatagatcgatttttggcaaagcagacagtggcaagaaagaagcttcagttggttggtctagttgccatgcttttggcatgcaagtatgaagaagtttctgtacctgtggtgggggatctaattctcatatcagacaaagcatacacaaggaaggaagttctggaaatggagaagttgatggtgaacacattgcagttcaacatgtctgtgccaacagcatacgtttttatgaaaaggttcctaaaggcagctcaagcagacagaaagcttgagttattggctttcttcctggtagagctatctcttgtggaatatgagatgctgaagttccctccatctttgctagcagcagctgctgtctacacagcccaatgcacaatttatggtttcaaacaatggagcaaaacatgtgaatggcactcaaattactcagaagatcagctattagagtgctcaacattaatggccgcttttcatcagaaggctggaaatggaaaactaactggggtacataggaagtactgctcatctaaatttagctatactgcaaaatgtgaaccagcacgttttcttctggagaacccattgtag

SEQ ID NO: 2450 - protein, 457 aa, Glycine max
MIYWGEPVCQENGWIVTYWSLLTTKRKSIQNSSKPINPTSFQGGIECVGNRKMGQNRRALSVINQDLVAEGRPYPCVVNKRALAEKHNVCEKKQADPGHRPITRRFAAQIASTQKNRAEGTKKSNLGNSNSNGFGEHIFVDEEHKSTTDDQPVPMSLEKTEPMHSESDQMEEVEMEDIIEEETVLDIDTCDANNPLAVVDYIEDLYAHYRKMEGTSCVSPDYMAQQSDINERMRAILIDWLIEVHDKFDLLHETLFLTVNLIDRFLAKQTVARKKLQLVGLVAMLLACKYEEVSVPVVGDLILISDKAYTRKEVLEMEKLMVNTLQFNMSVPTAYVFMKRFLKAAQADRKLELLAFFLVELSLVEYEMLKFPPSLLAAAAVYTAQCTIYGFKQWSKTCEWHSNYSEDQLLECSTLMAAFHQKAGNGKLTGVHRKYCSSKFSYTAKCEPARFLLENPL

SEQ ID NO: 2451 - DNA, 1281 bp, Zea mays
  CDS (1)..(1281)
atggcggcgcgggcggctgacgagaacaggagaccggcggcagggaagcccgcgccaggcgtccgagacatggcgagccggcgcgcgctcacggacatcaagaacctcgtcggggctgccccgtacccctgcgccgtcgccaagaagcccatgctgcagaagagcagaagggacgaaaagcagccagcgttggcaagcagccggcccatgacaaggaaattcgccgcctccttggcgagcaagggccaacctgaatgtcagccgatcgtagctgatccagaacccgaagtttgtcaacagaaggaatcagtaggcgatggcaccgttgatattgacgtggaactctacgagctggtcgacgatagtgatagtgacatcgacatgggtgatgagacagagaacaaggacattatgaaccaagatgaatcgctcatggatattgacagtgcagactcggggaacccgcttgcagcaacagaatatgttgaagagctttacaagttttacagagaaaatgaggctaagagttgtgtaaaccctgattacatgtccagtcagcaagatataaatgcaaagatgagagcaattctgattgactggctgattgaggttcactacaagtttgaactgatggacgagacgctatttcttacggtaaacgtaatagatagattcttggaaaaggaagtggttccaaggaagaagctacaactggttggaatcacagctctgcttcttgcttgcaaatatgaggaggtctcagttccagttgttgaggaccttgtgctcatttctgaccgtgcctacacaaaagggcaaattctagaaatggaaaagttgattctgaacacgctgcaattcaacatgtctgttccaacaccttatgtcttcatgaagaggtttctgaaagcagcagacgcagataaacagcttgagctagtgtcatttttcatgctggagctctgcttggtagagtaccaaatgctgaattataggccttcacatctggctgccgctgcggtttatactgcacaatgtgctattaaccgttgccagcaatggacaaaggtttgcgagtcacacagcagatacactggcgaccaactcctggagtgctcgaggatgatggtagactttcaccagaaggctggaaccggcaagctcactggcgtgcacaggaagtacagtacctacaagttcgggtgcgcggccaagattttgcctgcgcagttcatgctggagtcaggagggacagcaccgcctccttcaggtgcaatctaa

SEQ ID NO: 2452 - protein, 426 aa, Zea mays
MAARAADENRRPAAGKPAPGVRDMASRRALTDIKNLVGAAPYPCAVAKKPMLQKSRRDEKQPALASSRPMTRKFAASLASKGQPECQPIVADPEPEVCQQKESVGDGTVDIDVELYELVDDSDSDIDMGDETENKDIMNQDESLMDIDSADSGNPLAATEYVEELYKFYRENEAKSCVNPDYMSSQQDINAKMRAILIDWLIEVHYKFELMDETLFLTVNVIDRFLEKEVVPRKKLQLVGITALLLACKYEEVSVPVVEDLVLISDRAYTKGQILEMEKLILNTLQFNMSVPTPYVFMKRFLKAADADKQLELVSFFMLELCLVEYQMLNYRPSHLAAAAVYTAQCAINRCQQWTKVCESHSRYTGDQLLECSRMMVDFHQKAGTGKLTGVHRKYSTYKFGCAAKILPAQFMLESGGTAPPPSGAI

SEQ ID NO: 2453 - DNA, 1329 bp, Zea mays
  CDS (1)..(1329)
atggcctcgcgcaaccacaacgccgccgctccgcagcttcaccatcacaaccgagccggtgttcccgctcttggaaagaccaaggccgtgcccgcccgacctgacgctctgaaccggcgaccccctctcggcgatataggcaacctcgtcagcgtccgcccagccacagggaacccgcaggagcaggtcaatcgccccatcactagaagcttcggcgctcaactcgtcaagaaagcgcaggcgaaggccgcaatcaagaatgccgcaatcctgcctgcgaggcatgcgccgaggcaggagaggaaggctcctgtcaagcagcacccgccgccggaggatatcatagtactcagctccgattctgaacagagcagggcgcagtccgagagcagcgctagctccgtccgctccaggaggaaggccatcaacaccctttcttccgtgctctcggctcgctcaaaggctgcctgtggaatcgctggtaagcctagacaagtggtcgatgacatcgacaagctggacgtcaacaatgagctcgcggtggtggaatacattgaggacatctacacgttctacaagattgctcagcacgagagacggccatgtgactacatcgacgcccaactcgagatcaactctaagatgagggctatcctggctgattggataatcgaagtacaccacaagtttgaactgatgcccgaaactctctacctgaccatgtacatcatcgatcagtacctctcgctgcaaccagtcctgcgtaaggagctgcagcttgtcggcgtttcatctatgctgatcgcctgcaagtacgaggagatttgggccccagaggtgaacgacttcatcctcatatcagacagtgcatacagtagagaacagattctttcgatggagaagggaattctgaataggctggagtggaacctgactgtccctacagtgtatatgttccttgtccgttttctgaaggccgcaacattgggcggcaaagttgagaaagagatggagaatatggtgttcttcttcgctgaattggcgctgatgcaatacgatttggtgacgcgcctgccatcgctggtcgctgcttctgctgtctacgcagccagactcactctcaagagggctcccctttggaccgacaccctcaagcaccacacgggcttcagggagtcagaggcagagctcattgaatgcacgaagatgctggtgatcgcgcactcgactgcccctgagagcaagctgagggttgtatacaagaagtattccagcgagcagttcggaggggtcgcgctgcgtccacccgcagaggagatctgcaagtga

SEQ ID NO: 2454 - protein, 442 aa, Zea mays
MASRNHNAAAPQLHHHNRAGVPALGKTKAVPARPDALNRRPPLGDIGNLVSVRPATGNPQEQVNRPITRSFGAQLVKKAQAKAAIKNAAILPARHAPRQERKAPVKQHPPPEDIIVLSSDSEQSRAQSESSASSVRSRRKAINTLSSVLSARSKAACGIAGKPRQVVDDIDKLDVNNELAVVEYIEDIYTFYKIAQHERRPCDYIDAQLEINSKMRAILADWIIEVHHKFELMPETLYLTMYIIDQYLSLQPVLRKELQLVGVSSMLIACKYEEIWAPEVNDFILISDSAYSREQILSMEKGILNRLEWNLTVPTVYMFLVRFLKAATLGGKVEKEMENMVFFFAELALMQYDLVTRLPSLVAASAVYAARLTLKRAPLWTDTLKHHTGFRESEAELIECTKMLVIAHSTAPESKLRVVYKKYSSEQFGGVALRPPAEEICK

SEQ ID NO: 2455 - DNA, 1275 bp, Zea mays
  CDS (1)..(1275)
atggcggcgcgggcggctgacgagaacaggagaccggcggcagggaagcccgcgccaggcgtccgagacatggcgagccggcgcgcgctcacggacatcaagaacctcgtcggggctgccccgtacccctacgccgtcgccaagaagcccatgctgcagaagagcaaaagggacgaaaagcagccagcgttggcaagcagccggcccatgacaaggaaattcgccgcctccttggcgagcaagggccaacctgaatgtcagccgatcgtagctgatccagaacccgaagtttgtcaacagaaggaatcagtaggcgatggcaccgttgatattgacgtggaactctacgagctggtcgacggtagtgatagtgacatcgacatgggtgcgacagagaacaaggacattatgaacgaagatgaattgctcatggatattgacagtgcagactcggggaacccgcttgctgcaacagaatatgttaaagagctttacaccttttacagagaaaatgaggctaagagttgtgtaaggccagattacatgtccagccaacaagacataaactcaaagatgagagcaattctgattgactggctgattgaggttcactacaagtttgaactgatggatgagacgctctttcttatggtaaacataatagatagattcttggaaaaggaagtggttccaaggaagaagctacaactggttggagtcacagctatgctgctcgcttgtaaatatgaggaggtatctgttccagttgttgaggaccttgtgctgatatctgaccgtgcctacacaaaagggcaaattctagaaatggaaaagttgattctgaacacgctgcagttcaacatgtctgttccaacaccttatgtcttcatgaagaggtttctgaaagctgcagatgcagataaacagcttgagctagcgtcatttttcatgctggagctctgcttggtagaataccaaatgctgaattatcggccttcgcatctggctgctgctgcggtttatactgcacagtgtgctatcaatcgttgccagcactggacaaaggtctgcgagtctcatagcagatacactagcgaccaactcctggagtgctcgaggatgatggtagattttcaccagaaggctggaaccagtaagctcactggcgtgcacaggaagtacagtacctacaagttcggttgcgtggccaagattttgcctgcgcagttcctgctggagtcgggagggacaccgcctccttcaggtgcaaactag

SEQ ID NO: 2456 - protein, 424 aa, Zea mays
MAARAADENRRPAAGKPAPGVRDMASRRALTDIKNLVGAAPYPYAVAKKPMLQKSKRDEKQPALASSRPMTRKFAASLASKGQPECQPIVADPEPEVCQQKESVGDGTVDIDVELYELVDGSDSDIDMGATENKDIMNEDELLMDIDSADSGNPLAATEYVKELYTFYRENEAKSCVRPDYMSSQQDINSKMRAILIDWLIEVHYKFELMDETLFLMVNIIDRFLEKEVVPRKKLQLVGVTAMLLACKYEEVSVPVVEDLVLISDRAYTKGQILEMEKLILNTLQFNMSVPTPYVFMKRFLKAADADKQLELASFFMLELCLVEYQMLNYRPSHLAAAAVYTAQCAINRCQHWTKVCESHSRYTSDQLLECSRMMVDFHQKAGTSKLTGVHRKYSTYKFGCVAKILPAQFLLESGGTPPPSGAN

SEQ ID NO: 2457 - DNA, 1275 bp, Zea mays
  CDS (1)..(1275)
atggagaatctgagatctcaaaactgccaccaaggtgttgccatggagggagtcaagtttgcgccggagaaggccaacaccaaccggagagccctcagcgacatcaagaacataataggaggcccacaccagcacttggcggtcagcaagagggctctgtcagaaaaaccagctgctgctgctgctgcaaatgctaaagatcaagctggctttgttggacaccgtccagtcaccaggaaattcgctgcaacattggcaacccaacctacagttgcccttctggacccaattggaagtgaaagactgaaaagaaacgctgatacggcatttcacacacctgcagatatggaaagcacaaaaatgacagatgacagtcccttgcctatggtgtcggagatggatgaaatgatgagtcctgaactgaaagagatcgagatggaagatattgaggaggcagcacctgatattgacagtggtgatgcaggaaattctctggctgtggctgactatgtagatgaaatttacagattttacaggaaaactgagggtgcaagctgcgtccctacaaattatatgtcaagccaaactgatataaatgagaagatgcgtggcattctaattgactggctcatagaggtacactacaaactagagctgttggaggagacccttttcctaaccgtgaacatcatagacagattcttggcacgtgaaaatgtggtgcggaagaagcttcagttagctggtgtaactgctatgttgctcgcgtgcaagtatgaagaagtgagcgtacctgtggtcgaggatctgatcttgatctgtgatcgtgcatacacaagggctgacattcttgagatggagaggaggatagtgaacacacttaatttcaatatgtcggtgccgactccatactgtttcatgagaaggtttctaaaggcagcacaatcagagaagaagctcgaactcctgtctttcttcatgatcgagttgagtcttgtcgaatatgagatgctccagttctgcccgtctatgctagcagccgctgccatctacaccgctcaatgcaccataaatgggttcaagtcctggaacaaatgctgtgagctgcacacaaaatattcagaagaacatctaatggtttgctctaggatgatggttgaactgcaccaaagagcagctcatgggaaacttacaggggtccatagaaagtacaacacttctagatatagctatgctgcgaaatcggaacccgcaactttcttgctggatgcctga

SEQ ID NO: 2458 - protein, 424 aa, Zea mays
MENLRSQNCHQGVAMEGVKFAPEKANTNRRALSDIKNIIGGPHQHLAVSKRALSEKPAAAAAANAKDQAGFVGHRPVTRKFAATLATQPTVALLDPIGSERLKRNADTAFHTPADMESTKMTDDSPLPMVSEMDEMMSPELKEIEMEDIEEAAPDIDSGDAGNSLAVADYVDEIYRFYRKTEGASCVPTNYMSSQTDINEKMRGILIDWLIEVHYKLELLEETLFLTVNIIDRFLARENVVRKKLQLAGVTAMLLACKYEEVSVPVVEDLILICDRAYTRADILEMERRIVNTLNFNMSVPTPYCFMRRFLKAAQSEKKLELLSFFMIELSLVEYEMLQFCPSMLAAAAIYTAQCTINGFKSWNKCCELHTKYSEEHLMVCSRMMVELHQRAAHGKLTGVHRKYNTSRYSYAAKSEPATFLLDA

SEQ ID NO: 2459 - DNA, 25 bp, Artificial sequence
  primer
atgcatcataactcacagtctttga

SEQ ID NO: 2460 - DNA, 26 bp, Artificial sequence
  primer
ttagttagatctttctactctgtgtt

SEQ ID NO: 2461 - protein, 261 aa, Artificial sequence
  consensus sequence
  Variant (2)..(4): Xaa in position 2 to 4 is any amino acid
  Variant (6)..(12): Xaa in position 6 to 12 is any amino acid
  Variant (14)..(20): Xaa in position 14 to 20 is any amino acid
  Variant (21)..(21): Xaa in position 21 is any or no amino acid
  Variant (23)..(31): Xaa in position 23 to 31 is any amino acid
  Variant (32)..(35): Xaa in position 32 to 35 is any or no amino acid
  Variant (38)..(39): Xaa in position 38 to 39 is any amino acid
  Variant (41)..(41): Xaa in position 41 is any amino acid
  Variant (44)..(46): Xaa in position 44 to 46 is any amino acid
  Variant (48)..(52): Xaa in position 48 to 52 is any amino acid
  Variant (54)..(55): Xaa in position 54 to 55 is any amino acid
  Variant (59)..(59): Xaa in position 59 is any amino acid
  Variant (61)..(65): Xaa in position 61 to 65 is any amino acid
  Variant (68)..(68): Xaa in position 68 is any amino acid
  Variant (70)..(75): Xaa in position 70 to 75 is any amino acid
  Variant (76)..(79): Xaa in position 76 to 79 is any or no amino acid
  Variant (83)..(83): Xaa in position 83 is any amino acid
  Variant (85)..(90): Xaa in position 85 to 90 is any amino acid
  Variant (92)..(92): Xaa in position 92 is any amino acid
  Variant (97)..(99): Xaa in position 97 to 99 is any amino acid
  Variant (101)..(109): Xaa in position 101 to 109 is any amino acid
  Variant (111)..(112): Xaa in position 111 to 112 is any amino acid
  Variant (114)..(121): Xaa in position 114 to 121 is any amino acid
  Variant (123)..(128): Xaa in position 123 to 128 is any amino acid
  Variant (130)..(130): Xaa in position 130 is any amino acid
  Variant (132)..(135): Xaa in position 132 to 135 is any amino acid
  Variant (136)..(136): Xaa in position 136 is any or no amino acid
  Variant (138)..(141): Xaa in position 138 to 141 is any amino acid
  Variant (143)..(143): Xaa in position 143 is any amino acid
  Variant (146)..(147): Xaa in position 146 to 147 is any amino acid
  Variant (150)..(154): Xaa in position 150 to 154 is any amino acid
  Variant (155)..(169): Xaa in position 155 to 169 is any or no amino acid
  Variant (171)..(182): Xaa in position 171 to 182 is any amino acid
  Variant (185)..(186): Xaa in position 185 to 186 is any amino acid
  Variant (189)..(189): Xaa in position 189 is any amino acid
  Variant (191)..(197): Xaa in position 191 to 197 is any amino acid
  Variant (199)..(202): Xaa in position 199 to 202 is any amino acid
  Variant (203)..(216): Xaa in position 203 to 216 is any or no amino acid
  Variant (218)..(253): Xaa in position 218 to 253 is any amino acid
  Variant (254)..(259): Xaa in position 254 to 259 is any or no amino acid
YXXXIXXXXXXXEXXXXXXXXYXXXXXXXXXXXXXMRXXLXDWXXXVXXXXXLXXETLXLXXXXXDRXLXXXXXXXXXXLQLXGXXXXXXAXKYEEXXXPXXXXXXXXXDXXYXXXXXXXXEXXXXXXLXFXXXXXPXXXXFXRRXXKAXXXXXXXXXXXXXXXXXXXXEXXXXXXXXXXXXPSXXAAXAXXXXXXXLXXXXXXXXXXXXXXXXXXWXXXXXXXXXXXXXXXXXXXXXXXXXXXXXXXXXXXXXXXXXXKY

SEQ ID NO: 2462 - protein, 34 aa, Artificial sequence
  protein pattern
  Variant (2)..(3): Xaa in position 2 to 3 is any amino acid
  Variant (4)..(4): Xaa in position 4 is Leu or Val
  Variant (5)..(5): Xaa in position 5 is any amino acid
  Variant (6)..(6): Xaa in position 6 is Asp, Glu or Asn
  Variant (8)..(8): Xaa in position 8 is Ile, Leu or Val
  Variant (9)..(10): Xaa in position 9 to 10 is any amino acid
  Variant (11)..(11): Xaa in position 11 is Ile or Val
  Variant (12)..(16): Xaa in position 12 to 16 is any amino acid
  Variant (18)..(19): Xaa in position 18 to 19 is any amino acid
  Variant (20)..(20): Xaa in position 20 is Asp or Glu
  Variant (23)..(23): Xaa in position 23 is Phe or Tyr
  Variant (25)..(27): Xaa in position 25 to 27 is any amino acid
  Variant (28)..(28): Xaa in position 28 is any or no amino acid
  Variant (30)..(30): Xaa in position 30 is any or no amino acid
  Variant (32)..(32): Xaa in position 32 is Gln or Arg
  Variant (33)..(33): Xaa in position 33 is Phe or Tyr
  Variant (34)..(34): Xaa in position 34 is Leu or Met
RXXXXXWXXXXXXXXXLXXXTLXLXXXXIXDXXX

SEQ ID NO: 2463 - DNA, 1818 bp, Saccharomyces cerevisiae
  CDS (1)..(1818)
atgtcgtcaagcctttttatcctggatgaaaatctggagccattggtatcgaagaatattagagcactaccgaatctatcgtcggttctttcaagtttcaaacaatgttatcatgacgggtcgcctccaattctctcccaaaacgattggttctttatacatttgaagagagactttctgcatttcgtttcagtgatacataccacagacaaaccaaatatagacttaatgactatactagcctttttggaacaattttatcatcttttacaaaaatattttgaaatcgaggtcttaactaagaatgtcatactggacaacatcttacttgtcctggagttgattgatgaatgtatagactttggtatcgtacaagtgacggatccaagtatcatcaaggactacattcgtgtgaaggtcaacgtaccaagagttacagtagacaatgaggagtggagccctggtgaagagagcagtagtagtagcggtagcgatagcgatagcgagtacagcaatactaataagaggaaggataagaagaagaaaaggaagaagaaaaagggcactaaagggaaaagcgtgggcaaaagtaaattaaaaagtataatggtaaacaataaagaaaataggggcataaacgtggtggaaactgtcaaggagacactaaggaacaagaatgataccggtaaagaagccgctaatgacgagctccccaatgacggtaatgatttatacatcaatggcgatattgcgaagacgattataatgcccatatcatggagaacaaaggggatacattacgccaaaaacgagttctttcttgatgttattgaacgtgttcagtacttgatggattttgaaaaaggagtgattaggaaaaatctgatacatggagagattgtgtgcagatgctatttatcagggatgcccaaactgaaaatatccataaacaagatactgaacagggacccccagttcatgtcgaattccagctttcatcagtgtgtttcactagattccataaacactattgaaaaagatgaagaaaagaatagtgacgatgatgctggtttgcaggccgccacagatgcaagagaaatcgaatttataccgccggatggcgaatttgttctttgccaatacgagttgaagagacatgtaaaggatgcgccgatggtgaggttgaaagattttgaaatcaaacctaaactgaagaagtttaaaatccaaattgtaaccaaaattcaaacaaattttaaacccaccaactcaacgtcgaagctaaacgtgagaattcccctgacaaaagtcttccaggaatataaaatagacctcagcaagcaaattagattcaaggcaaacatcggcaaggtcgtgtttaacttgagtgacgattttctcctctgggagatacaaaccatgaaggggcaccgagaacatagcacaaacaagagctcacagtacaacagcgacgaagatgatccaaatacgtgtgcatccatggtggcagagttccccctcttcaaccaggaagaatatgaccgcctgcaagaagaaatgaaaacctcaatgaatccgccgcccttgcgcacgggacccaggctggaagaactatatagacaagtgcacgaccaacaaacttcccacgttactcctcgagataagttggtcaacattgatttcgagattccgtactgtacatgcagtggcctgaaagttgagtacttgaaggtcgaagagccacaattgcagtaccagtctttcccctgggtcagatacaagaccgtcagcgacgaagagtacgcatatattgtttga

SEQ ID NO: 2464 - protein, 605 aa, Saccharomyces cerevisiae
MSSSLFILDENLEPLVSKNIRALPNLSSVLSSFKQCYHDGSPPILSQNDWFFIHLKRDFLHFVSVIHTTDKPNIDLMTILAFLEQFYHLLQKYFEIEVLTKNVILDNILLVLELIDECIDFGIVQVTDPSIIKDYIRVKVNVPRVTVDNEEWSPGEESSSSSGSDSDSEYSNTNKRKDKKKKRKKKKGTKGKSVGKSKLKSIMVNNKENRGINVVETVKETLRNKNDTGKEAANDELPNDGNDLYINGDIAKTIIMPISWRTKGIHYAKNEFFLDVIERVQYLMDFEKGVIRKNLIHGEIVCRCYLSGMPKLKISINKILNRDPQFMSNSSFHQCVSLDSINTIEKDEEKNSDDDAGLQAATDAREIEFIPPDGEFVLCQYELKRHVKDAPMVRLKDFEIKPKLKKFKIQIVTKIQTNFKPTNSTSKLNVRIPLTKVFQEYKIDLSKQIRFKANIGKVVFNLSDDFLLWEIQTMKGHREHSTNKSSQYNSDEDDPNTCASMVAEFPLFNQEEYDRLQEEMKTSMNPPPLRTGPRLEELYRQVHDQQTSHVTPRDKLVNIDFEIPYCTCSGLKVEYLKVEEPQLQYQSFPWVRYKTVSDEEYAYIV

SEQ ID NO: 2465 - DNA, 1269 bp, Aedes aegypti
  CDS (1)..(1269)
atgtcctcatcagcaattttcattctggacgccaaagggaaggtgttgatatcccgaaattaccgtggccacatcgacatgggcgtaatcgacaagtttatgccacttttgatggagaaggaggaagaaggtctgataacgccgattctgcagactccggaatgcacttttgcgtacgtcaagaccaacaatctgtacttagtgtccgtaacaagaagcaatgccaacattgcgctggtgtttgtgtttctacacaaagttgttcaggttttcacggaatatttcaaagaactggaggaggaaagtatccgcgacaattttgtcgtgatctacgagttgatggatgagctgattgatttcggctacccgcaaaccacagacagcaagatccttcaggaatacatcacccaggagggtcacaaactggagatacaaccccggattccgatggccgtgacgaatgccgtttcgtggcgttccgaaggcatcaagtataggaaaaacgaagtgttcctggatgtgatcgaaagcgtcaacctgttggccaacgccaatggaaacgtgctccggagtgaaattgtgggcgccatcaaaatgcgcgtctacttgtccggaatgcctgagctccggctcggattgaatgataaagttctgttcgaaagcaccggtaggggtaaatcaaagtcggtggaactggaggacgtgaaattccaccagtgcgtgcgattgtcccgcttcgaaaatgatcgcaccatttcattcattccaccggatggcgagtttgagctgatgtcctatcgtttgaacacccacgtgaaacctttgatctggatcgaatcggtaatagaacggcacgcccacagtcgggtggagtacatgatcaaggccaagtcgcagttcaagcgccgttcgacggccaacaacgtggaaatagtcattccggtgccggctgatgccgattcgcccaagtttaagaccaccattggaagtgtcaagtacgccccggagcagaatgccatcacctggaccatcaagtcgttcccgggtggaaaggagtatctgatgagagcccactttggacttcccagtgtcgagtgcgaggactcggaaggcaaacctccaattcaggtcaagtttgagattccgtacttcaccacgtccggaattcaggttcgttatctgaagatcatcgagaagagtggttatcaagcattgccgtgggtgcgctacattacccagaacggagactaccagctgagaacgaactaa

SEQ ID NO: 2466 - protein, 422 aa, Aedes aegypti
MSSSAIFILDAKGKVLISRNYRGHIDMGVIDKFMPLLMEKEEEGLITPILQTPECTFAYVKTNNLYLVSVTRSNANIALVFVFLHKVVQVFTEYFKELEEESIRDNFVVIYELMDELIDFGYPQTTDSKILQEYITQEGHKLEIQPRIPMAVTNAVSWRSEGIKYRKNEVFLDVIESVNLLANANGNVLRSEIVGAIKMRVYLSGMPELRLGLNDKVLFESTGRGKSKSVELEDVKFHQCVRLSRFENDRTISFIPPDGEFELMSYRLNTHVKPLIWIESVIERHAHSRVEYMIKAKSQFKRRSTANNVEIVIPVPADADSPKFKTTIGSVKYAPEQNAITWTIKSFPGGKEYLMRAHFGLPSVECEDSEGKPPIQVKFEIPYFTTSGIQVRYLKIIEKSGYQALPWVRYITQNGDYQLRTN

SEQ ID NO: 2467 - DNA, 1287 bp, Arabidopsis thaliana
  CDS (1)..(1287)
atggcaggggcggcctcagcgctgtttctgctcgatatcaaaggtcgtgttctcgtgtggcgcgattaccgtggcgatgtcaccgctgctcaagctgagcgtttcttcaccaaactcatcgagacagagggtgattcacagtcaaatgatccggttgcttatgataatggcgtgacctacatgtttgtacagcatagtaacatttacctcatgatagcgtccagacagaactgtaatgctgccagtcttctcttcttcttgcatcgtgtagtcgatgtcttcaagcattacttcgaggagttagaggaagaatctttgagagataactttgtggtagtgtatgagttacttgacgagatgatggactttggttaccctcagtttactgaggcaagaatccttagtgaattcatcaagactgatgcatatagaatggaagttacacagagacctccaatggctgtcactaattctgtctcatggaggagtgaggggttaaagtttaagaaaaacgaagttttcttggatgtgatagagagtgtaaatatccttgtgaacagtaatgggcaaattgtcaggtctgatgtcgttggagctttgaagatgcgaacatacttgagtggaatgccagagtgtaagctaggcttgaatgacagaatattgttggaggcacagggacgagcaataaaaggaaaagccattgatttggaggacatcaaatttcatcagtgtgttcgattagcccgttttgagaacgacaggacaatatcattcataccacctgatggatcttttgatcttatgacgtatagactcagtactcaggtaaagcctcttatatgggtggaagcgcatatagagaggcattccagaagtcgtgttgagatgctagtaaaagctagaagccaattcaaggacagaagctatgcaacaagtgttgagattgagttacctgtaccaactgatgcgtataaccccgatgtaagaacatctctcgggtcggccgcatatgctcctgagaaagatgcactggtctggaagatacaatatttctatgggaacaaggagcatacattgaaagcagatttccatcttccaagtatagccgcagaggaagcaacgcctgagcgaaaagctccaatccgtgtcaaatttgagatcccaaaattcatagtttcaggaatacaggttcgatacctgaagatcattgagaagagtgggtaccaggcacatccatgggtgagatatataaccatggctggtgagtacgaactgagactcatgtaa

SEQ ID NO: 2468 - protein, 428 aa, Arabidopsis thaliana
MAGAASALFLLDIKGRVLVWRDYRGDVTAAQAERFFTKLIETEGDSQSNDPVAYDNGVTYMFVQHSNIYLMIASRQNCNAASLLFFLHRVVDVFKHYFEELEEESLRDNFVVVYELLDEMMDFGYPQFTEARILSEFIKTDAYRMEVTQRPPMAVTNSVSWRSEGLKFKKNEVFLDVIESVNILVNSNGQIVRSDVVGALKMRTYLSGMPECKLGLNDRILLEAQGRAIKGKAIDLEDIKFHQCVRLARFENDRTISFIPPDGSFDLMTYRLSTQVKPLIWVEAHIERHSRSRVEMLVKARSQFKDRSYATSVEIELPVPTDAYNPDVRTSLGSAAYAPEKDALVWKIQYFYGNKEHTLKADFHLPSIAAEEATPERKAPIRVKFEIPKFIVSGIQVRYLKIIEKSGYQAHPWVRYITMAGEYELRLM

SEQ ID NO: 2469 - DNA, 1287 bp, Arabidopsis thaliana
  CDS (1)..(1287)
atggcaggagctgcctccgcgctgtttctgcttgatatcaagggacgcgttctcgtctggcgtgattatcgtggcgatgtctccgctgctcaagccgagcgattcttcactaagctcatcgagaaagagggtgattcacagtcaaatgatccagttgcttacgataatggggtgacttatatgtttgtacaacatagtaatgtatacttgatgatagcatccaggcagaattgtaatgctgccagtcttctcttctttcttcaccgcgttgtcgatgttttcaagcattacttcgaggagttagaagaggaatcattgagggataactttgtggtagtgtatgagctacttgacgagatgatggactttggttaccctcagtataccgaagcaagaattctcagtgaattcatcaagactgatgcatatagaatggaagttacacagagacctccaatggctgtgacgaatgctgtctcctggaggagtgagggaatacagtacaagaagaatgaagttttcttggatgttattgagaatgtaaatattcttgtcaacagtaatgggcaaattgtcaggtctgatgttgttggagcgctgaagatgcgaacttacttgactggaatgccagagtgtaagttaggactgaatgatagagtattgctggaagcgcagggacgagcaactaagggaaaagccattgatttggaggacatcaaatttcatcagtgtgttcgattggcccgttttgaaaacgataggacgatatctttcataccacctgatggggcttttgatctgatgacatatagactcagcactcaggtaaagccacttatatgggtggaagcacaaatagaaagtcattcaagaagtcgtgttgagatgctcataaaagctagaagtcagttcaaggaacgaagcaccgcaacgaacgttgagattgagttgcctgtaccaaccgatgcatctaaccccaccgttaggacatctctagggtctgcctcttatgctcctgaaaaagatgcgttagtctggaaaatcaaatctttcccggggaacaaggagtacatgttaagggcagagttccatcttccaagtatcactgcagaggaagcaactcctgagcgaaaggctcctatccgtgtcaaatttgagatcccttatttcactgtttcagggattcaggttcggtacctaaagattattgagaagagtgggtaccaagcacttccatgggtgagatacataaccatggctggtgagtacgaactaagactcgtgtaa

SEQ ID NO: 2470 - protein, 428 aa, Arabidopsis thaliana
MAGAASALFLLDIKGRVLVWRDYRGDVSAAQAERFFTKLIEKEGDSQSNDPVAYDNGVTYMFVQHSNVYLMIASRQNCNAASLLFFLHRVVDVFKHYFEELEEESLRDNFVVVYELLDEMMDFGYPQYTEARILSEFIKTDAYRMEVTQRPPMAVTNAVSWRSEGIQYKKNEVFLDVIENVNILVNSNGQIVRSDVVGALKMRTYLTGMPECKLGLNDRVLLEAQGRATKGKAIDLEDIKFHQCVRLARFENDRTISFIPPDGAFDLMTYRLSTQVKPLIWVEAQIESHSRSRVEMLIKARSQFKERSTATNVEIELPVPTDASNPTVRTSLGSASYAPEKDALVWKIKSFPGNKEYMLRAEFHLPSITAEEATPERKAPIRVKFEIPYFTVSGIQVRYLKIIEKSGYQALPWVRYITMAGEYELRLV

SEQ ID NO: 2471 - DNA, 1293 bp, Gibberella zeae PH-1
  CDS (1)..(1293)
atggcttccgcactattcttcctagacctcaagggcaagacccttctcgctcgaaactatcgtggtgacatccccatgtcagctgtcgaaaagttccctgtactcctttcagaagctgaggaagattcatctgctgttccaccatgcttctcccacgaaggcatcaactacctctacatccgtcacaacaacctttaccttctcgcccttacgaaacgaaataccaatgccgccgaaatcctattgttcctccacaaggtcgtcgaggtctttaccgaatatttcaaggcgctagaagaagagtccattcgcgacaactttgtcatcatctacgaacttctcgacgagatgatggactttggctaccctcaaacaacagaatccaagatccttcaagagtacatcacccaggaatcccacaagctcgagatccaggcccgaccacccattgccgtcacaaatgccgtctcgtggcgatcagagggtattcgctaccgcaagaacgaggtcttccttgatgtcgtcgagtcccttaacctgttggtttccgcaaacggcaacgtcctccgttcagagattcttggcgccattaagatgaagtgctacctcagtggtatgcccgagttacgcctgggccttaatgataaggtcatgtttgagacaactggacgtgctacccgaggtaaggctatcgaaatggaggatgtcaaatttcaccaatgtgtacgactatcacgtttcgaaaacgaccgcaccatctctttcatcccccctgatggcgaattcgagctcatgtcctaccgtctgaacactcaagtcaagccattaatttgggtcgagtgtgttgttgagtctcactcaggatcccgtatcgaatacatgctcaaggcgcgcgctcagttcaagcgtcgcagtaccgccaacaacgtcgaaatcgtggttcccgttcctgacgatgccgatagccctcgtttccgcacaaacattggatccgttcactatgcacccgaacaaagcgccattgtctggaagattaagcagtttggtggtggcaaagagttcctcatgcgcgctgagctgggcctgccaagtgtgaggggtgatgatgaacaaggcaagggtgctaagcgacctatccaggtcaagttcgagatcccctactttactacaagcggtattcaggttcggtatctgaagattaccgagccaaagttgcaatacccttcactcccatgggtgcgatacatcactcaatctggagatatcgccgtacgacttcccgacgcagtctga

SEQ ID NO: 2472 - protein, 430 aa, Gibberella zeae PH-1
MASALFFLDLKGKTLLARNYRGDIPMSAVEKFPVLLSEAEEDSSAVPPCFSHEGINYLYIRHNNLYLLALTKRNTNAAEILLFLHKVVEVFTEYFKALEEESIRDNFVIIYELLDEMMDFGYPQTTESKILQEYITQESHKLEIQARPPIAVTNAVSWRSEGIRYRKNEVFLDVVESLNLLVSANGNVLRSEILGAIKMKCYLSGMPELRLGLNDKVMFETTGRATRGKAIEMEDVKFHQCVRLSRFENDRTISFIPPDGEFELMSYRLNTQVKPLIWVECVVESHSGSRIEYMLKARAQFKRRSTANNVEIVVPVPDDADSPRFRTNIGSVHYAPEQSAIVWKIKQFGGGKEFLMRAELGLPSVRGDDEQGKGAKRPIQVKFEIPYFTTSGIQVRYLKITEPKLQYPSLPWVRYITQSGDIAVRLPDAV

SEQ ID NO: 2473 - DNA, 1371 bp, Candida glabrata CBS 138
  CDS (1)..(1371)
atggcatctgcgatatatttttgtgacaacaagggtagacctcttttatcgagaaagtatagagacgacataccgttctcggccatagataggtttcctatcctcctctcaaatttcgaagaagagacaaatctgatacctccttgtatcgagcacaatggtatacaattcctattcatccaacacaatgatttataccttgtagcaattgctacctcaatttcatgcaatgctgccctaatttttagctttttacacaaagttatcgaagtactttctgagtatctaaaagcggttgaagaagaatccattagggataattttgttatcatatatgaattactagatgagatgatggattatgggattccgcaaatcacagagccaaagatgttgaaacaatacattacccaaaagtctttcaaactgaagaaagcagccaaaaagaagagaaatgctgctagacctccaacatcactaacaaattctgtaagttggcgtcctgaaggtataaaacacaagaaaaacgaggcatttctggatattatcgagtcgatcaatatgctaatgactcagaagggacaagtcttgagatcagagataattggtgaggttaaagtaaagtcaaagctttcaggtatgcccgacttgaagcttggcataaacgacaaagggttattttcaaagtatttggaaggtgatgagaacggtgttcctatagcaccagatgacagtagtgttgatgagtccaaacctaaaaagaagagatcaaacaatatggaacttgaggacttgaaatttcatcaatgtgttcgtttaagcaagtttgaaaacgaaaagcaaattacctttataccacccgatggagactttgagttaatgagctacagattatctacggcaatcaaaccactaatttggtgtgacgtcaatattaaaactcattccaaatcaagaatagaaatattttgcagagccaaagctcagataaagaagaaatcaacagccactaacgtggagatattaattccagttcctgaagacgcagatactccagtattcaaatactcacacgggtctattaaatacgtgcctgaaaagaatgcaatcttatggaaaattagaacattcccaggagacaaggaatattctatggcggctgaaatgggccttccatctaccaatgctggagaagaatcagaaaagttaaaaagaccagtgcaagtcaagtttcaaataccttatttcaccacatccggcattcaggtacgctatctgaaaattgaagaaaaaaatcttcaatacaagagctatccttgggttagatatattactaagagcggtgatgactatacaattagactctcttga

SEQ ID NO: 2474 - protein, 456 aa, Candida glabrata CBS 138
MASAIYFCDNKGRPLLSRKYRDDIPFSAIDRFPILLSNFEEETNLIPPCIEHNGIQFLFIQHNDLYLVAIATSISCNAALIFSFLHKVIEVLSEYLKAVEEESIRDNFVIIYELLDEMMDYGIPQITEPKMLKQYITQKSFKLKKAAKKKRNAARPPTSLTNSVSWRPEGIKHKKNEAFLDIIESINMLMTQKGQVLRSEIIGEVKVKSKLSGMPDLKLGINDKGLFSKYLEGDENGVPIAPDDSSVDESKPKKKRSNNMELEDLKFHQCVRLSKFENEKQITFIPPDGDFELMSYRLSTAIKPLIWCDVNIKTHSKSRIEIFCRAKAQIKKKSTATNVEILIPVPEDADTPVFKYSHGSIKYVPEKNAILWKIRTFPGDKEYSMAAEMGLPSTNAGEESEKLKRPVQVKFQIPYFTTSGIQVRYLKIEEKNLQYKSYPWVRYITKSGDDYTIRLS

SEQ ID NO: 2475 - DNA, 1797 bp, Candida glabrata CBS 138
  CDS (1)..(1797)
atgtcctcttcgatatatatatttgatgagactttggaaccgctagtatctaagagtgtgaaaggtctaccgaatgtcaatgagctaggagatttgttccgataccatgtgcgacaatcgcaaaaccctattatagatgtgtacaattggcgattcgtctatatcaaacgcgatacactatactttgttgctgtggtagatgctgctgatgatgctatcgcgaactatttagcgattttaacgtacttggagcagttgtaccagttatttagggattacgttggtgtgaaagtactcgatcggaacttagtattagacaacacattgctagtcatggagctcattgatgaaacattggactacggaattgttcaattgactgagccaagcatcatgaaggactatataagggttagagtaaatttgcctgaacaacgcataatgctggaagagatatggaataccgattccgattctgactcggatgggaatagtaaaaggaaacacaaacataagtcaaaaggggataaagataaacctgccttggggaaagtcccattatccaaagaggaactagacaaagtgctcaagacaagtaaagacaaagtatacaaaaaaattaaggataatataaacgaattggaaaaaatcggtaaatttagaggtaaagatgaatatgatgacgatgccaatgagaatgaaacattcataaacagttatatcgctaaaacgacgatcatgcccgtatcttggcgtgcgaagggtatccattatgcaaaaaacgaatttttccttgatgtaatcgaaaagttgcaatatttagtggatttagagtctggtatggttagaagaagtcttatccatggtcaaattgtgtgtagatcgtatttgtctggtatgcctaaactgaaaatgagtttaaacaaactattacaaaatgataaacagtttatttctcaggtacagttccaccaatgtgtttctttggattcgatagaaaaggttataaagtatgccgaagaacattcagatgaactaaagacattaaaacacacagagcataatgctgaaagtgaaattgaatttatccctccagatggtgattttacattatgttcttatgaactaaaaagacatattagagatcctcctatggtcaaactttgctcatttgaaataacaccaaagtggaaaaaatataaactcaaaatttctgctgcagtagaaacacactttaagccaacaaattctacatcaaaactagatgttaagattcccatttccaaggtattcaaggactaccagattgatctaaaaaagccaataaagtttaaaacatcgaatggtcgagtagtctataatattagcgatgatttcttattatgggagatcggtgttattaaaggtggtaaaatgcatggctcaaaggaagatataagcaagtttgacaatgtcgctacaatggcagcggagtttggactattcaacgaggaagagtatgaaagagaaaggaaggaaagagaaacttcaatgaatccaccaccactgaggacaggccctaagcttgaagatatatataaagaaactcacgaggagaatgacggatataattctgtgggtcaaaagccaaagaataatctcaacttactttcaatggattttgagattccttactgcacatgtagtggtttgaaagttgagtatttgaagattgatgaagaccaattacaataccagtcattcccatgggtgagatataaaacgattaacgatgacgaatatgcatatattatttaa

SEQ ID NO: 2476 - protein, 598 aa, Candida glabrata CBS 138
MSSSIYIFDETLEPLVSKSVKGLPNVNELGDLFRYHVRQSQNPIIDVYNWRFVYIKRDTLYFVAVVDAADDAIANYLAILTYLEQLYQLFRDYVGVKVLDRNLVLDNTLLVMELIDETLDYGIVQLTEPSIMKDYIRVRVNLPEQRIMLEEIWNTDSDSDSDGNSKRKHKHKSKGDKDKPALGKVPLSKEELDKVLKTSKDKVYKKIKDNINELEKIGKFRGKDEYDDDANENETFINSYIAKTTIMPVSWRAKGIHYAKNEFFLDVIEKLQYLVDLESGMVRRSLIHGQIVCRSYLSGMPKLKMSLNKLLQNDKQFISQVQFHQCVSLDSIEKVIKYAEEHSDELKTLKHTEHNAESEIEFIPPDGDFTLCSYELKRHIRDPPMVKLCSFEITPKWKKYKLKISAAVETHFKPTNSTSKLDVKIPISKVFKDYQIDLKKPIKFKTSNGRVVYNISDDFLLWEIGVIKGGKMHGSKEDISKFDNVATMAAEFGLFNEEEYERERKERETSMNPPPLRTGPKLEDIYKETHEENDGYNSVGQKPKNNLNLLSMDFEIPYCTCSGLKVEYLKIDEDQLQYQSFPWVRYKTINDDEYAYII

SEQ ID NO: 2477 - DNA, 1524 bp, Kluyveromyces lactis NRRL Y-1140
  CDS (1)..(1524)
atgtcatcatgtttccttttgctcgatgagacgtatgaaccgctaataagaagagcactacgaccgatccatttccttgatgatgctatacttcaattacagaataaccttaaacatcataagggatgcacaaaacctatattcgaaggcaatgggtggcattacgctgtgataactcgtgataacctatatttcgctatgataatgcaagtgaataatagtgtttctcccataagtgtgttacattacttagatgaaatctaccagttatgcaggaaatttatgggcatgaagcttaacaagctcaatgtacgagataacttccatttaattttcgaagttattgaggaatcatccgattatggtatcatacaggttacaaactataatattatacatgatttcataaaggtagaagttatcaaacccgacgatgattccgagaatacagcctctgaaaaacatgagctgccaccaggtgaccaggatgaaacattcataaacagttatattcttcgaacgatgacatctgctgtctcatggcgtcctaagggtatccattacggtaagaacgaattctttcttgatgtaattgagaaattagaattcattatggatttcgaggaaggtgtggtcagaaataatgtaatcaacggaacaataatatgccggagttatttgtctggtatgcctcaattgagtataggattgaataagttgatgcagaagaatgtacacttcatgaaacgtttaaaattccatgaatgcgtagacctgcataccttaatcaaggaagaatctccagttattaagtttattccaccggatggagaatttgagctttgtaattataaattgaatagaccgctacttgatgaaccagttataaaactacagtcattcgggctatcccaaaaacctagaaagaaccaagaaacccaggataagctattgttgaaagctgccataactacgcatttcaaagctcaggatagtgcaaaggagcttttaattaaaattccgataaagtcagttattcgaaagtggaatattgacctcgaaaagccgcccctgtttaaaagcgatataggagatgttgtgttcgacataacagcgggttcgataatttggaaaattaacaatttgaagggtggtcatggaaacaagaattatgggcttaaatgcatgtttgaaatatgggaccgccagattcatgaagctttagaggtgcagctacgaaattccatggacccaccacctttaaggactggccccaaactagagagaatttgggatcagtaccatggaaaaactacggaatatgatggcaatgagaaccaaaaagaagatgtagacaagttcgcgttaattgctatgtcgtttgaaatcccttattatgcagtgagcggtttaaaagttgagtatttcaagatcgaagaacctcaattaaactaccaatctttcccatgggttagatacaagacagtcaatgataacgaatatatataccaggtttccatttag

SEQ ID NO: 2478 - protein, 507 aa, Kluyveromyces lactis NRRL Y-1140
MSSCFLLLDETYEPLIRRALRPIHFLDDAILQLQNNLKHHKGCTKPIFEGNGWHYAVITRDNLYFAMIMQVNNSVSPISVLHYLDEIYQLCRKFMGMKLNKLNVRDNFHLIFEVIEESSDYGIIQVTNYNIIHDFIKVEVIKPDDDSENTASEKHELPPGDQDETFINSYILRTMTSAVSWRPKGIHYGKNEFFLDVIEKLEFIMDFEEGVVRNNVINGTIICRSYLSGMPQLSIGLNKLMQKNVHFMKRLKFHECVDLHTLIKEESPVIKFIPPDGEFELCNYKLNRPLLDEPVIKLQSFGLSQKPRKNQETQDKLLLKAAITTHFKAQDSAKELLIKIPIKSVIRKWNIDLEKPPLFKSDIGDVVFDITAGSIIWKINNLKGGHGNKNYGLKCMFEIWDRQIHEALEVQLRNSMDPPPLRTGPKLERIWDQYHGKTTEYDGNENQKEDVDKFALIAMSFEIPYYAVSGLKVEYFKIEEPQLNYQSFPWVRYKTVNDNEYIYQVSI

SEQ ID NO: 2479 - DNA, 2067 bp, Debaryomyces hansenii CBS767
  CDS (1)..(2067)
atggtggtgtattcgttatacataattcattggccggaaactcatttagactacctgcggagcgagttgttattgcatagaagctataataatagtttgccggatcaaacgctagtcttgcaaaacttcgaaaatgcatacaaaaacctactaccggaagaaagaacaccttttattcacagtcgaggtataaattatgtgtatatgagaggagataatgatattatattgatagcggttacgaagaaaaatatcaatgcaatgctgacagttgtatttttgcataatttttatggaattctatttcattacatatgtgacatggccagaaagcagaaaacctctcaagaagatttaaggatcggggccaaactaagtaaggaagtgataatggatagttctacgttaatttttgaattgttggatgagtgcatggattttggaattgttcaggtgacggattataagattcttcgagaatatattaaagttgaagccaatcttcctaagttaggtcattatggggaacaaagggatgagtactcatctgaatcagatatagaggttggcgataaatctgaccacaagcgtaaacaagctaaggataaaataaagaaagttaaatcaacccataatcaagcggtcaatgctgatataatagatacagacacttcgtatattaatacttctgtattaagagcaacatcgctggccattagttggcggccgaaaggtattttctaccccaaaaacgaaatttacatcgatataatagagaactgtgaatttctatttagtctaagcacaaattccatcaaaagaaatgaagtttacggcagatgcttagtcaaatgttatctttcggggatgccagtttgtaaattgggatttaatgaaaagtacatttcaggaatagataatgaagacgaatatatgatatatgaagacccaaagaatggagacacggttagatccgataaccaattgaaattggaggatagtaacttgacagttgatggtgatgatgaaaacctaagcgaagacggaattgaggaaggtcttgatgatattaaatcaactgttgagctcggagatgaggatactaaaactacggacgatattgtcagtgagaacattccaaacgaaaatcatagaaagagaaagaagaagaaccataggattcctatacgaaatattcaattccatcaatgtatagaactagcttctgtctataaggagaacattattaacttcattcctccagatgataaatttgtactcatgacataccatgtggagcaacaaaagcagaagcgtaagcttccccttatcatggtaaaaccaacataccgaattcttaaactgtcaaataaattacaaattatgtgtattctttccacaaacttcaagaaaagattacactgtcgtaatttgataattaaaattcctataaatccacatttgattagacttgaccatgaggctaatgaattcagcgacggaatgaagtttaaggctgaaataggtaatgttagttataagattgattcttctgaattattctggtatgttgataatgttaatgggaaaataggcgccatgaaaatgatggcggaaatggcattagcctcaaaagataacgatacattaaccctggaggcagtacaggactcgcttaataataaatatatgcagcagtctgatgcgatagaagatctggatgatgatactgaggccaaggaagatctcgatagatattacggtgtcaatggcgcagtttcatctttgtctaagagaatccaaaagctgataaaattttcacaagactttaaccatgtgaagtgttctttcaatattccaatgttatcttattctggtcttaaattaacttatttgaaggttgcagaggaacaaatgaaatatacatgctttccatgggtcaggtatatcaccgaatccaattctgacactcacagctcaaataaggttgaggatgagagtctttctactcgggattgtaattataattttgaattgggtctcaattgttttcagtttgtagattag

SEQ ID NO: 2480 - protein, 688 aa, Debaryomyces hansenii CBS767
MVVYSLYIIHWPETHLDYLRSELLLHRSYNNSLPDQTLVLQNFENAYKNLLPEERTPFIHSRGINYVYMRGDNDIILIAVTKKNINAMLTVVFLHNFYGILFHYICDMARKQKTSQEDLRIGAKLSKEVIMDSSTLIFELLDECMDFGIVQVTDYKILREYIKVEANLPKLGHYGEQRDEYSSESDIEVGDKSDHKRKQAKDKIKKVKSTHNQAVNADIIDTDTSYINTSVLRATSLAISWRPKGIFYPKNEIYIDIIENCEFLFSLSTNSIKRNEVYGRCLVKCYLSGMPVCKLGFNEKYISGIDNEDEYMIYEDPKNGDTVRSDNQLKLEDSNLTVDGDDENLSEDGIEEGLDDIKSTVELGDEDTKTTDDIVSENIPNENHRKRKKKNHRIPIRNIQFHQCIELASVYKENIINFIPPDDKFVLMTYHVEQQKQKRKLPLIMVKPTYRILKLSNKLQIMCILSTNFKKRLHCRNLIIKIPINPHLIRLDHEANEFSDGMKFKAEIGNVSYKIDSSELFWYVDNVNGKIGAMKMMAEMALASKDNDTLTLEAVQDSLNNKYMQQSDAIEDLDDDTEAKEDLDRYYGVNGAVSSLSKRIQKLIKFSQDFNHVKCSFNIPMLSYSGLKLTYLKVAEEQMKYTCFPWVRYITESNSDTHSSNKVEDESLSTRDCNYNFELGLNCFQFVD

SEQ ID NO: 2481 - DNA, 1353 bp, Yarrowia lipolytica CLIB122
  CDS (1)..(1353)
atggcgtcggcaattttcttcctggacctcaagggaaagcctctgttatcgcgaaactaccgcggcgacatccctatgtcggctgtcgacaagttccccatgctgcttctgcaggccgaggaggagtcacctgtcgtccctccgtgtttcacccatgagggagtcaactacctgtacattacccacaacaacctgtacctgctggctctgacgaagcgcaacactaatgccgccgagattctgctgtttttgcatcgggtcgtccaggtgctgacagaatacttcaagggtctagaggaggagtcaatcagagacaactttgtgctcatctacgagctgttggacgagctgatggactacggtttcccacagaccaccgacacaaagatcctcaaggagtacatcacccaaaagtcccacattctcgaaatcgccatggaaatcgcccaggtgccaaaagagcaaccaagaccccctatggctgtcacgaacgccgtgtcttggcgttccgaaggcatcaagtaccgaaagaacgaggcatttttggatgttgttgaggctgtcaacttgctgatgtctccttcgggccaggttctgcgttctgaggttctcggctctgtccagatgaaatgttacctctctggtatgcctgaactgcgactgggacttaacgacaaggtgctgtttgaccatgtgagcaacaccggtgctgggggaggcggatcgggcggatctgctcgtgcatctcgaggaaagagcatcgagatggaggacgtcaagttccaccagtgtgtgcgactttcgcgatttgagaacgatagaactatttcgttcatccctccggatggccagtttgagctcatgagctaccgcctcaacaccaccgtcaagccgctgatttgggttgactgcaagatcaacaagtactccaacacgcgtattgagattctggctaaggcccgtggccaattcaagaagcgatcgacggccaacaacgtcgaaatccacattcctgttcccgaagatgccgattcgcctaagctggctgctaccgcaggttccatcaagtggcaccctgagaaggcatgtgtcacgtggaagatcaagcagtttggaggaggacgagaattctccatgcgagcggagttgggtcttccctccgttcaggacgctgatgagcaggctaagagcaagagacccatccaagtcaagttctccattccttactttactacctcgggtattcaggttcgatatctgaagattgtcgagccgaagctgcagtacacttcttacccttgggttcgatacattaccactagtggagaggactacaccatacgattggcataa

SEQ ID NO: 2482 - protein, 450 aa, Yarrowia lipolytica CLIB122
MASAIFFLDLKGKPLLSRNYRGDIPMSAVDKFPMLLLQAEEESPVVPPCFTHEGVNYLYITHNNLYLLALTKRNTNAAEILLFLHRVVQVLTEYFKGLEEESIRDNFVLIYELLDELMDYGFPQTTDTKILKEYITQKSHILEIAMEIAQVPKEQPRPPMAVTNAVSWRSEGIKYRKNEAFLDVVEAVNLLMSPSGQVLRSEVLGSVQMKCYLSGMPELRLGLNDKVLFDHVSNTGAGGGGSGGSARASRGKSIEMEDVKFHQCVRLSRFENDRTISFIPPDGQFELMSYRLNTTVKPLIWVDCKINKYSNTRIEILAKARGQFKKRSTANNVEIHIPVPEDADSPKLAATAGSIKWHPEKACVTWKIKQFGGGREFSMRAELGLPSVQDADEQAKSKRPIQVKFSIPYFTTSGIQVRYLKIVEPKLQYTSYPWVRYITTSGEDYTIRLA

SEQ ID NO: 2483 - DNA, 1545 bp, Yarrowia lipolytica CLIB122
  CDS (1)..(1545)
atgatctcggccttgttcatcttggatccgtcattcaagccgcttctgagccgaaactaccggggagacgtgcctctcagttgtatttctgatcttcctgggctcattcagatcgctcaacagaatggcaatgtggcccctcctgttctcgaagacagaggtatccactacatgtggatggaaagtggctcagttatcttcgtggccgtgagtccccaggtgagctgcaactctatggagactctggtctttctatcgcaattagccaccgttctgacctcatatttcgaacaattgcatgccgaatcggtccaggacaactttgtgctcatctacgagctgctcgacgaaatgatggactttggagtgccccagatcacagacgcgggcattctcaaggagtacatcactgtggacgctcacaaaagcttactgggagccgtgggagatctggtcaatgccgctgtgggcgaggaaggagcagccggaaattcgggagacatcgacgtggcaacacacacaaccagtagaatctcgtggcgaccgaccggtctgcagtataagaaaaacgaactgtttttggacgttgttgaaagcgtcaatctgctctatgctaacgacaaagtggttcgacacgagattcagggccgaatcaacgtcacctcctatttatccggaatgcctgagctacgtctgggactcaatgaaaaggccatgctggaacacaagttggctgccactggagccactacacataaaaagccgcgctcaaaaactgtggagatggaagacgtgcggttccaccagtgcgtcgaattgtccaagtttaacgtcgaccgccagatttcctttattcctccagacggcaagttcgagctcatgagctaccgactcaacctggccaacgcggaagaagatcatgctgaagaagaggagggccaaaaggtgcgaaactacgctgccagaaaccggccactgattctggtaaccacagatgttgagaagaagggaaacacgcgtcttctgatttctgttaagctcaagtcgcagttcagaaaacgttcaacagccaacgatgtagaagtgtttgttcctgtgcctccagatgccacttcaccacgtttcagagccactgccggaaccgtggtctacatgcccgagcgtaacgccatccgatggaagatcaaacagctccagggaggaggaaaggagttttccatgaaggccgagatctctgtttcgcgcacggaggagcagggagagtctttgtcagagttgctgcatcttaataacactccacagagccagatccccgtccaggttaccttcgagattccttactatgccatgtcaggcctgcaagtgcgatatctcaaggtcaacgagcctactctcaagtacaggtcgttgccatgggttaggtacatcaccaagaacggagatgactacagttaccgactgaagaaacctcgagagaaggagtccaagaagaaggacaagaccaaggctgagccagccgctggggatgccaatacgagtacatag

SEQ ID NO: 2484 - protein, 514 aa, Yarrowia lipolytica CLIB122
MISALFILDPSFKPLLSRNYRGDVPLSCISDLPGLIQIAQQNGNVAPPVLEDRGIHYMWMESGSVIFVAVSPQVSCNSMETLVFLSQLATVLTSYFEQLHAESVQDNFVLIYELLDEMMDFGVPQITDAGILKEYITVDAHKSLLGAVGDLVNAAVGEEGAAGNSGDIDVATHTTSRISWRPTGLQYKKNELFLDVVESVNLLYANDKVVRHEIQGRINVTSYLSGMPELRLGLNEKAMLEHKLAATGATTHKKPRSKTVEMEDVRFHQCVELSKFNVDRQISFIPPDGKFELMSYRLNLANAEEDHAEEEEGQKVRNYAARNRPLILVTTDVEKKGNTRLLISVKLKSQFRKRSTANDVEVFVPVPPDATSPRFRATAGTVVYMPERNAIRWKIKQLQGGGKEFSMKAEISVSRTEEQGESLSELLHLNNTPQSQIPVQVTFEIPYYAMSGLQVRYLKVNEPTLKYRSLPWVRYITKNGDDYSYRLKKPREKESKKKDKTKAEPAAGDANTST

SEQ ID NO: 2485 - DNA, 1365 bp, Aspergillus nidulans FGSC A4
  CDS (1)..(1365)
atgctctcagggatcttgatttttaaccagaaaggcgagaatctgatctttcgcgctttccgcaatgactgccgcccccggttagccgacatcttccgcatccaagtcatctcgaacccgcaggtgcggtctccgatcctcacgcttggatcgaccacattcagccatgtaaagcacgagaatatctacctagtcgctgtgacgaagagcaatgcgaatgcggcgctggtcttcgagttcctataccgactggtgctactgggaaagagctactttgggaaattcgacgaggaggccgtgaagaacaattttgtgttgatttatgagctgcttgatgaaattctcgacttcggctacccacagaacaccgaaactgacactctaaaaatgtacatcacaaccgagggcgtgaaatccgctataacaaataatccgtccgactcagcgcgaataacgcagcaggcaacgggcgcgctgtcctggcgccgcgcagacgtcaagtaccgcaagaacgaggccttcgtggacgtcattgaggacgtgaacctgctcatgtccgcgacggggacggttctacgtgcggatgtaaatgggcagattgtcatgcgtgcttatctgagcgggactcccgagtgcaagttcggcttgaacgaccggctgttgctcgataatgatgcggcggggccggggtcctccaaccccggagcaggagggaggggagttggtggacatagctcgtcgaagacaagggctgcagcgggtagtgtcactctggaggactgccagttccatcagtgcgttaagctaggccggtttgactcggatcggattattagtttcgtgccgccggacggggagttcgagcttatgcggtatcgcgcgacagaaaacgtcaaccttccgttcaaggtgcatccaattgtgcgggaaattgggacgacgaaggtcgagtacagcgtagccattaaagcgaactactcgtcaaagctctttgcgacaaatgtcgtgatacgcattcccaccccgttgaatacggctaaaactacggagcggacctcgcagggccgggcaaagtatgagcctgagcataacaatatcgtgtggaagatcgcacggttttctggaggctctgagtatgtactcacggctgaggcaacgctctctgcgatgacgaaccagaaggcttggagtcggccgccgctcagtctgaacttttccctcctgatgttcacgagctcagggctacttgttcgctatctaaaagtctttgagaagagcaattatagcagcgtgaagtgggtgcgatatatgaccagagcgggaagttacgagattcggtacgtttacttcgagtgttcgtggtag

SEQ ID NO: 2486 - protein, 454 aa, Aspergillus nidulans FGSC A4
MLSGILIFNQKGENLIFRAFRNDCRPRLADIFRIQVISNPQVRSPILTLGSTTFSHVKHENIYLVAVTKSNANAALVFEFLYRLVLLGKSYFGKFDEEAVKNNFVLIYELLDEILDFGYPQNTETDTLKMYITTEGVKSAITNNPSDSARITQQATGALSWRRADVKYRKNEAFVDVIEDVNLLMSATGTVLRADVNGQIVMRAYLSGTPECKFGLNDRLLLDNDAAGPGSSNPGAGGRGVGGHSSSKTRAAAGSVTLEDCQFHQCVKLGRFDSDRIISFVPPDGEFELMRYRATENVNLPFKVHPIVREIGTTKVEYSVAIKANYSSKLFATNVVIRIPTPLNTAKTTERTSQGRAKYEPEHNNIVWKIARFSGGSEYVLTAEATLSAMTNQKAWSRPPLSLNFSLLMFTSSGLLVRYLKVFEKSNYSSVKWVRYMTRAGSYEIRYVYFECSW

SEQ ID NO: 2487 - DNA, 2010 bp, Candida albicans SC5314
  CDS (1)..(2010): transl_table=12
atgatctctgctatttatataatatatttagcagagaaacaagaatcgaacgagttttctcaaattgagttgttagttaaccggagataccaccagacactaccgcacgatgaaattattcttcaaaatttccataatttaatgacgaatttaccatcatctgaacaagtccccgtgctatattatgacaatctatcctacatttatatgcgatgttcaaatggcattatatcattagcagtttcaaatagaaacattgatgttatgctggccgttatgttcttaaaccagttccacttaatcttagtgcattatttatgtaattccaaattgaatatcggtaacaagtcagcacctaaatcgcttgatagagatactatcattgataatattacattgattctagaattattagacgaatgtttagattatggattattgcaaataacagattacaagttattagaagaatatatcaaagtattgcccaatatccctaaaattgatggtttgacagataagtacgatacatctgatagtgacgactctagtgatgaagacgaaccaaagaaggagaccaagaaatcaaaatctaaaacgaagattggcaagaataagaagggatcaaagaaggagataaaatctactcgcaatcaagcaataaaaacagatgtaattgaaaatgaacaaacaaatatgatcaacagctcgatattacgtacttattcactggcaataaattggagacctaaaggtatattttatgcaaagaatgaaatttttattgatatcattgaagattgcgagtttgtctacgatttgggaactggagttatcaaatgtaatgaaatatatggtacctgtgtcgtgaaatcttatttgtcaggtatgccagtttgtcgacttgggtttaacgaaaggaacttatcacgaatcgaagatgatcaagaagaggagtctttggggatacctgagaatcaattgaatttattgaaagaggatcaaaacgaagacgacgatgaagaggaaggtgaaggagatcaagagacaaatggcgagggaactgaaatactagagcacataccagaattcccagcatcagaagcactaacagataaaaaacaaaaacataaaatccctatacgaaacattcagtttcatcagtgtattgaattgtcgaaaatttataaagaaaatatcgttacatttatcccaccagatgacaagtttgtgttgatgacgtataatgttgagcaacaaaagcaaaagaaaaaggctccactaataatgatcaagccacaattccgagccattaaggaaaccgggaaattgcaaattatgtgcactataaacacgaatttccacagaagaagacactgtaaaaacttgattattcgaattccaataaacccccattattttgacttggatgcaaatgataatgacttaaagtataaggcagaattaggggaagtctcgttcaaaattgattcatttgagttgatttggaaaattgacagtattgatgggaaaaaaatggtgagaatgatgactgaactagctttagtaaatacagaggaagtcagtgaacaacggatactggattacctatcacgcagagctactgcatcatctgtggtaggaactgatgaacaaaattcaacagacacagccgaagataccagagaggagttggacaaattttatggagtaaatggcaagaccacctcactgacacaaaaaatgtctttaaaatttaaaagcagtgttttcaatgatgatatcaaagtacatttcaaattgccaatggtgacatattcgggattgaaattgagctatctcagtgtggaagaagaacaaatgaagtatccttgtttcccatgggtaagatacttaacaaaatcaatagatcactatgagccaagtattgcccttgagaatcaaaagttcagtggtagatgttgtgattatagattcaaactaagtctgaattgctttgtagtagcatag

SEQ ID NO: 2488 - protein, 669 aa, Candida albicans SC5314
MISAIYIIYLAEKQESNEFSQIELLVNRRYHQTLPHDEIILQNFHNLMTNLPSSEQVPVLYYDNLSYIYMRCSNGIISLAVSNRNIDVMSAVMFLNQFHLILVHYLCNSKLNIGNKSAPKSLDRDTIIDNITLILELLDECLDYGLLQITDYKLLEEYIKVLPNIPKIDGLTDKYDTSDSDDSSDEDEPKKETKKSKSKTKIGKNKKGSKKEIKSTRNQAIKTDVIENEQTNMINSSILRTYSSAINWRPKGIFYAKNEIFIDIIEDCEFVYDLGTGVIKCNEIYGTCVVKSYLSGMPVCRLGFNERNLSRIEDDQEEESLGIPENQLNLLKEDQNEDDDEEEGEGDQETNGEGTEILEHIPEFPASEALTDKKQKHKIPIRNIQFHQCIELSKIYKENIVTFIPPDDKFVLMTYNVEQQKQKKKAPLIMIKPQFRAIKETGKLQIMCTINTNFHRRRHCKNLIIRIPINPHYFDLDANDNDLKYKAELGEVSFKIDSFELIWKIDSIDGKKMVRMMTELALVNTEEVSEQRISDYLSRRATASSVVGTDEQNSTDTAEDTREELDKFYGVNGKTTSSTQKMSLKFKSSVFNDDIKVHFKLPMVTYSGLKLSYLSVEEEQMKYPCFPWVRYLTKSIDHYEPSIALENQKFSGRCCDYRFKLSSNCFVVA

SEQ ID NO: 2489 - DNA, 1317 bp, Candida albicans SC5314
  CDS (1)..(1317): transl_table=12
atggcatcacagatacattttttagacatcaagggcaaacctttattgtcaagagactataagggagatatttcttctactacaattgaaaagttcccgcttttgctattggaattggaaaacactgttgatgacggtgaatacaaaccgtttatcaaccatgaaggcataaactacattttcatcaaccacaataacttgtacatttgtgcattgacacggaagaacgagaatattatgacgatcattatatttttatcaaagttggttgaagtcatgacccagtactttaaatcgttggaggaagagagtattaaagacaattttgttattatttatgagttgttagacgagatgatggatttcggggttccacaaacaacagacacaaagatccttaaggaatatattacccaagactattattctttgatcaagagcacacccacgcacttggttgctccgcctaatgctttgaccaattctgtcagttggagaaaagaaggtatattttacaagaagaacgaagcatttttggatgtgattgagtcgatcaacatgttgattactgccaatggccaagtgttgaatagtgagattttgggggaaatcaagatcaaatcgcatttgagcggtatgccagatttgaggttagggttaaacgataaaggtatatttactggcaacaacgatgccaccaccgacagtggcaaaaacattgaaatggaagatataaaattccatcaatgtgttcgattgtcgaagtttgagaatgaaaagttgatcacatttattccacctgatggcgaattcacattgatgtcgtatagattgtcgtcgtcgcagtttcttatgaaaccgttgatattggtcaattgcaagaccaaagtgcataaacactcgcgtattgagattgtgtgtacagtcaaggcacaaatcaaaaagaagtctacagccaataatgttgaagtggtcatacctattccagaagatgccgacacccctaaattttcgccagagtacggttctgtgaaatggatcccggaaaagtcgtgccttatatggaagttgaaaacgttccctggtggcaaacagttctcgatgagagccgagttgggcttaccagcagtcaccgaccctgaatccatcatgagcaagaaacctataaaagtaaacttttccataccatactttactaccagtggaatccaagttcgatacttgagaatcaacgagcctaaattacaataccaatcgtacccatgggtgagatacattacacaatcaggggatgactatatagttagaactaagtaa

SEQ ID NO: 2490 - protein, 438 aa, Candida albicans SC5314
MASQIHFLDIKGKPLLSRDYKGDISSTTIEKFPLLLLELENTVDDGEYKPFINHEGINYIFINHNNLYICALTRKNENIMTIIIFLSKLVEVMTQYFKSLEEESIKDNFVIIYELLDEMMDFGVPQTTDTKILKEYITQDYYSLIKSTPTHLVAPPNALTNSVSWRKEGIFYKKNEAFLDVIESINMLITANGQVLNSEILGEIKIKSHLSGMPDLRLGLNDKGIFTGNNDATTDSGKNIEMEDIKFHQCVRLSKFENEKLITFIPPDGEFTLMSYRLSSSQFLMKPLILVNCKTKVHKHSRIEIVCTVKAQIKKKSTANNVEVVIPIPEDADTPKFSPEYGSVKWIPEKSCLIWKLKTFPGGKQFSMRAELGLPAVTDPESIMSKKPIKVNFSIPYFTTSGIQVRYLRINEPKLQYQSYPWVRYITQSGDDYIVRTK

SEQ ID NO: 2491 - DNA, 1287 bp, Vitis vinifera
  CDS (1)..(1287)
atggcgggggccgcctcggcactcttccttctcgacatcaaaggccgcgttctggtgtggcgcgattacaggggcgatgtctctgctgttcaagccgagcgcttcttcgccaagctcatggagaaagagggtgatccagagtctcaagatcctgttgtgtatgataatggtgttacatacatgtttatacaacacaataatgttttcctaatgaccgcatcaaggcagaactgcaatgctgccagccacctcctctttctacaccgtgttgttgatgtctttaagcattattttgaagagttagaagaggaatcacttagggataattttgtggtagtgtatgagttgcttgatgagatgatggactttggttaccctcagtatactgaagcaaagattctgagtgaatttatcaagactgatgcttataggatggaagtttcccagaggcctcccatggctgtaacaaatgcggtgtcttggcgcagtgaagggatacgttacaagaagaatgaagtattcttggatgtggtggaaagtgttaatatacttgtaaacagcaatgggcaaataattagatcggatgttgttggagcattgaagatgagaacatatttgagtggtatgccagagtgtaagcttgggctaaacgacagagtattgttggaggcacaaggtcgatcaacaaaaggaaaagccattgatctggatgacatcaagttccaccaatgtgttcgtttggctcgatttgagaatgatcgaacaatatcctttattcctccagatggatcttttgatctcatgacatataggctcagtactcaggtaaaacctctgatatgggtggaagctcaagttgaaaggcattcaagaagtcgtatcgagatcatggtcaaagcacggagccagttcaaggagcgtagcactgcaacaaatgttgaaattgaattgcctgtaccatctgatgctaccaatccaaatattcgaacatcaatgggatctgctgcatatgcacctgagaatgatgcattactctggaagataaagtcttttcctggtggcaaggagtatatgttgagggcagagttcagtcttcccagtataacagctgaagaaggagctcctgagagaaaagctcccatacgtgtgaagtttgagataccatattttactgtttctggaatacaggttcgctacctgaagatcattgagaaaagtggttatcaggctctgccttgggtgagatacataactatggctggggagtatgaactaagacttatttaa

SEQ ID NO: 2492 - protein, 428 aa, Vitis vinifera
MAGAASALFLLDIKGRVLVWRDYRGDVSAVQAERFFAKLMEKEGDPESQDPVVYDNGVTYMFIQHNNVFLMTASRQNCNAASHLLFLHRVVDVFKHYFEELEEESLRDNFVVVYELLDEMMDFGYPQYTEAKILSEFIKTDAYRMEVSQRPPMAVTNAVSWRSEGIRYKKNEVFLDVVESVNILVNSNGQIIRSDVVGALKMRTYLSGMPECKLGLNDRVLLEAQGRSTKGKAIDLDDIKFHQCVRLARFENDRTISFIPPDGSFDLMTYRLSTQVKPLIWVEAQVERHSRSRIEIMVKARSQFKERSTATNVEIELPVPSDATNPNIRTSMGSAAYAPENDALLWKIKSFPGGKEYMLRAEFSLPSITAEEGAPERKAPIRVKFEIPYFTVSGIQVRYLKIIEKSGYQALPWVRYITMAGEYELRLI

SEQ ID NO: 2493 - DNA, 1338 bp, Phaeosphaeria nodorum
  CDS (1)..(1338)
atggcgtcggcggtgttcttcctcgacctcaagggcaagacccttctggcgcgcaattaccgtggagatattcccatgtccgccgtcgaaaagttccccgtcctgctcagcgaggccgaagaagacagctccgccgtgccgccatgcttctccaacgaaggcatcaactacctctacatccgtcataacaacctctacctcctcgccctcaccaagcgaaacaccaatgccgccgagatcctcctcttcctgcacaagatcgtcgaggtcttcaccgagtacttcaaggagctggaggaggagagtatacgagacaactttgttgtcatctacgagttgctagacgagatgatggattttgggtacccacaaacgaccgagacgaagatattgcaggagtacatcacacaggagtcgcataagctggaggtggcccggccaccgattgcagtcaccaacgcagtcagctggagaagtgaaggtatccggtaccgcaagaacgaggtcttcctcgacgtcatcgagtcgctcaacttgctcgtctctgcagacggcaatgtgctacggtctgagatcctgggagctgtcaagatgaagtgctacctgtccggtatgcccgagctgcggttgggcctcaacgacaaggtcatgttcgagaccaccggcagagcgacgcgcggaaaggccgtcgaaatggaagacgtcaagttccaccagtgcgtgcgcttgtcacgattcgaaaatgaccggaccatctccttcatcccgcccgatggtgaattcgagcttatgagctaccgcctgaacacacaagtcaagcccttgatctgggtcgagtgcatagtagagagtcactccggcagcaggatagagtacatgttgaaggcgcgagcacagtttaagcggcggagcacagccaacaacgtccagatctcgatacccgtacccgaagatgcagacacaccccgcttccgaaccaacatcggcaccgtacactacgcccccgaaacatcctccatagtatggaagattaagcaattcggtggcggcaaggagttcctcatgcgcgcggagctaggtctgccctccgtgcgaggcgacgatgagaaaggtggcggcatgatgggtggctttggtggaagtatgggcggtgttggtgctggcaagggaaagagaccgatcaacgtcaaatttgaaatcccctactttacaacatcgggtattcaggtcaggtatctgaagattattgaaccgaagctgcaatatccttccctgccgtgggtgcggtatattacacagtctggagacattgcggtgcgattaccagacgtgaactag

SEQ ID NO: 2494 - protein, 445 aa, Phaeosphaeria nodorum
MASAVFFLDLKGKTLLARNYRGDIPMSAVEKFPVLLSEAEEDSSAVPPCFSNEGINYLYIRHNNLYLLALTKRNTNAAEILLFLHKIVEVFTEYFKELEEESIRDNFVVIYELLDEMMDFGYPQTTETKILQEYITQESHKLEVARPPIAVTNAVSWRSEGIRYRKNEVFLDVIESLNLLVSADGNVLRSEILGAVKMKCYLSGMPELRLGLNDKVMFETTGRATRGKAVEMEDVKFHQCVRLSRFENDRTISFIPPDGEFELMSYRLNTQVKPLIWVECIVESHSGSRIEYMLKARAQFKRRSTANNVQISIPVPEDADTPRFRTNIGTVHYAPETSSIVWKIKQFGGGKEFLMRAELGLPSVRGDDEKGGGMMGGFGGSMGGVGAGKGKRPINVKFEIPYFTTSGIQVRYLKIIEPKLQYPSLPWVRYITQSGDIAVRLPDVN

SEQ ID NO: 2495 - DNA, 1377 bp, Aspergillus oryzae
  CDS (1)..(1377)
atgctctccggtatcctaattttcaaccaaaaaggcgaaaacctcatcttccgtgccttccgcaatgactgccgcccccggttggccgacatcttccgcatccaagtcatctccaacccgcaagttcgctcgcccattctcacgctaggatccacgacgttcagccatgtgaagcacgaaaatatctatctggtagcggtgaccaagagcaacgccaatgcggcgctcgtgttcgagtttttgtatcggttggtgatgctggggaagagctactttgggaaattcgacgaggaggcggttaagaataatttcgttttggtttatgagctgctggatgagatcctcgacttcggatacccccaaaacacggaaacagacactctgaagatgtacatcacgacggagggagtcaaatccgccatcgtcaacaaccccaccgactcaagccgcatcaccatgcaagccaccggcgcgctctcctggcgccgctccgatatcaaataccgcaagaacgaggcctttgttgacgtgatcgaagatgtcaatcttttaatgtccgcgactggcaccgtactccgcgccgacgtcaacggccagatcgtcatgcgcgcctacctctccggcacaccggagtgcaagttcggcctcaacgatcgcctactgctcgacactgatgcggctggtggctcagagtccggtcaacggggcatgacaacgaagggaactcgcgccgcggcgggctccgtcacacttgaggactgtcaattccaccagtgcgtgaaactgggccggttcgacgcagaccgcatcatctcgttcgttccgccggacggcgagttcgagctcatgcgataccgcgcgacggagaacgtaaacctcccgttcaaggtgcatcccatcgtgagggaagtgggtacgacgaaggtcgaatacagcgtcgccatcaaggcgaactatagctcgaaactcttcgcgacgaacgtcgtcattcgcatcccgacgccgctcaacacagccaaaaccaccgaacgcaccagtcaaggccgcgccaaatacgaacccgaacacaacaacattgtctggaagatcgcccgtttctctggtggaagcgagtacgtgctcacggccgaggcaacgctcaccagcatgacacatcagaaggcttggagccggccgccgctcagtctctcgttcagccttctcatgttcacgagtagcggactgttggtccggtatctcaaggtctttgagaagagcaactatagcagtgtgaagtgggtacggtatatgactcgagcaggaagttacgaaattcggtgcgttctttgtcaaccctccagccttatctcatctcactaccattgtgtccaatactaa

SEQ ID NO: 2496 - protein, 458 aa, Aspergillus oryzae
MLSGILIFNQKGENLIFRAFRNDCRPRLADIFRIQVISNPQVRSPILTLGSTTFSHVKHENIYLVAVTKSNANAALVFEFLYRLVMLGKSYFGKFDEEAVKNNFVLVYELLDEILDFGYPQNTETDTLKMYITTEGVKSAIVNNPTDSSRITMQATGALSWRRSDIKYRKNEAFVDVIEDVNLLMSATGTVLRADVNGQIVMRAYLSGTPECKFGLNDRLLLDTDAAGGSESGQRGMTTKGTRAAAGSVTLEDCQFHQCVKLGRFDADRIISFVPPDGEFELMRYRATENVNLPFKVHPIVREVGTTKVEYSVAIKANYSSKLFATNVVIRIPTPLNTAKTTERTSQGRAKYEPEHNNIVWKIARFSGGSEYVLTAEATLTSMTHQKAWSRPPLSLSFSLLMFTSSGLLVRYLKVFEKSNYSSVKWVRYMTRAGSYEIRCVLCQPSSLISSHYHCVQY

SEQ ID NO: 2497 - DNA, 1287 bp, Neurospora crassa
  CDS (1)..(1287)
atggcgtccgccattttctttctagatctcaagggcaagaccctccttgcccgtaactaccgcggtgatattcccatgtcggccgtcgaaaagttccctattctattaagcgaagccgaagaagagtcgtccgccgtaccaccatgcttttcccacgagggtatcaactacctctacatccgccataataacctgtaccttctcgccctcacaaaacgcaacaccaacgccgccgagatcctgctcttcctgcacaagatcgtcgaggtcttcaccgagtacttcaaagcgttggaagaggaatcgatccgggacaacttcgtcatcatctacgagctcctggacgagatgatggatttcggctacccgcaaacgaccgagtccaagatcctgcaggagtacatcacccaagagtcgcacaagctcgaaatccaagcgcgcccgcccatcgccgtcaccaacgccgtctcatggcgatccgaaggcatccgctaccgcaagaacgaagtgttcctcgacgtgatcgaatccctcaacctgctggtctcggccaacggcaacgtcttgcgctccgaaatcctcggcgccatcaaaatgaagtgctacctctccggcatgcccgagctgcgcctgggcctaaacgacaaagtcatgttcgagaccacggggcgcaccacgcggggaaaggccattgagatggaagacgtcaagttccaccagtgcgtacgcctgtcgcgcttcgaaaacgaccgcaccatctccttcatcccgcccgacggcgagttcgagctcatgtcgtaccgcttgaacacccaagtcaaacccctgatctgggtcgagtgcgtggtcgagtcccactccggttcgcgaatcgagtacatgctcaaagcgcgcgcgcagttcaagcgccgctcgacggccaacaacgtggagatcattgtgccggtccccgacgacgccgacacgccccggttccggacgaacgtggggagcgtgcactacgcgcccgagaagagtgccatcgtgtggaagatcaagcagtttggtggcggcaaggagtttttgatgcgcgcggagctgggtcttcctagtgtgaggggcgacgatgagcacggcgccaagaggccgattcaggtcaagtttgagattccatatttcaccacgagtgggattcaggtgcggtatttgaagattacggagccaaagctacaatacccctccttgccttgggtcaggtacattacgcagtcaggagatatcgccgtcagattgcccgacgcggtatga

SEQ ID NO: 2498 - protein, 428 aa, Neurospora crassa
MASAIFFLDLKGKTLLARNYRGDIPMSAVEKFPILLSEAEEESSAVPPCFSHEGINYLYIRHNNLYLLALTKRNTNAAEILLFLHKIVEVFTEYFKALEEESIRDNFVIIYELLDEMMDFGYPQTTESKILQEYITQESHKLEIQARPPIAVTNAVSWRSEGIRYRKNEVFLDVIESLNLLVSANGNVLRSEILGAIKMKCYLSGMPELRLGLNDKVMFETTGRTTRGKAIEMEDVKFHQCVRLSRFENDRTISFIPPDGEFELMSYRLNTQVKPLIWVECVVESHSGSRIEYMLKARAQFKRRSTANNVEIIVPVPDDADTPRFRTNVGSVHYAPEKSAIVWKIKQFGGGKEFLMRAELGLPSVRGDDEHGAKRPIQVKFEIPYFTTSGIQVRYLKITEPKLQYPSLPWVRYITQSGDIAVRLPDAV

SEQ ID NO: 2499 - DNA, 1281 bp, Schizosaccharomyces pombe
  CDS (1)..(1281)
atggcttctgctatattcgttctgaatttaaagggaaaggtaatcatttcccgtgattaccgagctgatatccccatgtcagtagttgaaaagtttttacctttaaaatcagaagttgaagaagaacaaggattctccaccccttgtctcactcacgaaggcattaactacatttacattcaccataatgatgtctacctccttgctttatccaaaatgaattccgatgcaatggagatgctagtatttttgcgtaaaatggcggacgtttttatagattactttaaagaattgcaggaagagtcgattcgagataactttgttcttgtttatgaattgttagacgagatcatggatttcggttttccacaaacaactgaaacaaaaatcttgcaagaatacatcactcaaacctcaaatacggtaaaaaagcatgctccaccccccattgctatgacaaatgctatctcctggcgttctgaaggaattcactatcgtaagaatgaagtatttttggacgttattgaatcagttaatttaattgctgctgccgatggtacggtcattcaaagtgaaatcttaggaaaagttcgtctcaaatgctacttatcaggaatgcctgaacttcgtcttgggctcaatgacaaggtccttttcgaagcggctggtcgtaccattaaaggaaacactgtggaaatggaagatgtgaaatttcaccaatgtgttcgtcttgctcgatttgaaaacgatcgtacaatttcgttcattcctcctgatggcgaatttgatttaatgtcctatcgcatgagttcaaatgtacggccattaatttgggttgaatgtgaatccatcgtgcattcaggttcgagaattgagtttatggtaaaagctaaggctcaattcaaaaagcgttgtattgcaaataatgtccaaatcatcattcccgttccggaagatgctgacagtcctcggtttcaaactagcaatggtcatgtgcaatatgcacctgaacaagctgccatggtttggaacattaagaaatttgcaggtggtaaagaatttttcatgcgtgctgaaatgggtttaccaagtgttaaaaatgaagatattcaagttcagaaaaaacgtcctgttcaactaaaatttgctattccctatttcactacctcagggatccaagttcgttatttaaaaatcaccgaaccaaaacttaattatcatgctatgccttgggttcgatatgttacacaaaatggtactgaatattccatccgtcagtaa

SEQ ID NO: 2500 - protein, 426 aa, Schizosaccharomyces pombe
MASAIFVLNLKGKVIISRDYRADIPMSVVEKFLPLKSEVEEEQGFSTPCLTHEGINYIYIHHNDVYLLALSKMNSDAMEMLVFLRKMADVFIDYFKELQEESIRDNFVLVYELLDEIMDFGFPQTTETKILQEYITQTSNTVKKHAPPPIAMTNAISWRSEGIHYRKNEVFLDVIESVNLIAAADGTVIQSEILGKVRLKCYLSGMPELRLGLNDKVLFEAAGRTIKGNTVEMEDVKFHQCVRLARFENDRTISFIPPDGEFDLMSYRMSSNVRPLIWVECESIVHSGSRIEFMVKAKAQFKKRCIANNVQIIIPVPEDADSPRFQTSNGHVQYAPEQAAMVWNIKKFAGGKEFFMRAEMGLPSVKNEDIQVQKKRPVQLKFAIPYFTTSGIQVRYLKITEPKLNYHAMPWVRYVTQNGTEYSIRQ

SEQ ID NO: 2501 - DNA, 24 bp, Artificial sequence
  primer
atgtcgtcaagcctttttatcctg

SEQ ID NO: 2502 - DNA, 25 bp, Artificial sequence
  primer
tcaaacaatatatgcgtactcttcg

SEQ ID NO: 2503 - protein, 740 aa, Artificial sequence
  consensus sequence
  Variant (2)..(12): Xaa in position 2 to 12 is any amino acid
  Variant (13)..(22): Xaa in position 13 to 22 is any or no amino acid
  Variant (24)..(25): Xaa in position 24 to 25 is any amino acid
  Variant (27)..(50): Xaa in position 27 to 50 is any amino acid
  Variant (51)..(57): Xaa in position 51 to 57 is any or no amino acid
  Variant (59)..(91): Xaa in position 59 to 91 is any amino acid
  Variant (92)..(93): Xaa in position 92 to 93 is any or no amino acid
  Variant (96)..(104): Xaa in position 96 to 104 is any amino acid
  Variant (106)..(115): Xaa in position 106 to 115 is any amino acid
  Variant (116)..(132): Xaa in position 116 to 132 is any or no amino acid
  Variant (135)..(139): Xaa in position 135 to 139 is any amino acid
  Variant (142)..(142): Xaa in position 142 is any amino acid
  Variant (145)..(146): Xaa in position 145 to 146 is any amino acid
  Variant (148)..(148): Xaa in position 148 is any amino acid
  Variant (150)..(151): Xaa in position 150 to 151 is any amino acid
  Variant (153)..(153): Xaa in position 153 is any amino acid
  Variant (155)..(158): Xaa in position 155 to 158 is any amino acid
  Variant (160)..(162): Xaa in position 160 to 162 is any amino acid
  Variant (164)..(183): Xaa in position 164 to 183 is any amino acid
  Variant (184)..(285): Xaa in position 184 to 285 is any or no amino acid
  Variant (289)..(290): Xaa in position 289 to 290 is any amino acid
  Variant (293)..(293): Xaa in position 293 is any amino acid
  Variant (295)..(295): Xaa in position 295 is any amino acid
  Variant (299)..(299): Xaa in position 299 is any amino acid
  Variant (301)..(301): Xaa in position 301 is any amino acid
  Variant (304)..(304): Xaa in position 304 is any amino acid
  Variant (306)..(309): Xaa in position 306 to 309 is any amino acid
  Variant (311)..(322): Xaa in position 311 to 322 is any amino acid
  Variant (323)..(324): Xaa in position 323 to 324 is any or no amino acid
  Variant (326)..(331): Xaa in position 326 to 331 is any amino acid
  Variant (338)..(341): Xaa in position 338 to 341 is any amino acid
  Variant (343)..(343): Xaa in position 343 is any amino acid
  Variant (345)..(358): Xaa in position 345 to 358 is any amino acid
  Variant (359)..(446): Xaa in position 359 to 446 is any or no amino acid
  Variant (452)..(452): Xaa in position 452 is any amino acid
  Variant (454)..(461): Xaa in position 454 to 461 is any amino acid
  Variant (462)..(483): Xaa in position 462 to 483 is any or no amino acid
  Variant (485)..(485): Xaa in position 485 is any amino acid
  Variant (492)..(492): Xaa in position 492 is any amino acid
  Variant (494)..(494): Xaa in position 494 is any amino acid
  Variant (497)..(497): Xaa in position 497 is any amino acid
  Variant (499)..(506): Xaa in position 499 to 506 is any amino acid
  Variant (507)..(527): Xaa in position 507 to 527 is any or no amino acid
  Variant (529)..(565): Xaa in position 529 to 565 is any amino acid
  Variant (566)..(570): Xaa in position 566 to 570 is any or no amino acid
  Variant (572)..(585): Xaa in position 572 to 585 is any amino acid
  Variant (586)..(596): Xaa in position 586 to 596 is any or no amino acid
  Variant (598)..(609): Xaa in position 598 to 609 is any amino acid
  Variant (611)..(611): Xaa in position 611 is any amino acid
  Variant (613)..(616): Xaa in position 613 to 616 is any amino acid
  Variant (618)..(646): Xaa in position 618 to 646 is any amino acid
  Variant (647)..(705): Xaa in position 647 to 705 is any or no amino acid
  Variant (707)..(707): Xaa in position 707 is any amino acid
  Variant (710)..(713): Xaa in position 710 to 713 is any amino acid
  Variant (716)..(717): Xaa in position 716 to 717 is any amino acid
  Variant (719)..(719): Xaa in position 719 is any amino acid
  Variant (723)..(724): Xaa in position 723 to 724 is any amino acid
  Variant (726)..(728): Xaa in position 726 to 728 is any amino acid
  Variant (729)..(729): Xaa in position 729 is any or no amino acid
  Variant (731)..(733): Xaa in position 731 to 733 is any amino acid
  Variant (739)..(739): Xaa in position 739 is any amino acid
SXXXXXXXXXXXXXXXXXXXXXLXXRXXXXXXXXXXXXXXXXXXXXXXXXXXXXXXXPXXXXXXXXXXXXXXXXXXXXXXXXXXXXXXXXXXXFLXXXXXXXXXYXXXXXXXXXXXXXXXXXXXXXXXXXXXDNXXXXXELXDEXXDXGXXQXTXXXXLXXXIXXXXXXXXXXXXXXXXXXXXXXXXXXXXXXXXXXXXXXXXXXXXXXXXXXXXXXXXXXXXXXXXXXXXXXXXXXXXXXXXXXXXXXXXXXXXXXXXXXXXXXXXXXXXXXXXXXXXXXXXXXSWRXXGIXYXKNEXFXDVXEXXXXLXXXXXXXXXXXXXXGXXXXXXYLSGMPXXXXGXNXXXXXXXXXXXXXXXXXXXXXXXXXXXXXXXXXXXXXXXXXXXXXXXXXXXXXXXXXXXXXXXXXXXXXXXXXXXXXXXXXXXXXXXXXXXXXXXXXXXXXXFHQCVXLXXXXXXXXXXXXXXXXXXXXXXXXXXXXXXIXFIPPDGXFXLMXYXXXXXXXXXXXXXXXXXXXXXXXXXXXXXLXXXXXXXXXXXXXXXXXXXXXXXXXXXXXXXXXXXXXXXXXXPXXXXXXXXXXXXXXXXXXXXXXXXXGXXXXXXXXXXXXWXIXXXXGXXXXXXXXXXXXXXXXXXXXXXXXXXXXXXXXXXXXXXXXXXXXXXXXXXXXXXXXXXXXXXXXXXXXXXXXXXXXXXXXXXXXXXXXFXIPXXXXSGXXVXYLKXXEXXXXYXXXPWVRYXT

SEQ ID NO: 2504 - protein, 17 aa, Artificial sequence
  protein pattern
  Variant (2)..(2): Xaa in position 2 is any amino acid
  Variant (8)..(8): Xaa in position 8 is Asp or Gly
  Variant (9)..(9): Xaa in position 9 is any amino acid
  Variant (11)..(11): Xaa in position 11 is any amino acid
  Variant (13)..(13): Xaa in position 13 is any amino acid
  Variant (14)..(14): Xaa in position 14 is Asn, Gln, Ser or Thr
  Variant (16)..(16): Xaa in position 16 is Glu, His, Lys or Arg
  Variant (17)..(17): Xaa in position 17 is Leu, Met or Val
IXFIPPDXXFXLXXYXX

SEQ ID NO: 2505 - protein, 37 aa, Artificial sequence
  protein pattern
  Variant (2)..(7): Xaa in position 2 to 7 is any or no amino acid
  Variant (9)..(9): Xaa in position 9 is Phe or Ile
  Variant (10)..(10): Xaa in position 10 is any amino acid
  Variant (11)..(11): Xaa in position 11 is Ile, Leu or Val
  Variant (12)..(12): Xaa in position 12 is Ile or Val
  Variant (13)..(13): Xaa in position 13 is any amino acid
  Variant (16)..(16): Xaa in position 16 is Ile, Leu or Met
  Variant (19)..(19): Xaa in position 19 is any amino acid
  Variant (20)..(20): Xaa in position 20 is Ile, Leu or Met
  Variant (22)..(22): Xaa in position 22 is Phe or Tyr
  Variant (24)..(24): Xaa in position 24 is any amino acid
  Variant (25)..(25): Xaa in position 25 is Leu, Pro or Val
  Variant (27)..(27): Xaa in position 27 is any amino acid
  Variant (29)..(29): Xaa in position 29 is Asp or Glu
  Variant (30)..(32): Xaa in position 30 to 32 is any amino acid
  Variant (33)..(33): Xaa in position 33 is Ile or Leu
  Variant (34)..(35): Xaa in position 34 to 35 is any amino acid
  Variant (36)..(36): Xaa in position 36 is Phe or Tyr
DXXXXXXNXXXXXELXDEXXDXGXXQXTXXXXXXXXI

SEQ ID NO: 2506 - protein, 20 aa, Artificial sequence
  protein pattern
  Variant (2)..(2): Xaa in position 2 is Ala, Glu, Gln or Ser
  Variant (3)..(3): Xaa in position 3 is Ile or Leu
  Variant (4)..(4): Xaa in position 4 is Leu or Pro
  Variant (5)..(8): Xaa in position 5 to 8 is any amino acid
  Variant (11)..(11): Xaa in position 11 is Ile or Leu
  Variant (12)..(12): Xaa in position 12 is any amino acid
  Variant (14)..(14): Xaa in position 14 is Glu or Arg
  Variant (17)..(17): Xaa in position 17 is Lys or Arg
  Variant (18)..(18): Xaa in position 18 is Ile or Val
  Variant (19)..(19): Xaa in position 19 is any amino acid
FXXXXXXXSGXXVXYLXXXE

SEQ ID NO: 2507 - protein, 14 aa, Artificial sequence
  protein pattern
  Variant (2)..(2): Xaa in position 2 is any amino acid
  Variant (3)..(3): Xaa in position 3 is Ala, Cys or Ser
  Variant (4)..(4): Xaa in position 4 is any amino acid
  Variant (10)..(10): Xaa in position 10 is any amino acid
  Variant (12)..(12): Xaa in position 12 is any amino acid
  Variant (13)..(13): Xaa in position 13 is Ala, Asn or Ser
  Variant (14)..(14): Xaa in position 14 is Asp, Gly or Asn
YXXXPWVRYXTXXX

SEQ ID NO: 2508 - protein, 10 aa, Artificial sequence
  protein pattern
  Variant (6)..(6): Xaa in position 6 is any amino acid
  Variant (8)..(8): Xaa in position 8 is Ala, Asp, Gly or Ser
  Variant (9)..(9): Xaa in position 9 is any amino acid
  Variant (10)..(10): Xaa in position 10 is Phe or Ile
FHQCVXLXXX

SEQ ID NO: 2509 - protein, 19 aa, Artificial sequence
  protein pattern
  Variant (2)..(2): Xaa in position 2 is any amino acid
  Variant (3)..(3): Xaa in position 3 is Phe, Ile, Leu or Val
  Variant (4)..(4): Xaa in position 4 is any amino acid
  Variant (5)..(5): Xaa in position 5 is Phe, Ile or Leu
  Variant (6)..(6): Xaa in position 6 is any amino acid
  Variant (7)..(7): Xaa in position 7 is Asp or Asn
  Variant (8)..(10): Xaa in position 8 to 10 is any amino acid
  Variant (11)..(11): Xaa in position 11 is Glu, Lys or Arg
  Variant (12)..(12): Xaa in position 12 is any amino acid
  Variant (14)..(14): Xaa in position 14 is Ile, Leu or Val
  Variant (15)..(15): Xaa in position 15 is any amino acid
  Variant (16)..(16): Xaa in position 16 is Lys or Arg
  Variant (17)..(18): Xaa in position 17 to 18 is any amino acid
  Variant (19)..(19): Xaa in position 19 is Lys or Arg
SXXXXXXXXXXXLXXXXXX

SEQ ID NO: 2510 - DNA, 7413 bp, Saccharomyces cerevisiae
  CDS (1)..(7413)
atggaaccgcatgaggagcagatttggaagagtaaacttttgaaagcggctaacaacgatatggacatggatagaaatgtgccgttggcaccgaatctgaatgtgaatatgaacatgaaaatgaatgcgagcaggaacggggatgaattcggtctgacttctagtaggtttgatggagtggtgattggcagtaatggggatgtaaattttaagcccattttggagaaaattttccgcgaattaaccagtgattacaaggaggaacgaaaattggccagtatttcattatttgatctactagtatccttggaacatgaattgtcgatagaagagttccaagcagtttcaaatgacataaacaataagattttggagctggtccatacaaaaaaaacgagcactagggtaggggctgttctatccatagacactttgatttcattctacgcatatactgaaaggttgcctaacgaaacttcacgactggctggttaccttcgagggctaataccttctaatgatgtagaggtcatgagactcgctgcaaagactctgggcaagttagccgttccaggaggtacatatacctctgatttcgtggaatttgagataaagtcttgcttagaatggcttactgcctccacggaaaagaattcattctcgagttcgaagccagaccatgctaaacatgctgcgcttctgattataacagcgttggcagagaattgtccttatttactctaccaatacttgaattccatactagataacatttggagagcactaagagacccacatttggtgatcagaattgatgcgtccattacattggccaaatgtctttccaccctacgaaatagggatcctcagttaactagccagtgggtgcagagattggctacaagttgtgaatacggatttcaagtaaacacattagaatgcatccatgcaagtttgttggtttataaggaaatcttgtttttgaaggatccctttttgaatcaagtgttcgaccaaatgtgtctaaattgcatagcttatgaaaatcataaagcgaaaatgattagagaaaagatttaccagattgttcccctattagcatcgttcaatcctcaattatttgctggcaaatatttgcaccaaattatggacaactatttagagattttaaccaatgctccagcaaataaaataccacatctcaaagatgacaaaccacagattttaatatcgattggtgatattgcatatgaagtcgggcccgatatcgcaccttatgtgaaacaaattcttgattatattgaacatgatttacagacgaaattcaaattcagaaagaaatttgaaaatgaaattttctactgcatcggaagattggcagttcccttgggccccgttctaggtaaattattaaacagaaatatactggacctgatgttcaaatgccctctttccgactatatgcaggaaacgtttcaaattctgactgagagaataccatcactaggccccaaaataaatgacgagttgcttaacctagtctgttcaaccttatctggaacaccatttatccagccagggtcaccaatggagataccatcgttttcgagagaaagagcaagagaatggagaaataaaaacatcctacagaaaactggtgaaagtaacgatgataataatgatataaaaatcattatacaagcttttagaatgttaaaaaatatcaaaagcagattttcgttggtggaattcgtgagaattgttgcactttcttacattgagcatacagatcccagagtaaggaaactagctgcgttgacatcttgtgaaatttacgtcaaggataacatctgcaaacaaacatcactacactctctgaacactgtatctgaagtgttatcaaagcttctagccattacgattgcggaccctttacaagatatccgtttagaagttttaaagaatcttaatccatgtttcgatccccagttggcacaaccagataatttgagactcttgtttactgcactgcacgatgagtcgttcaatattcagtcagtagcaatggagcttgtcggtaggttgtcttccgtaaaccctgcatacgtcatcccatcgataagaaaaatactactggaactgctaacaaaattaaaattctcaacttcttctcgagaaaaggaagaaactgccagtttgttatgtactcttatcaggtcgagtaaagatgttgcgaaaccttatatcgaacctcttttaaatgttcttttaccaaaattccaagatacctcttcaacggttgcatcaactgcactgagaactataggtgagctatctgttgtagggggcgaagatatgaagatatatcttaaggatttgtttcctttaattatcaaaacatttcaggatcaatcaaactctttcaagagagaagctgcacttaaggcccttggtcaacttgcagcctcatctggttacgtgatagatcctttactcgactatcccgaattattgggtatattggtgaatatattgaagacagaaaactctcaaaatattaggagacaaacagtcactttgataggtatactgggagctatcgacccatatcgccaaaaagaacgtgaggttacctctactaccgatatatctacagaacagaacgccccgcctatcgacattgctcttctcatgcagggcatgtctccttcgaatgatgagtattataccactgttgtcattcactgcctgctaaaaatcctaaaagatccatccctatcatcttaccacactgccgtgatccaagcgattatgcatatttttcaaacccttggtctaaaatgtgtttcattcttggaccagatcatcccaactattttggacgtaatgcgtacatgctctcagtcactattagaattttacttccaacagctttgctctttgattattatcgtaaggcaacacataagacctcatgtcgattctatattccaggctatcaaagatttttcttcggttgctaagctacaaataacgcttgtaagtgttattgaagcaatatcaaaggctctggagggtgaattcaaaagattggtccctcttactctgaccttgttccttgtaattttggagaatgacaagtctagtgacaaggtcctctccagaagggtattgagactgttagaatcgtttggtcctaacttagaaggttattcgcatttgattacacccaagatagttcaaatggcagaattcaccagcgggaacctacaaaggtctgcaataattactattggcaaactggccaaggatgttgacctttttgagatgtcctcaagaattgttcactctttacttagggtactaagttcaacaacgagtgacgaactctcaaaagtcattatgaatactttaagtctactgctaatacaaatgggcacatcctttgctatcttcatccctgtcattaatgaagttttaatgaagaaacatattcaacacacaatatatgatgacttgacaaacagaatattaaacaatgatgttttacccacaaaaattcttgaagcaaatacaacggattataagcccgcggaacaaatggaggcagcagatgctggggtcgcaaaattacctataaaccaatcagttttgaaaagtgcatggaattctagccaacaaagaactaaagaagattggcaggaatggagcaaacgtctatccattcaattattaaaagagtcaccctcccatgctctaagagcttgttcaaatcttgcaagcatgtattatccactagccaaagaactttttaataccgcattcgcatgtgtttggaccgaactttatagccaatatcaagaagatttaattgggtcattatgtatagccttatcttctcccttaaatccaccagaaatacatcaaacattgttaaacctggtagaatttatggaacacgatgacaaggcattaccaataccaactcaaagcctgggcgagtatgctgaaagatgtcacgcctatgccaaagcgctacattataaagagattaaatttattaaagagcctgagaactcaactattgaatcattgatcagcattaacaaccagctgaatcaaacggatgctgcaattggtatattaaagcatgcccaacaacatcattcacttcaattaaaggagacatggtttgaaaaattagagcgttgggaagatgcactacatgcttataatgaacgtgaaaaggcaggtgatacttccgtgagcgttacactcggtaagatgagatcccttcatgcccttggcgaatgggaacagttgtcgcaattggcagctagaaagtggaaagtttcgaagctacaaactaagaagctaatagctcccttggcagctggtgctgcgtgggggttgggagagtgggatatgcttgagcaatatatcagcgttatgaaacctaaatctccagataaggaattttttgatgcaattttatacttgcacaagaatgattacgacaatgctagtaagcatatattaaacgccagagatttgcttgtgactgaaatttccgcgttgatcaatgaaagttataatagagcatatagcgttattgttagaactcaaataataacagagtttgaggaaatcatcaagtataaacaattgccacctaattccgagaaaaaacttcactatcaaaatctttggacaaaaagactgctgggctgccaaaaaaatgtcgatttatggcaaagagtgcttagagtaagatcattggtaataaagcccaagcaagacctgcaaatatggataaaatttgcaaatttgtgcagaaaatctggtagaatgaggctagcaaataaggcattgaatatgctactagaaggaggcaacgatcctagtttaccaaatacgttcaaagctcctcccccagttgtttacgcgcaactaaaatatatttgggctacaggagcttataaagaagcattaaaccacttgataggatttacatccaggttagcgcatgatcttggtttggatccgaataatatgatcgcgcaaagtgtcaaactctcaagtgcaagtactgctccgtatgttgaggaatacacaaaattattagctcgatgttttttaaagcaaggtgagtggagaatagcaacacaaccgaactggagaaacacaaatccggatgcaattcttggttcttatctattggctacacatttcgataaaaattggtacaaggcatggcataattgggccttagctaattttgaagtaatatccatggttcaggaagagactaagctcaacggaggtaagaatgatgatgatgatgacacggcagttaataatgataatgtgcggattgacggtagtatcctaggaagtggttctttgactattaatggcaacagatacccgctagagcttattcaaagacatgttgttccagcgatcaagggcttttttcattcaatatctctattagaaacaagttgtttgcaagacacgttgaggttattgactcttttatttaactttggtggtattaaagaagtctcacaagccatgtatgaaggcttcaatttgatgaaaatagagaactggcttgaagtcttaccacagttgatctctcgtatacatcagccagatcctacggtgagtaattcccttttgtcgttgctttctgatttagggaaagctcatccacaagctctcgtgtatcctttaactgtcgcgatcaagtctgaatctgtttcaagacaaaaagcggctctttcaataatagagaaaattaggattcatagtccagtcctggtaaaccaggcagaattagttagtcacgagttgatcagagtagccgttctatggcacgaattatggtatgaaggactggaagatgcgagccgccaatttttcgttgaacataacatagaaaaaatgttttctactttagaacctttacataaacacttaggcaatgagcctcaaacgttaagtgaggtatcgtttcagaaatcatttggtagagatttgaacgatgcctacgaatggttgaataactacaaaaagtcaaaagacatcaataatttgaaccaagcttgggatatttattataacgtcttcagaaaaataacacgtcaaataccacagttacaaaccttagacttacagcatgtttctccccagcttctggctactcatgatctcgaattggctgttcctgggacatatttcccaggaaaacctaccattagaatagcgaagtttgagccattattttctgtgatctcttcgaagcaaaggccaagaaaattctccatcaagggtagcgacggtaaagattataaatacgttttaaagggacatgaagatataagacaagatagccttgttatgcaattatttggtctagttaacactttgttgaagaatgattcagagtgtttcaagagacatttggatatccaacaatacccggctattccattgtcgcctaaatctggtttactaggatgggtaccaaatagtgacacattccacgttttgatcagagaacaccgtgatgccaaaaaaattccgttgaacattgaacattgggttatgttacaaatggcccccgattatgagaatttgactcttttacaaaaaattgaagtattcacgtacgctttagataatacaaaaggccaagacctttataaaatattatggttaaagagtaggtcgtcagagacatggctagaacgtagaacaacttatacgagatctttagcagttatgtccatgactggttatattctgggactaggtgatcgccatccaagcaacctgatgctagatagaatcaccggtaaagttatccacattgatttcggcgattgttttgaagctgccatcttaagagaaaagtatccagaaaaagtgccatttagactaactaggatgttaacatacgcaatggaagttagtggaattgaaggcagtttccgaattacttgtgaaaatgtcatgagagtcttaagagataataaagaatcattaatggcgatcttggaagcttttgcgcttgatcctttgatccattggggatttgatttaccgccacaaaaacttactgagcaaactggaattcctttgccgttgattaatcctagtgaattattaaggaagggggcaattactgtcgaagaagcggcaaatatggaagcagaacaacaaaatgagaccaaaaacgccagagcaatgcttgttttgagacgtattacagataaattaacgggcaatgatatcaagaggttcaatgaattagacgtccctgagcaggttgataaactgatccaacaagccacttctattgaaaggttatgtcaacattatattggatggtgcccattctggtga

SEQ ID NO: 2511 - protein, 2470 aa, Saccharomyces cerevisiae
MEPHEEQIWKSKLLKAANNDMDMDRNVPLAPNLNVNMNMKMNASRNGDEFGLTSSRFDGVVIGSNGDVNFKPILEKIFRELTSDYKEERKLASISLFDLLVSLEHELSIEEFQAVSNDINNKILELVHTKKTSTRVGAVLSIDTLISFYAYTERLPNETSRLAGYLRGLIPSNDVEVMRLAAKTLGKLAVPGGTYTSDFVEFEIKSCLEWLTASTEKNSFSSSKPDHAKHAALLIITALAENCPYLLYQYLNSILDNIWRALRDPHLVIRIDASITLAKCLSTLRNRDPQLTSQWVQRLATSCEYGFQVNTLECIHASLLVYKEILFLKDPFLNQVFDQMCLNCIAYENHKAKMIREKIYQIVPLLASFNPQLFAGKYLHQIMDNYLEILTNAPANKIPHLKDDKPQILISIGDIAYEVGPDIAPYVKQILDYIEHDLQTKFKFRKKFENEIFYCIGRLAVPLGPVLGKLLNRNILDLMFKCPLSDYMQETFQILTERIPSLGPKINDELLNLVCSTLSGTPFIQPGSPMEIPSFSRERAREWRNKNILQKTGESNDDNNDIKIIIQAFRMLKNIKSRFSLVEFVRIVALSYIEHTDPRVRKLAALTSCEIYVKDNICKQTSLHSLNTVSEVLSKLLAITIADPLQDIRLEVLKNLNPCFDPQLAQPDNLRLLFTALHDESFNIQSVAMELVGRLSSVNPAYVIPSIRKILLELLTKLKFSTSSREKEETASLLCTLIRSSKDVAKPYIEPLLNVLLPKFQDTSSTVASTALRTIGELSVVGGEDMKIYLKDLFPLIIKTFQDQSNSFKREAALKALGQLAASSGYVIDPLLDYPELLGILVNILKTENSQNIRRQTVTLIGILGAIDPYRQKEREVTSTTDISTEQNAPPIDIALLMQGMSPSNDEYYTTVVIHCLLKILKDPSLSSYHTAVIQAIMHIFQTLGLKCVSFLDQIIPTILDVMRTCSQSLLEFYFQQLCSLIIIVRQHIRPHVDSIFQAIKDFSSVAKLQITLVSVIEAISKALEGEFKRLVPLTLTLFLVILENDKSSDKVLSRRVLRLLESFGPNLEGYSHLITPKIVQMAEFTSGNLQRSAIITIGKLAKDVDLFEMSSRIVHSLLRVLSSTTSDELSKVIMNTLSLLLIQMGTSFAIFIPVINEVLMKKHIQHTIYDDLTNRILNNDVLPTKILEANTTDYKPAEQMEAADAGVAKLPINQSVLKSAWNSSQQRTKEDWQEWSKRLSIQLLKESPSHALRACSNLASMYYPLAKELFNTAFACVWTELYSQYQEDLIGSLCIALSSPLNPPEIHQTLLNLVEFMEHDDKALPIPTQSLGEYAERCHAYAKALHYKEIKFIKEPENSTIESLISINNQLNQTDAAIGILKHAQQHHSLQLKETWFEKLERWEDALHAYNEREKAGDTSVSVTLGKMRSLHALGEWEQLSQLAARKWKVSKLQTKKLIAPLAAGAAWGLGEWDMLEQYISVMKPKSPDKEFFDAILYLHKNDYDNASKHILNARDLLVTEISALINESYNRAYSVIVRTQIITEFEEIIKYKQLPPNSEKKLHYQNLWTKRLLGCQKNVDLWQRVLRVRSLVIKPKQDLQIWIKFANLCRKSGRMRLANKALNMLLEGGNDPSLPNTFKAPPPVVYAQLKYIWATGAYKEALNHLIGFTSRLAHDLGLDPNNMIAQSVKLSSASTAPYVEEYTKLLARCFLKQGEWRIATQPNWRNTNPDAILGSYLLATHFDKNWYKAWHNWALANFEVISMVQEETKLNGGKNDDDDDTAVNNDNVRIDGSILGSGSLTINGNRYPLELIQRHVVPAIKGFFHSISLLETSCLQDTLRLLTLLFNFGGIKEVSQAMYEGFNLMKIENWLEVLPQLISRIHQPDPTVSNSLLSLLSDLGKAHPQALVYPLTVAIKSESVSRQKAALSIIEKIRIHSPVLVNQAELVSHELIRVAVLWHELWYEGLEDASRQFFVEHNIEKMFSTLEPLHKHLGNEPQTLSEVSFQKSFGRDLNDAYEWLNNYKKSKDINNLNQAWDIYYNVFRKITRQIPQLQTLDLQHVSPQLLATHDLELAVPGTYFPGKPTIRIAKFEPLFSVISSKQRPRKFSIKGSDGKDYKYVLKGHEDIRQDSLVMQLFGLVNTLLKNDSECFKRHLDIQQYPAIPLSPKSGLLGWVPNSDTFHVLIREHRDAKKIPLNIEHWVMLQMAPDYENLTLLQKIEVFTYALDNTKGQDLYKILWLKSRSSETWLERRTTYTRSLAVMSMTGYILGLGDRHPSNLMLDRITGKVIHIDFGDCFEAAILREKYPEKVPFRLTRMLTYAMEVSGIEGSFRITCENVMRVLRDNKESLMAILEAFALDPLIHWGFDLPPQKLTEQTGIPLPLINPSELLRKGAITVEEAANMEAEQQNETKNARAMLVLRRITDKLTGNDIKRFNELDVPEQVDKLIQQATSIERLCQHYIGWCPFW

SEQ ID NO: 2512 - DNA, 7422 bp, Bacteria
  CDS (1)..(7422): transl_table=11
atgaataaatacattaacaaatacaccacgccacctaacttattgtctttacgacaaagggccgaaggcaaacacagaacaagaaagaaacttacacacaaatcgcactcccacgatgatgagatgtcaactacttcaaacacagattccaatcacaatgggcccaatgactctggtagagtgatcactggttctgctggtcatattggtaaaatatcctttgtagattcagaactagatacaacattttctactttaaatttgatttttgataaacttaaaagcgatgtgccacaagaacgagcctctggcgctaatgaattaagcactactttgacctcattagcaagggaagtatctgctgagcaatttcaaaggtttagcaacagtttaaacaataagatatttgaacttattcacgggtttacttcaagtgagaagataggtggtattcttgctgttgatactctgatctcattctacctgagtacagaggagctgccaaaccaaacttcaagactggcgaactatttacgtgttttaattccatccagtgacattgaagttatgagattagcggctaacaccttaggtagattgaccgtgccaggtggtacattaacatcagatttcgtcgaatttgaggtcagaacttgcattgattggcttactctgacagcagataataactcatcgagctctaagttggaatacaggagacatgctgcgctattaatcataaaggcattagcagacaattcaccctatcttttatacccttacgttaactctatcttagacaatatttgggtgccattaagggatgcaaagttaattatacgattagatgccgcagtggcattgggtaaatgtcttactattattcaggatagagaccctgctttgggaaaacagtggtttcaaagattatttcaaggttgtacacatggcttaagtctcaatacgaatgattcagtgcatgctactctgttggtatttcgagaattactcagcttgaaagcaccttatctcagggataaatatgatgatatttacaaatctactatgaagtacaaggaatataaatttgatgttataaggagagaagtttatgctattttacctcttttagctgcttttgaccctgccattttcacaaagaaatatctcgataggataatggttcattatttaagatatttgaagaacatcgatatgaatgctgcaaataattcggataaaccttttatattagtttctataggtgatattgcatttgaagttggttcgagcatttcaccctatatgacacttattctggataatattagggaaggcttaagaacgaaattcaaagttagaaaacaattcgagaaggatttattttattgcattggtaaattagcttgtgctttgggcccagcttttgctaagcacttgaacaaagatcttcttaatttgatgttaaactgtccaatgtccgaccatatgcaggagactttaatgatccttaacgagaaaataccctctttggaatctaccgttaattcgaggatactaaatttactgtcgatatccttatctggtgaaaaatttattcaatcaaaccaatacgattttaataatcaattttccattgaaaaggctcgtaaatcaagaaaccaaagtttcatgaaaaaaactggtgaatctaatgacgatattacagatgcccaaattttgattcagtgttttaaaatgctgcaactaattcatcatcaatattccttgacggagtttgttaggcttataaccatttcttacattgagcatgaggattcgtctgtcagaaaattggcagcattaacgtcgtgtgatttatttatcaaagacgatatatgtaaacaaacatcagttcatgctttacactcggtttctgaagtgctaagtaagctattaatgatcgcaataactgatccggttgcagaaattagattggaaattcttcagcatttggggtcaaattttgatcctcaattggcccaaccagacaatttacgcctacttttcatggcgctgaacgatgagatttttggtattcaattggaagctatcaaaataataggcagattgagttctgtcaaccccgcttatgtagttccttctttgaggaaaactttactggaactattaacgcaattgaagttctcaaatatgccaaaaaaaaaggaggaaagtgcaactctattatgtacgctgataaattccagcgatgaagtagcgaaaccttatattgatcctattctagacgtcattcttcctaaatgccaggatgcttcatctgccgtagcatccaccgctttaaaggttttgggtgaactatctgttgttggaggaaaagaaatgacgcgttacttaaaggaattgatgccattgatcattaacacatttcaggaccaatcaaactcttttaaaagagatgccgccttaacaacattaggacagctggctgcttcctctggttatgttgttggccctttactagactacccagagttacttggcattttgataaatattcttaagactgaaaacaaccctcatatcaggcgtggaactgttcgtttgattggtatattaggcgctcttgatccatataagcacagagaaatagaagtcacatcaaactcaaagagttcagtagagcaaaatgctccttcaatcgacatcgcattgctaatgcaaggggtatctccatccaacgatgaatattaccccactgtagttatccacaatctgatgaagatattgaatgatccatcgttgtcaatccatcacacggctgctattcaagctattatgcatatttttcaaaaccttggtttacgatgtgtctcctttttggatcaaattattccaggtatcattttagtcatgcgttcatgcccgccgtcccaacttgacttttattttcagcaactgggatctctcatctcaattgtcaagcaacatattaggccccatgtcgagaaaatttatggtgtgatcagggagtttttcccgatcattaaactacaaatcacaattatttctgtcatagaatcgatatctaaggctctggaaggtgagtttaaaagatttgttcccgagactctaacctttttccttgatattcttgagaacgaccagtctaataaaaggatcgttccgattcgtatattaaaatctttggttacttttgggccgaatctagaagactattcccatttgattatgcctatcgttgttagaatgactgagtattctgctggaagtctaaagaaaatctccattataactttgggtagattagcaaagaatatcaacctctctgaaatgtcatcaagaattgttcaggcgttggtaagaattttgaataatggggatagagaactaacaaaagcaaccatgaatacgctaagtttgctccttttacaactaggtaccgactttgtggtctttgtgccagtgattaacaaggcgttattgaggaataggattcagcattcagtgtacgatcaactggttaataaattactgaacaatgaatgcttgccaacaaatatcatatttgacaaggagaacgaagtacctgaaaggaaaaattatgaagacgaaatgcaagtaacgaaattaccggtaaaccaaaatatcctaaagaatgcatggtattgttctcaacagaagaccaaagaagattggcaagaatggataagaaggctatctattcagcttctaaaggaatcaccttcagcttgtctacgatcctgttcgagtttagtcagcgtttattatccgttggcgagagaattgtttaatgcttcattctcaagttgctgggttgagcttcaaacgtcataccaagaggatttgattcaagcattatgcaaggctttatcatcctctgaaaacccacccgagatttatcaaatgttgttaaatttagtggaatttatggagcacgatgacaaaccattgcctatcccaatccatacattaggtaagtatgcccaaaaatgtcatgcttttgcgaaggcactacattacaaagaggtagaattcttagaagagccgaaaaattcaacaatcgaggcattgattagcattaataatcaacttcaccaaactgattctgctattggtattttgaagcatgcgcaacaacacaatgaattgcagctgaaggaaacttggtatgaaaaacttcaacgttgggaggatgctcttgcagcatataatgagaaggaggcagcaggagaagattcggttgaagtgatgatgggaaaattaagatcgttatatgcccttggagagtgggaagagctttctaaattggcatctgaaaagtggggcacggcaaaacccgaagtgaagaaggcaatggcgcctttggctgccgctgcctggggtttggagcaatgggatgaaatagcccagtatactagcgtcatgaaatcgcagtctccagataaagaattctatgatgcaattttatgtttgcataggaataattttaagaaggcggaagttcacatctttaatgcaagggatcttctagttactgaattgtcagctcttgttaatgaaagctacaatagagcatataatgttgttgttagagcgcagattatagcagagttggaggaaatcatcaaatataagaagttgccacaaaattcagataaacgtctaactatgagagaaacttggaataccagattactgggctgtcaaaaaaatattgatgtgtggcaaagaattctgcgtgtcagatcattggtgataaagccaaaggaggatgctcaagtgaggattaagtttgccaacttatgcagaaaatcgggtaggatggcgctagctaaaaaagtcttaaatacattgcttgaagaaacagatgacccagatcatcctaatactgctaaggcatcccctccagttgtttatgcacaactgaagtacttgtgggctacggggttgcaagatgaggctttgaagcaattaattaatttcacatctagaatggctcatgatttaggtttggatccaaataatatgatagctcaaagcgttcctcaacaaagcaaaagagtccctcgtcacgttgaagattatactaagcttttagctcgttgtttcttgaagcaaggagaatggagagtttgcttacagcctaaatggagattgagcaatccagattcgatcctaggctcctatttgctcgctacacattttgacaacacatggtacaaagcgtggcataactgggcactggccaattttgaagtcatttctatgctaacatctgtctctaaaaagaaacaggaaggaagtgatgcttcctcggtaactgatattaatgagtttgataatggcatgatcggcgtcaatacatttgatgctaaggaagttcattactcttctaatttaatacacaggcacgtaattccagcaattaagggtttttttcattccatttctttatcagaatcaagctctcttcaagatgcattaaggttattaactttatggtttacttttggtggtattccagaagcaacccaagctatgcacgagggtttcaacctaatccaaataggcacatggttagaagtgttgccacagttaatttctagaattcatcaacccaatcaaattgttagtaggtcattactctccctattatctgatctaggtaaggctcatccgcaggcattagtgtaccccttaatggttgcgattaaatccgaatctctctcacgacagaaagcagctttgtccatcatagaaaagatgagaatacatagtccagttttggtcgaccaggctgaacttgtcagccacgaattgatacgtatggcggtgctttggcatgagcaatggtatgagggtctggatgacgccagtaggcagttttttggagaacataataccgaaaaaatgtttgctgctttagagcctctgtacgaaatgctgaagagaggaccggaaactttgagggaaatatcgttccaaaattcttttggtagggacttgaatgacgcttacgaatggctgatgaattacaaaaaatctaaagatgttagtaatttaaaccaagcgtgggacatttactataatgttttcaggaaaattggtaaacagttgccacaattacaaactcttgaactacaacatgtgtcgccaaaactactatctgcgcatgatttggaattggctgtccccgggacccgtgcaagtggtggaaaaccaattgttaaaatatctaaattcgagccagtattttcagtaatctcatccaaacaaagaccgagaaagttttgtatcaagggtagtgatggtaaagattataagtatgtgttgaaaggacatgaagacattagacaggatagcttggtcatgcaattattcggactagttaacacgcttttgcaaaatgacgctgagtgctttagaaggcatctagatatccagcaatatccagcaatcccattatctccgaagtctgggttactgggttgggtaccgaatagtgacacgttccatgtattaattagggagcatagagaagccaaaaaaattcctttaaacattgagcattgggtcatgttacaaatggcacctgattatgacaatttaacgttgttgcagaaagtagaagtcttcacttacgccctaaataatacggagggacaagatctttataaggtgttatggctgaagagtaggtcatcggaaacgtggttggagcgtagaactacttacactcgatcgctagccgtgatgtccatgaccggttatatattggggttaggtgaccgccaccctagtaatttgatgttggatagaatcactgggaaagtcattcatattgattttggtgattgtttcgaggctgctatattaagagaaaaattccccgaaaaagtaccttttagattaactagaatgttaacatatgcaatggaagtgagtggaattgaaggtagcttccgtattacttgtgagaatgttatgaaggtacttagagataacaagggttcattaatggcaatccttgaagcttttgctttcgatcctttgatcaattggggttttgacttaccaacaaagaaaattgaggaagaaacgggcattcaacttcccgtgatgaatgccaatgagctattgagtaatggggctattaccgaagaagaagttcaaagggtggaaaacgagcacaagaatgccattcgaaatgcaagggccatgttggtattgaagcgcattactgacaaattaacggggaacgatataagaaggtttaatgacttggacgttccagaacaagtggataaactaatccaacaagccacatcagtggaaaacctatgccaacattatatcggttggtgtccattctggtag

SEQ ID NO: 2513 - protein, 2473 aa, Bacteria
MNKYINKYTTPPNLLSLRQRAEGKHRTRKKLTHKSHSHDDEMSTTSNTDSNHNGPNDSGRVITGSAGHIGKISFVDSELDTTFSTLNLIFDKLKSDVPQERASGANELSTTLTSLAREVSAEQFQRFSNSLNNKIFELIHGFTSSEKIGGILAVDTLISFYLSTEELPNQTSRLANYLRVLIPSSDIEVMRLAANTLGRLTVPGGTLTSDFVEFEVRTCIDWLTLTADNNSSSSKLEYRRHAALLIIKALADNSPYLLYPYVNSILDNIWVPLRDAKLIIRLDAAVALGKCLTIIQDRDPALGKQWFQRLFQGCTHGLSLNTNDSVHATLLVFRELLSLKAPYLRDKYDDIYKSTMKYKEYKFDVIRREVYAILPLLAAFDPAIFTKKYLDRIMVHYLRYLKNIDMNAANNSDKPFILVSIGDIAFEVGSSISPYMTLILDNIREGLRTKFKVRKQFEKDLFYCIGKLACALGPAFAKHLNKDLLNLMLNCPMSDHMQETLMILNEKIPSLESTVNSRILNLLSISLSGEKFIQSNQYDFNNQFSIEKARKSRNQSFMKKTGESNDDITDAQILIQCFKMLQLIHHQYSLTEFVRLITISYIEHEDSSVRKLAALTSCDLFIKDDICKQTSVHALHSVSEVLSKLLMIAITDPVAEIRLEILQHLGSNFDPQLAQPDNLRLLFMALNDEIFGIQLEAIKIIGRLSSVNPAYVVPSLRKTLLELLTQLKFSNMPKKKEESATLLCTLINSSDEVAKPYIDPILDVILPKCQDASSAVASTALKVLGELSVVGGKEMTRYLKELMPLIINTFQDQSNSFKRDAALTTLGQLAASSGYVVGPLLDYPELLGILINILKTENNPHIRRGTVRLIGILGALDPYKHREIEVTSNSKSSVEQNAPSIDIALLMQGVSPSNDEYYPTVVIHNLMKILNDPSLSIHHTAAIQAIMHIFQNLGLRCVSFLDQIIPGIILVMRSCPPSQLDFYFQQLGSLISIVKQHIRPHVEKIYGVIREFFPIIKLQITIISVIESISKALEGEFKRFVPETLTFFLDILENDQSNKRIVPIRILKSLVTFGPNLEDYSHLIMPIVVRMTEYSAGSLKKISIITLGRLAKNINLSEMSSRIVQALVRILNNGDRELTKATMNTLSLLLLQLGTDFVVFVPVINKALLRNRIQHSVYDQLVNKLLNNECLPTNIIFDKENEVPERKNYEDEMQVTKLPVNQNILKNAWYCSQQKTKEDWQEWIRRLSIQLLKESPSACLRSCSSLVSVYYPLARELFNASFSSCWVELQTSYQEDLIQALCKALSSSENPPEIYQMLLNLVEFMEHDDKPLPIPIHTLGKYAQKCHAFAKALHYKEVEFLEEPKNSTIEALISINNQLHQTDSAIGILKHAQQHNELQLKETWYEKLQRWEDALAAYNEKEAAGEDSVEVMMGKLRSLYALGEWEELSKLASEKWGTAKPEVKKAMAPLAAAAWGLEQWDEIAQYTSVMKSQSPDKEFYDAILCLHRNNFKKAEVHIFNARDLLVTELSALVNESYNRAYNVVVRAQIIAELEEIIKYKKLPQNSDKRLTMRETWNTRLLGCQKNIDVWQRILRVRSLVIKPKEDAQVRIKFANLCRKSGRMALAKKVLNTLLEETDDPDHPNTAKASPPVVYAQLKYLWATGLQDEALKQLINFTSRMAHDLGLDPNNMIAQSVPQQSKRVPRHVEDYTKLLARCFLKQGEWRVCLQPKWRLSNPDSILGSYLLATHFDNTWYKAWHNWALANFEVISMLTSVSKKKQEGSDASSVTDINEFDNGMIGVNTFDAKEVHYSSNLIHRHVIPAIKGFFHSISLSESSSLQDALRLLTLWFTFGGIPEATQAMHEGFNLIQIGTWLEVLPQLISRIHQPNQIVSRSLLSLLSDLGKAHPQALVYPLMVAIKSESLSRQKAALSIIEKMRIHSPVLVDQAELVSHELIRMAVLWHEQWYEGLDDASRQFFGEHNTEKMFAALEPLYEMLKRGPETLREISFQNSFGRDLNDAYEWLMNYKKSKDVSNLNQAWDIYYNVFRKIGKQLPQLQTLELQHVSPKLLSAHDLELAVPGTRASGGKPIVKISKFEPVFSVISSKQRPRKFCIKGSDGKDYKYVLKGHEDIRQDSLVMQLFGLVNTLLQNDAECFRRHLDIQQYPAIPLSPKSGLLGWVPNSDTFHVLIREHREAKKIPLNIEHWVMLQMAPDYDNLTLLQKVEVFTYALNNTEGQDLYKVLWLKSRSSETWLERRTTYTRSLAVMSMTGYILGLGDRHPSNLMLDRITGKVIHIDFGDCFEAAILREKFPEKVPFRLTRMLTYAMEVSGIEGSFRITCENVMKVLRDNKGSLMAILEAFAFDPLINWGFDLPTKKIEEETGIQLPVMNANELLSNGAITEEEVQRVENEHKNAIRNARAMLVLKRITDKLTGNDIRRFNDLDVPEQVDKLIQQATSVENLCQHYIGWCPFW

SEQ ID NO: 2514 - DNA, 7335 bp, Aedes aegypti
  CDS (1)..(7335)
atgtcgacggtggtgctacagttcgtgagtgggctgaaaagccgcaacaaggatgcacagaataaggcggcccaggaactgtcgctgtacgtcaagacggaactgcgcgagattccgcaggatgatctgctggcgttcttcgaggacttcaaccagtacattttcgagatgttgtccagtgccgatatcaacgacaaaaagggaggcgtgctggccatcaattgcttgataagtggcgatgtggtcaacacgacaactcagatttcccgttactcgaacaatctccggaatcttcttccgtcgagtgacatttcggtgatggagctggcagcgaaggtgctcgtcaagttggccctcctgcccggttccaaaggcgccgagtcgttcgagttcgacatcaaacgtgccttcgaatggctcatggaggaacgaaccgagggcaaacgccatgcagccgttttggtgctgcgtgaactggccgtggccatgccgacgtttttctaccaacaggtcggaagctttttcgagcacatattcgtcgccatcaaggatcccaaaccgatgattcgggagggcgctggccaagccttgcgggctgtactgattgtcacttcgcagagagagggaaccaagcagaataataatcctcaatggtacaaccactgttacgacaatgcaatggaatgcttcagggagcttccttcccgcgagaaaggtttcaaccgagatgatcgcatccacggagcaataattgtgttcaatgaaatcttacgatgttcaaatgcagcctgggagaaaaagtacatgcaattagaaagtttgaacgtcgatcgcaggtctcgtcacacggatgaaggtcacagcattttcccccggattcgtgtcccgttcatggacaagctaggaggaggacatagctctggagcgtctcgtaccagtgagggaagtgatgtcaaattcttccgacagaatagctccattcaggagtctgcaatctgccgagcgttgacgaacgacaactacgaattgatttgtcagaaagtgcttgagcaacgcaattcaaagtcaccctacgtgattcagtcgctgctgaccattctacctcgattggccgccttcaatcgcagagactttgtcaataaccatttgaaaactgtcgtcaactatcttatcctaacgattaagagcaaagaaaaggaacggaatctggcgttcgtcacgcttggctatatcgccgtggcagtcgagaaggatattgcccccttcaggaccaggatcatcgaggtgatcacggcagctctgcctccgaaagaaaccccaagcaagaagaaagtctgcgtcgatccgtcggtgttcatgtgcatcaccctgttgggtcatgcgttaaaaagtgcaattacaaccgatgtcaagagcttgatcctgccaatgctttcgactggactgagcacagggctaacggtgtgcttacacgagttgagcgagaatgtgccgcagttgaggcaggaaattaccagcggactgttgaagattttgtcctgcgtgctgatgaataaaccattgccgcagtttatacccgggcggcctcaaggtggaatgaacacgagcctctacgagcaacagatccaagatactcccaccacagtgctggccctccgtacgctgggcaccttcaatttcgagggtcacagcttgttgccgttcgtgcaacgatgtgccgaccatttcctgctcagcgagcagcaggaaattcgcatcgaagccgtacagacttgtacgttgctgctaaagctagctctccaatcggtcgattcggcagacggatcggaaaccctcacccagaccgttggaagcgtgctggagaagattctgatcgttggtatcaccgacgttgatccgaatgtgcgtctgagggtgctgaaatctttggacgacagcttcgattctcagctggcgcaaccatggttcctgagctcgctgttgatcacgatgaatgatgaggtgtttgaaatcagggagctagcgattatcatcattggacgactgtcggccatcaatccggcttacgtgatgccaagcttgaggaaaacgatggtacagatcctaacggagctggaacactccggtatgagtagaaacaaggagcagagcgcgagaatgttggatcatctgattgtcagcacgccgaggttgatatcttcctatatgcgtccgatcttgtcgatcttggttccgaaattgaaagagcctgaatcgaatccgggagtggttttgaatgtgttaagagcgattggtgatcttgctgaagtcaatggcggccataacgttttggagaaatggtccgatgagctgctggctacgttgctagagatgctaagcgatgccggatcaacggaaaagcgcggcgtagcattatggactcttggccagttggtcagtgccacggggcaagcagttaaaccgtaccacaaatatcccaatctgatcgatatattgatcaactttttgaaaacagaacagcaaccgtacgtaaggcgggaaacgatccgtgtcctcgggttgctcggtgccttggatccgtacaagcacaagatgaatcgtggcctgattgacagccagaccaacaatatcctcatttcgatttccgacagcaagactgaggaatataccgatttgtctacgtcggaaatgttgatcaatatgaacaatcagctggaggagtactacccggcggtggccatttcaacgctgatgaagatccttcgtgatcctacgttatcctcgcatcacaccagcgttgtccaggcgatcacctttatcttcaaaagtttgggtatcaaatgcgttccgtacttgtcccaggtcttacctagtctgctcggcaatattcgcaatgccgaaatgaacttgaaggagttcttgttccagcagctatcgatcctgatcgagatagtcaaacagcacatcatcagcttcatggaggaaatattccagctgatcaaaacgttctggaacagtatctatcctttgcagccgaccctcatcattttggtggaaaagatcgccatcgctttgggatgtgagttcaagatctatcttcctcagttgatgccgcagatcttgcgagttctccttcacgatgcgtccacccatcgaatagtcaccgtcaagctcctcaacgctctgcagaagttcgggaacaatctggacgactatcttcacttgatcattccagccattgttaagctgttcgaaccgatcgaagttccttaccaggtgtcccttgcagccctagaaaccatcaactaccttgcagagatccttgatttcaccgatttctcctcgcgcatcatccatcccttggtacgcgtcctggacaaccacccgggtcagctccaaacggccgcgctgcaaaccctctgctcgatcatgatccaactgggcaagaaatacctcgtttttgtcccgctagtcaaccgggtcatgatcaggcacaaaatatcttacacagagtacaacaaactcctctccaagctgcaaagtcagagtaccctcgccctggacgatgaattccgactgcgccaagctcggttcaagaatcgcgaaatgtccctcgctggggacacgaccatccgcaagttgaacgtgtccaccgcggatcttcagctggcgttcaaagctaatcgcagggtgtcccgtgacgattggctcgagtggctccgtcggctcagcattggtcttctgaaggagtccaaaagcccagcgctgcgatcctgccgaaccctggcccagaactatccccaactgttgaaggatttgttcaacgcagccttcgtcagctgctggaccgatttaccggacagtctcaaagaggagctatcgtccagcttgaggcaggctctgatggtgccggaccttccggaaattacccaaaccattctcaacctggccgagtttatggaacactgcgagaatgatgcgctgaggatcgatccgaagatcttgggcgagagagccatggagtgccgagcctatgccaaggctttgcactacaaggaggaagagttcctgaacatgaaggacaaggatcagagcgtgttcgagtcgttgattttgatcaacaataagctgcaacagaaggaagcggctgaggggctgctggagtacgccatggaacacaggagcgcttctgaggaaatgaaagtccaagtgaggtggtacgagaaattgcacagctgggagaaggcgttgaacttgtatcaggacaaattggagagcaatccgggtgatttggattcgcgacttggccagtggaggtgtttggaagcgctaggggagtggtcaacgttgaatacgctgaccaaggagacgtgggaatcactgggaaccgaaggacagagtaaggccggtagacttgctgccgctgcagcctggggtttgaaggattgggagggaatgcaggagtttgtcaagttcatcccagaggacacgcaggacgggtcgttctatcgtgccgtactggctgtgcatcacggtgagtatgaacttgcccaaaccctaattgacgatacgagagacttgttggatacggaattgaccgcgatggccggcgaatcgtacgaacgcgcctatggagcaatggtttgcgttcaaatgctgtcggaattggaagaagtcattcagtacaagctgattcccgagcggcaggaaactatcaaggcaatgtggtgggatcgcttgctcggtggccaacgtttggtggaagattggcaacgaattttgcaggttcatactttggttgtccatcccgcaaatgacgtcaaaacgtggctgaagtttgcctcactttgtcgcaagagtgattcattgaaactttccgagaagaccctcgtcatgctgcttcgctacaatccctcggagtacccggatcatccgttggaattcatgcaaccagacatcagctttgcctacgcgaaacatctgtgggcagctggcgaacaagaaaaggcttacaatcaacttaatcgactagtcgccgatatgggcatcgagggtaacttcgacgtcgaggaaaaggacgaaaaccgccgtctgttggcgcgttgctacatgaagctcggacaatggcagaaccaactacaaggactcaacgagcaatccatcaagggcatcctggcatgctacgaaaaagctaccaaacacgactccaattggtacaaggcatggcatctctgggcctacatgaactttgaagttgtccagaatcagaaacaacaggaagacctcatcaagaaccctggcggagacaaagagaagtgtatgattcggcagtatgccgttccagcggttgaaggcttcttccgctcgatcaatctgtcacacggaaactccctccaagacacactccgtctcctaaccctctggttcgactacggacagtatcccaaggtgtacgaagccctggtcgaaggaatgcgcgtcattgaaatcaacacatggcttcaggtcatccctcagttgatcgcccgcatcgatactccgcgcaacctagttggccaactaatccaccagctgttgaacgacatcggaaagtgtcatccgcaggctcttgtctatccgctgaccgttgcttccaattcggcatccagcgcgcgacgacaggccgctcacaagatcctgggctccatgggtgaacattcgtctaacttggtcaaccaagcgatcatgtgcagcgaggaactgatccgcgtggccattctgtggcacgaacagtggcacgagggcttggaggaggcgtcgcggctttatttcggcgaccggaacatcaaaggaatgttcgaaacgttggaaccgctgcaccaaatgcttcaaaggggacctcaaaccttgaaggagacctcgttcaatcaggcgtacggtagggatctgaacgaggcgcaggagtggtgcaaacattataagaactcgggcaacattcgtgacttgaatcaagcgtgggatttgtactatcacgtattccgccgaatttcccggcagttgccgcagcttacctccctagaactacaatacgtcagtcctaagcttcttgcctgtcgtgatctagagctagccgtcccaggaagctacgcccccggtcaggagctgatccgaatcgccagcattcaatcgaacctccaggtgatcacttcgaagcaaagaccgcgaaaactttgcatccgtggctccaacggcaaggagtacatgttcctgctgaagggccacgaagatttgcgccaggacgaacgcgtgatgcagctgtttgggctggtgaacaccctgctgctaaacgatccggacacgttccgtcggaatctgaccattcaacggtatgcggtcattccgttgagcaccaattccggcttgatcggttgggtgccccactgcgatacgctgcacacgctgattcgagattaccgcgagaagaaaaagaccatgctgaacatcgagcatcggattatgttgcgaatggcaacggattacgaccatctgacgttgatgcaaaaggtcgaagtctttgagtatgcgttggagctcaccaaaggagacgacctggccaagctgctctggctgaagagcccctcgtcggaggtttggttcgatagaagaacgaattatacgcgatcccttgcggtcatgtcgatggttggctacattctgggactgggcgatcgacatccgtcgaacttgatgctggatcgattgagcggcaaaattctgcacatcgactttggcgattgcttcgaggttgcgatgacccgcgagaagttcccggagaagatccccttccgtttgacgcgaatgctgatcaacgccatggaagttaccggcatcgagggaacctaccgccggacgtgtgaaagcgtcatgcacgtgctccgtcgcaacaaggacagtctaatggccgtgctggaagctttcgtatacgatccattgctcaactggcgcctgctggatgtggacaagaatcgcaggtccaagaatgccaccgacgtggacagcacaacggaaagcatggaagaaacgttggatcttctgatcaacgccagaaacctgcggatgaacgaagccaacggaggcggagacgtggtggatcagggcagcaattgcatcgccaatccagccgaggctaccaacaacaaagcccgggccatcgtggatcgtgtgaagcagaaactgaccggaaaggacttcaacacggtcgaaccggtgcaacggcagatcgatctgttgatacggcaggcgacgaacaatgaaaacctctgccagtgctacatcgggtggtgtcctttctggtag

SEQ ID NO: 2515 - protein, 2444 aa, Aedes aegypti
MSTVVLQFVSGLKSRNKDAQNKAAQELSLYVKTELREIPQDDLLAFFEDFNQYIFEMLSSADINDKKGGVLAINCLISGDVVNTTTQISRYSNNLRNLLPSSDISVMELAAKVLVKLALLPGSKGAESFEFDIKRAFEWLMEERTEGKRHAAVLVLRELAVAMPTFFYQQVGSFFEHIFVAIKDPKPMIREGAGQALRAVLIVTSQREGTKQNNNPQWYNHCYDNAMECFRELPSREKGFNRDDRIHGAIIVFNEILRCSNAAWEKKYMQLESLNVDRRSRHTDEGHSIFPRIRVPFMDKLGGGHSSGASRTSEGSDVKFFRQNSSIQESAICRALTNDNYELICQKVLEQRNSKSPYVIQSLLTILPRLAAFNRRDFVNNHLKTVVNYLILTIKSKEKERNLAFVTLGYIAVAVEKDIAPFRTRIIEVITAALPPKETPSKKKVCVDPSVFMCITLLGHALKSAITTDVKSLILPMLSTGLSTGLTVCLHELSENVPQLRQEITSGLLKILSCVLMNKPLPQFIPGRPQGGMNTSLYEQQIQDTPTTVLALRTLGTFNFEGHSLLPFVQRCADHFLLSEQQEIRIEAVQTCTLLLKLALQSVDSADGSETLTQTVGSVLEKILIVGITDVDPNVRLRVLKSLDDSFDSQLAQPWFLSSLLITMNDEVFEIRELAIIIIGRLSAINPAYVMPSLRKTMVQILTELEHSGMSRNKEQSARMLDHLIVSTPRLISSYMRPILSILVPKLKEPESNPGVVLNVLRAIGDLAEVNGGHNVLEKWSDELLATLLEMLSDAGSTEKRGVALWTLGQLVSATGQAVKPYHKYPNLIDILINFLKTEQQPYVRRETIRVLGLLGALDPYKHKMNRGLIDSQTNNILISISDSKTEEYTDLSTSEMLINMNNQLEEYYPAVAISTLMKILRDPTLSSHHTSVVQAITFIFKSLGIKCVPYLSQVLPSLLGNIRNAEMNLKEFLFQQLSILIEIVKQHIISFMEEIFQLIKTFWNSIYPLQPTLIILVEKIAIALGCEFKIYLPQLMPQILRVLLHDASTHRIVTVKLLNALQKFGNNLDDYLHLIIPAIVKLFEPIEVPYQVSLAALETINYLAEILDFTDFSSRIIHPLVRVLDNHPGQLQTAALQTLCSIMIQLGKKYLVFVPLVNRVMIRHKISYTEYNKLLSKLQSQSTLALDDEFRLRQARFKNREMSLAGDTTIRKLNVSTADLQLAFKANRRVSRDDWLEWLRRLSIGLLKESKSPALRSCRTLAQNYPQLLKDLFNAAFVSCWTDLPDSLKEELSSSLRQALMVPDLPEITQTILNLAEFMEHCENDALRIDPKILGERAMECRAYAKALHYKEEEFLNMKDKDQSVFESLILINNKLQQKEAAEGLLEYAMEHRSASEEMKVQVRWYEKLHSWEKALNLYQDKLESNPGDLDSRLGQWRCLEALGEWSTLNTLTKETWESLGTEGQSKAGRLAAAAAWGLKDWEGMQEFVKFIPEDTQDGSFYRAVLAVHHGEYELAQTLIDDTRDLLDTELTAMAGESYERAYGAMVCVQMLSELEEVIQYKLIPERQETIKAMWWDRLLGGQRLVEDWQRILQVHTLVVHPANDVKTWLKFASLCRKSDSLKLSEKTLVMLLRYNPSEYPDHPLEFMQPDISFAYAKHLWAAGEQEKAYNQLNRLVADMGIEGNFDVEEKDENRRLLARCYMKLGQWQNQLQGLNEQSIKGILACYEKATKHDSNWYKAWHLWAYMNFEVVQNQKQQEDLIKNPGGDKEKCMIRQYAVPAVEGFFRSINLSHGNSLQDTLRLLTLWFDYGQYPKVYEALVEGMRVIEINTWLQVIPQLIARIDTPRNLVGQLIHQLLNDIGKCHPQALVYPLTVASNSASSARRQAAHKILGSMGEHSSNLVNQAIMCSEELIRVAILWHEQWHEGLEEASRLYFGDRNIKGMFETLEPLHQMLQRGPQTLKETSFNQAYGRDLNEAQEWCKHYKNSGNIRDLNQAWDLYYHVFRRISRQLPQLTSLELQYVSPKLLACRDLELAVPGSYAPGQELIRIASIQSNLQVITSKQRPRKLCIRGSNGKEYMFLLKGHEDLRQDERVMQLFGLVNTLLLNDPDTFRRNLTIQRYAVIPLSTNSGLIGWVPHCDTLHTLIRDYREKKKTMLNIEHRIMLRMATDYDHLTLMQKVEVFEYALELTKGDDLAKLLWLKSPSSEVWFDRRTNYTRSLAVMSMVGYILGLGDRHPSNLMLDRLSGKILHIDFGDCFEVAMTREKFPEKIPFRLTRMLINAMEVTGIEGTYRRTCESVMHVLRRNKDSLMAVLEAFVYDPLLNWRLLDVDKNRRSKNATDVDSTTESMEETLDLLINARNLRMNEANGGGDVVDQGSNCIANPAEATNNKARAIVDRVKQKLTGKDFNTVEPVQRQIDLLIRQATNNENLCQCYIGWCPFW

SEQ ID NO: 2516 - DNA, 7446 bp, Arabidopsis thaliana
  CDS (1)..(7446)
atgtctacctcgtcgcaatcttttgtggctggacggcctgcatccatggcttccccttcgcaatcgcaccgcttttgtggtccctcagccaccgcttctggtggcggaagctttgacactttgaatcgtgtcatcgctgacctttgcagccgtggtaatcctaaggagggagctcctttagcgtttaggaaacacgtagaggaagcagttcgtgatcttagtggtgaagcttcctctaggttcatggagcaattatatgacaggattgctaatttaattgagagcactgatgtggcggaaaacatgggtgcactcagagccattgatgagttgacggagattggatttggtgagaatgctactaaggtttctagatttgcgggttacatgaggactgtgttcgagttgaagcgtgatcctgaaatcttggtgcttgctagtagagttttggggcaccttgctcgggcaggtggagcaatgacttctgatgaagtggagtttcagatgaaaacagcttttgattggcttcgcgtagacagggtggaatatcgtcgtttcgccgccgttttaatattaaaggagatggccgaaaatgcttctactgtctttaacgttcatgtccctgaatttgtggatgctatctgggttgcacttagggacccccagttgcaagtgcgagaacgagctgttgaagctttgcgtgcatgccttcgtgttattgagaaaagggagactcgatggcgagtgcagtggtactatcgaatgtttgaagctacacaggatgggttgggcagaaatgctccggttcacagtattcatggttctttacttgccgtgggggagctgttgaggaatacaggtgagttcatgatgtctaggtatagagaagttgccgaaattgtcctcagataccttgaacatcgtgatcgccttgttcgccttagcatcacctcgttactgcctcgcattgctcactttctccgtgaccggtttgtgacaaactatttaacgatatgcatgaatcatattcttactgtgttaagaataccggctgaaagagccagtgggttcatcgcccttggggaaatggctggtgctttggatggtgagcttatccattatttgccgacaattatgtctcatctgcgggatgcgattgctccacgtaaaggcagacctttgcttgaagctgtggcttgtgttggtaacatcgcaaaggcaatgggatccacagtggaaactcatgttcgagatcttttagatgttatgttttcatctagtctctcttccacacttgttgacgctcttgaccagataaccatcagcattccttctttgctgccaacagtacaagatcggcttctagattgcatttcgttggttctttcaaaatcccattattctcaagcaaagcctcctgttaccattgtccgaggtagtacagtgggcatggcaccacagtcttctgaccctagttgttcagctcaagttcaactagccctgcagactcttgctcgtttcaatttcaagggacatgatcttcttgaatttgctcgggagtcagttgttgtttatttggatgatgaggatgcagccacaagaaaagatgctgctttgtgttgttgcagactaattgcaaattctctttctggcatcacacaatttggctcgagcaggtcaacacgagcaggggggagacgcaggcgccttgtggaagagattgtggaaaagcttctcaggacagccgttgcagatgctgatgtaactgttcgcaaatctatattcgttgctttatttggcaaccaatgtttcgatgattatctagcacaggctgatagtttgactgccatttttgcttccttaaatgatgaggaccttgatgttcgagaatatgccatctcagttgctggaaggttatcggaaaaaaatccagcatacgtacttccagcacttcgtcgccatcttatacagttgttgacctatcttgagctgagtgcagataacaagtgcagggaagagagtgcaaagctccttggttgtttagttcgaaattgtgaacggctcattcttccatacgtagcccctgtccaaaaggcacttgttgcgagacttagtgaaggaactggagtgaatgctaacaataatattgtcactggagttctcgtaactgttggggatcttgcaagagtgggtggcttggcaatgagacaatatattccggagctgatgcctttaattgttgaagctttaatggatggagctgctgtagcaaaacgtgaggtggctgtttctactcttggtcaagttgttcaaagtacagggtatgttgtgactccatacaaggaatacccattgttgcttgggttactcttgaaattgctgaagggtgacttagtgtggtctaccagacgagaagtgctcaaggttcttggaattatgggcgctttggatcctcatgtgcataaacgtaaccaacaaagtttatcaggatcacatggtgaagttcctcgcggcactggtgattctggtcaacctattccatcaattgatgagttacctgtcgaactccggccgtcatttgctacatctgaggattattactcaacggttgctatcaactcgcttatgcgaattcttagagatgcatcacttcttagttaccacaaaagggttgttagatctctgatgatcattttcaagtcaatgggattgggatgcgtgccttacttgccgaaggttttacctgagctttttcacactgttcgaacatctgatgagaacctgaaggacttcattacgtggggtcttgggactcttgtttccattgttcgccagcacatacgcaagtatctgccagagctgctttcattagtctctgaactatggtcatccttcaccttgcccggtcccatacgcccatcacgtggtcttccggttctgcatctactggaacatctttgcttggcacttaatgatgaattcagaacttatcttccagtcatccttccatgtttcatccaagtattaggtgacgccgagcggtttaatgattacacctatgttcctgatattctccacacactcgaagtgtttggcggaactcttgatgagcacatgcatttactccttccggcacttattcgattgtttaaagtagatgctcctgtagctataagacgcgatgccatcaaaactttgacaagagtaatcccgtgtgttcaggttactggtcatatctccgctctcgtgcatcacttgaagctagtattagatgggaagaatgatgagttgcggaaagatgctgtcgatgcactatgctgtttggctcatgcacttggagaggacttcaccatattcattgaatcaattcacaagcttttattgaagcatcgattgcggcataaagaatttgaggaaattcatgctcgctggcggagacgtgaaccattgattgtagctacaactgcaacccaacaattaagtaggcgactgccagttgaggttatcagggatcctgtaattgagaatgagatcgatcctttcgaagaaggaactgacagaaaccatcaggttaatgatggtagactacggacagctggagaagcttctcaacgcagcaccaaagaagattgggaggaatggatgagacattttagtattgaattacttaaggagtctccctctccagcattaagaacttgtgcaaaacttgctcagttgcagccatttgtcgggagagagttgtttgctgctggctttgtcagttgctgggcacagctaaacgagtctagccaaaagcagttagttaggagcttggaaatggccttttcatctccaaatatccctccagaaattttagctacactactcaatttggcagagtttatggaacatgatgagaagcctcttcccattgatattcgtcttctgggggctcttgctgaaaagtgccgtgtttttgccaaagctctgcattataaagagatggaatttgaaggtccacgatccaagaggatggatgccaacccagttgctgttgtcgaggctcttatacacataaataatcagttacaccagcatgaggctgctgtcggtatactaacctatgctcaacaacatcttgatgtgcaattaaaagaatcatggtatgagaagctgcagcgctgggacgatgcactcaaggcgtacactttgaaagcatctcaaacaacaaatcctcatcttgtattagaagccacattaggacaaatgagatgtcttgctgcacttgcacgatgggaagagctcaacaatctctgcaaagagtactggagtcctgctgagccatctgcgcgtctggaaatggcaccaatggctgcacaagctgcatggaacatgggagagtgggatcaaatggccgaatatgtgtctcggctagatgatggtgatgaaacaaagcttcggggtttagcaagcccggtttctagtggcgatgggagcagtaatggcacattcttcagggctgttctgttagttcgaagggcaaagtacgacgaggcacgcgaatatgtggaaagagctagaaaatgtcttgccacagaacttgcagcgctggttttggagagctatgagcgtgcgtacagcaatatggttcgtgttcagcagctgtcagaactagaggaggtaattgaatattatacgctgcctgtgggaaatactattgccgaagaacggagagctctaattcgtaatatgtggactcagcggattcagggatctaagcgtaatgtggaggtgtggcaagcacttttggctgtccgggcacttgtgctacctcctacagaagatgtggaaacttggctcaagtttgcctcgctttgtcgaaagagtgggaggatcagtcaggcgaaatctactctactcaagctcttaccgtttgatccagaagtatcaccagaaaacatgcaatatcacggacctccacaagtgatgcttggatacttaaaataccaatggtcacttggagaggaacgtaagcgcaaagaggcatttaccaagctgcagattctaacgagagagctctcaagtgtgccacattctcaatctgacatactggctagcatggtatctagcaagggcgcaaatgttccacttcttgcacgtgtaaatctcaaactgggaacgtggcagtgggcactttcttccggtttgaatgatgggtctattcaagaaattcgtgatgcgtttgacaaatctacttgctatgctcctaaatgggctaaagcatggcacacatgggcattattcaatacagcagtgatgtcgcattacatttcaagaggtcaaattgcttcccagtacgttgtttctgcagtcactggatatttttattctatagcatgtgcagcaaatgccaaaggagttgatgatagtttacaggacatactgcgtcttctgacattgtggttcaaccatggagctacagctgatgtccaaaccgcattgaagacaggattcagtcatgtcaacattaacacatggcttgttgtgctacctcaaatcattgctaggatacattctaataatcgtgctgtcagggaactgattcagtctcttctcatccgcataggcgaaaaccacccacaggctctgatgtatccccttctcgttgcatgtaaatcaataagcaatcttcggagagctgcggctcaagaggtggttgataaagttcgccagcacagtggtgcactcgtggatcaggcgcaacttgtatcacatgaacttatcagggttgccatactttggcatgaaatgtggcatgaagcactagaagaagctagtcgcttgtattttggtgaacataacattgaaggcatgctgaaagtacttgaacccttacatgacatgctcgacgaaggtgtaaaaaaggacagtacgaccatacaggaaagagcatttatagaggcataccgtcacgaactaaaagaggcacatgaatgctgttgcaattacaagataactgggaaagatgctgaacttacacaggcttgggatctttactatcacgttttcaaacggattgacaaacagctagccagtctcacgacattggatttggaatctgtttctcctgagttgctgctgtgccgtgacttggagctagcagttcctggaacatatcgtgcagatgcccccgtcgtgactatatcatctttttcacgccaacttgttgttataacctctaaacaaagaccaaggaaattgactattcacggaaatgacggtgaggactacgccttcttgttgaagggacatgaagatttaaggcaagatgagcgtgttatgcagctttttggtttggtgaacactttgcttgagaattccagaaaaacagccgaaaaagatctttccattcaacgctattctgtaataccactatctcccaatagtggactcatcggatgggttccgaactgcgatacccttcaccatcttattcgagagcacagagatgcaagaaagatcattcttaatcaagaaaataagcatatgttgagttttgctccagactatgacaatctaccgcttatagcaaaggttgaagtatttgagtatgctctagaaaacacagagggaaatgatctatccagggttctctggttaaaaagtcgctcgtcagaagtttggctagaaagaagaacaaactatactagaagtttagcagttatgagtatggttggttatattcttgggttaggtgatcgacacccaagtaaccttatgcttcatagatacagtggaaagatcttgcatattgattttggagattgttttgaggcttctatgaatagagagaagtttcctgaaaaggttccattccgcctgacaagaatgcttgtcaaagcaatggaagtcagtggcattgaaggaaacttccgctcaacctgcgaaaacgttatgcaagttctcagaaccaataaagatagtgtaatggcaatgatggaagcgtttgtacatgatcctttaatcaattggcgtcttttcaatttcaatgaagtcccccaattagcactgctcggtaacaacaaccccaatgctcctgctgatgttgagcctgacgaagaagatgaagatcccgctgatatagatcttcctcagcctcaaaggagtactcgagagaaggagattcttcaggctgtaaatatgcttggagatgctaatgaagttttaaatgagcgtgccgtagttgttatggcacgtatgagtcataagcttacagggcgtgatttttcttcgtctgcaattccgagcaatcccattgctgatcataataacttgctcggaggagattctcatgaagtcgaacatggtttgtctgtgaaagttcaggttcaaaaactaatcaatcaagccacttcccatgagaatctctgtcaaaactatgttgggtggtgccctttctggtga

SEQ ID NO: 2517 - protein, 2481 aa, Arabidopsis thaliana
MSTSSQSFVAGRPASMASPSQSHRFCGPSATASGGGSFDTLNRVIADLCSRGNPKEGAPLAFRKHVEEAVRDLSGEASSRFMEQLYDRIANLIESTDVAENMGALRAIDELTEIGFGENATKVSRFAGYMRTVFELKRDPEILVLASRVLGHLARAGGAMTSDEVEFQMKTAFDWLRVDRVEYRRFAAVLILKEMAENASTVFNVHVPEFVDAIWVALRDPQLQVRERAVEALRACLRVIEKRETRWRVQWYYRMFEATQDGLGRNAPVHSIHGSLLAVGELLRNTGEFMMSRYREVAEIVLRYLEHRDRLVRLSITSLLPRIAHFLRDRFVTNYLTICMNHILTVLRIPAERASGFIALGEMAGALDGELIHYLPTIMSHLRDAIAPRKGRPLLEAVACVGNIAKAMGSTVETHVRDLLDVMFSSSLSSTLVDALDQITISIPSLLPTVQDRLLDCISLVLSKSHYSQAKPPVTIVRGSTVGMAPQSSDPSCSAQVQLALQTLARFNFKGHDLLEFARESVVVYLDDEDAATRKDAALCCCRLIANSLSGITQFGSSRSTRAGGRRRRLVEEIVEKLLRTAVADADVTVRKSIFVALFGNQCFDDYLAQADSLTAIFASLNDEDLDVREYAISVAGRLSEKNPAYVLPALRRHLIQLLTYLELSADNKCREESAKLLGCLVRNCERLILPYVAPVQKALVARLSEGTGVNANNNIVTGVLVTVGDLARVGGLAMRQYIPELMPLIVEALMDGAAVAKREVAVSTLGQVVQSTGYVVTPYKEYPLLLGLLLKLLKGDLVWSTRREVLKVLGIMGALDPHVHKRNQQSLSGSHGEVPRGTGDSGQPIPSIDELPVELRPSFATSEDYYSTVAINSLMRILRDASLLSYHKRVVRSLMIIFKSMGLGCVPYLPKVLPELFHTVRTSDENLKDFITWGLGTLVSIVRQHIRKYLPELLSLVSELWSSFTLPGPIRPSRGLPVLHLLEHLCLALNDEFRTYLPVILPCFIQVLGDAERFNDYTYVPDILHTLEVFGGTLDEHMHLLLPALIRLFKVDAPVAIRRDAIKTLTRVIPCVQVTGHISALVHHLKLVLDGKNDELRKDAVDALCCLAHALGEDFTIFIESIHKLLLKHRLRHKEFEEIHARWRRREPLIVATTATQQLSRRLPVEVIRDPVIENEIDPFEEGTDRNHQVNDGRLRTAGEASQRSTKEDWEEWMRHFSIELLKESPSPALRTCAKLAQLQPFVGRELFAAGFVSCWAQLNESSQKQLVRSLEMAFSSPNIPPEILATLLNLAEFMEHDEKPLPIDIRLLGALAEKCRVFAKALHYKEMEFEGPRSKRMDANPVAVVEALIHINNQLHQHEAAVGILTYAQQHLDVQLKESWYEKLQRWDDALKAYTLKASQTTNPHLVLEATLGQMRCLAALARWEELNNLCKEYWSPAEPSARLEMAPMAAQAAWNMGEWDQMAEYVSRLDDGDETKLRGLASPVSSGDGSSNGTFFRAVLLVRRAKYDEAREYVERARKCLATELAALVLESYERAYSNMVRVQQLSELEEVIEYYTLPVGNTIAEERRALIRNMWTQRIQGSKRNVEVWQALLAVRALVLPPTEDVETWLKFASLCRKSGRISQAKSTLLKLLPFDPEVSPENMQYHGPPQVMLGYLKYQWSLGEERKRKEAFTKLQILTRELSSVPHSQSDILASMVSSKGANVPLLARVNLKLGTWQWALSSGLNDGSIQEIRDAFDKSTCYAPKWAKAWHTWALFNTAVMSHYISRGQIASQYVVSAVTGYFYSIACAANAKGVDDSLQDILRLLTLWFNHGATADVQTALKTGFSHVNINTWLVVLPQIIARIHSNNRAVRELIQSLLIRIGENHPQALMYPLLVACKSISNLRRAAAQEVVDKVRQHSGALVDQAQLVSHELIRVAILWHEMWHEALEEASRLYFGEHNIEGMLKVLEPLHDMLDEGVKKDSTTIQERAFIEAYRHELKEAHECCCNYKITGKDAELTQAWDLYYHVFKRIDKQLASLTTLDLESVSPELLLCRDLELAVPGTYRADAPVVTISSFSRQLVVITSKQRPRKLTIHGNDGEDYAFLLKGHEDLRQDERVMQLFGLVNTLLENSRKTAEKDLSIQRYSVIPLSPNSGLIGWVPNCDTLHHLIREHRDARKIILNQENKHMLSFAPDYDNLPLIAKVEVFEYALENTEGNDLSRVLWLKSRSSEVWLERRTNYTRSLAVMSMVGYILGLGDRHPSNLMLHRYSGKILHIDFGDCFEASMNREKFPEKVPFRLTRMLVKAMEVSGIEGNFRSTCENVMQVLRTNKDSVMAMMEAFVHDPLINWRLFNFNEVPQLALLGNNNPNAPADVEPDEEDEDPADIDLPQPQRSTREKEILQAVNMLGDANEVLNERAVVVMARMSHKLTGRDFSSSAIPSNPIADHNNLLGGDSHEVEHGLSVKVQVQKLINQATSHENLCQNYVGWCPFW

SEQ ID NO: 2518 - DNA, 7413 bp, Drosophila melanogaster
  CDS (1)..(7413)
atgtcgacgacgtcggtggtgcagcagttcgtcaacgggcttaagtcccgcaaccggaatgtacagaacaaggcaacccaggatctgctcttctatgtgaagaccgagctacgcgaaatgtcccaggaggagctggcccaatttttcgacgagttcgaccatcacattttcacgatggtgaatgcgacagatatcaacgagaaaaaaggcggtgccctggccatgaagtgcctgattaactgcgagggcagtcttactgccaggaagggcatttcgccctatctcaaccgcctgcgcgatcttctgctaatcaacgatgtgtccgtcatggagattgccgcccgctccctggtcaaattggccaacatgcccacctccaagggcgccgattccttcgactttgatattaagaaggcttttgaggtgctcagaggcgagagacaagagtaccgccgccattcagccgtctttatcctccgtgagctggctatcgccttgcccacatacttctaccagcacatcctgaccttcttcgaggttatctttaacgccatcttcgatcccaaacctgctatacgagagtcagctggcgaggctttgagggcggctttgattgtcaccgctcagcgagagagcaccaagcagtccagtgaaccacagtggtacagaatctgctatgacgaggcgaatggaagcttcaatgcagacttgggctctagcaaggatcagaaaggcgtgacccgagacgatcgcattcacggtggcctcgtcgtcttcaacgagctctttcgctgtgccaatgccacctgggagcggcgctacacgtctctgaagacgctgttccccaagacccaacacaataagttcctggaggccagcagttcgtcgagtatgggttcccagctgaatactctagtgccgcggctaaaggtgcccttcattgacaagctcggcagcacccaaacgcatttgggtgagggagagcatcacaaaggagttgccaagttcgcgagccacaacgtactggagtccgcatatgctcaggagatccttcaggagcactacacctccatttgcgacaatgttttggagcagcgaacttcgaagtctccgtatgtacagcaggcactccttcaaatacttcctcgattggctgcctttaaccgcgcggtgtttgtggaaaaatacctgcagacatgcgtgtcgcatttaatgcagatcctgcgaggcaaggagaaggatcgcacggtggcgtacataaccattggttacatggctgtagcggtgcagagtgcgatcgaagttcatttatccagtataatgactagcgtgaaggtcgccttgccgtcaaaggatttgaccagcaaacgaaaggtaccagtggatcctgcggtctttgcctgcataacgcttcttgctcatgccgttaagtcggagatcgccgacgatgttaaggatatccttgagcagatgttctacacgggtctctcgccagctctgactgtttgcctgagggaactctccgagaatgtgccgcagcttaagtcggccattacagaaggattgatcggaatcctatcccaggtgctgatgaacaaggcggcaattttaccatacactgctttgccaacgatcgccatcgatggctcgctaatgcagaatggtgacggagcaaccacagtgctggcactcaaaacgctgggtaccttcaactttgaggagcaaaacatgctggactttgtgcaacgatgtgctgactacttcatcgttcacgagcagcaggagattcgtctggaggcagtgcaaacatgcacacgactccttaaactggcagtgcaatcctctgaaagtatggagaactccaagaccctcagcgacaccgtttcccacgtgattgagcgcctgcttatggtagccattactgatatggactgtaatgtgcgaatacgaattctacgttcgctggacgagacctttgatgggaagcttgctcagccagagtctctaaattcgctatttattacgctgcacgatgaaatctttgagatccgggagctggcaatggttaccattggaagattgtcgtccataaacccggcttatgtgatgcccaagctaagaaccaccatgatcgaattgatcacggatctaaagtactcgggaatgagtcgaaacaaggagcagagcgcaaagatgcttgaccatttggtgataagcacgcccaggctaatatcctcttacatgaatccgatcctcaaagccttagtgcccaagttgcatgagccggaatcgaatccaggagttattttaaatgtgcttcgcacaattggtgatttagcagaggttaatggaggctccgatgaaatggaattgtgggcagatgaccttctgtccattttactcgaaatgctgggcgacgctggcagtccggataagcgaggagtggctctgtggacgttgggacagttaatcagtgcaacaggcagggtggttaccccatatcacaagtaccccgtgctcatagatattttgattaatttccttaaaacggaacaacgtcgatccattcgaagggaaacgatacgagtgctgggcttgttgggagccatggatccttacaagcacaagatgaacaagggcttgattgatagccaaaaggataatgttttaatagcatactccgatggcaaagtcgatgaaagtcaggacatctccaccgctgagttgctagttaacatgggtaacgcattggatgagtattatcccgctgtggccatagctgcattgatgaggattctacgggatcccacgttaagtacacgtcacaccagcgtggtgcaggcggttacttttatcttccagagcctgggcatcaaatgtgtgccgtacttggcccaagtgcttcccaatttgctggacaatgtacgcactgcagataataatctaagggagtttctcttccagcagctcgccattctggtggcttttgtcaagctgcatatcatcagctacatgggagatatttttaagctgatcaaagaattttggaccattaatacgcctctgcaaaacactctaatcaatttgattgaacagatcgccgtggctttgggatgcgagtttagggattatttggcggagctgatcccacaaattctgcgagtgttgcagcacgataactccaaggatagaatggtcacgagaaggttgctccaagctcttcaaaagtttggcagcactttgggttactatctgccgctgattttgcctccgatcgtgaaactcttcgattctccgtacgtaccacaacaggtgtcaatggtagccctggaaacgatcaacaatctagcctgtcagctggacttcaccgacttctcctcgcgcatcatacatccgttggttcgagtgctggacgctgagccagagcttcgggaccaagctatgacaacccttcgctcactggcaaagcaactgggcaagaagtacctcgtgttcgtgcctatggtccagcgcactctcaacaaacatcgcattgtggatcccgagtacgaggagctactgagtaagattaagtcctgcagcacactggcggattcctatggggccggggagtcagaactgcggccgtccaggttcaaaaacaacgagccatttgtgaccgacagaaatagcaataataaaaatctgcaggtcaccacaaacgaactacgaacggcgtggcaggtgacgcggcgggtgtccaaggacgactgggtggagtggctaaagcggttgtccattggcctgctgaaggaatcgccttcgcacgcactgagagcctgtcgttcgttggcccaagagtacgatacgctgttgagagatctttttaacgccgcatttatctcctgttggacggaactatcgccggatttgaaaaacgagctaacacagtcactgattcaagccctgcaagttaccgacatgccggaaatcactcagacaatcctcaacttggccgagtttatggagcattgcgatcgcgatccaataccaatagaaactaagctattgggtactcgagcgatggcttgcagagcgtatgccaaggcattgcgctacaaggaggaggagttccttctgcgagaagattcccaagtttttgagtccttgattctaatcaacaacaagctgcagcaaagagaagcagcggaaggtctgctcacaaggtatcgtaatgcagccaacgaactaaatgttcaaggaagatggtatgaaaaacttcacaattgggatgaggcgctggaacactatgaaaggaatctaaagacggattcctcggacttggaggcgcgactcggtcacatgcgctgcttggaggccctcggagattggtcggagctgagcaacgtgaccaagcacgagtgggaaaacttcggtacagaggccaaatcaagagcaggacccttggccgcagtggccgcctggggtctccaggattgggaggcgatgcgggagtacgtaaggtgtataccagaggatacccaagatggaagctactatcgtgctgtcctcgccgtgcatcatgacgactttgagaccgcacagcgccttattgacgaaacaagggacctcctcgacacggagctcacatcaatggcgggcgagtcctatgaaagagcctacggagccatggtatgtgtacaaatgctggcggagctggaggaggtcatccaatacaagctcattcccgagaggcgagagccgttaaagaccatgtggtggaagcgtcttcaaggaggccagcgactagtagaagactggcgaaggatcatccaggtgcactcgctggtggtaaaaccgcacgaggacatacatacctggctgaagtacgctagtctgtgcaggaagagcggctccctgcacttgtcccataaaactctggtgatgctgctaggcaccgatcccaagcttaatccgaaccagccactgccttgtaatcaaccacaggtgacctatgcgtacaccaagtacatggctgccaataatcagctgcaggaagcctacgagcagttgacgcacttcgtcagcacctatagtcaggagctaagctgtttacctccggaagcactaaagcaacaagatcagcgactcatggcccgctgctatctgcgcatggccacctggcagaacaagctgcaggacagcatcagaccggatgccattcaaggcgcactcgaatgctttgaaaaggccaccagctatgatcccaactggtacaaggcctggcacctgtgggcgtacatgaactttaaggtggtgcaggcccaaaaatcggcgctggacaaacaacagcctccgggagccagcatgggaatgacaatgggctctggcctcgacagtgatctaatgatcatacagcgatacgccgttccggcagttcagggattcttccgttcaatcagccttataaaagggaattcgctgcaggatacgctacgtttgttaactctttggtttgactatggcaaccatgcagaggtgtacgaggcgctgctctctggaatgaagctgatcgagatcaacacctggcttcaggttatcccgcagcttattgcccgcatcgatacccaccgtcagttggtgggtcaattaatccaccaactcctaatggacataggaaagaatcacccgcaggctctggtctatcctctaacagtcgcttccaagtcagcatcattggcgcgcaggaacgccgcctttaagatcctcgactcgatgaggaaacactcgcccaccttggtagagcaggcggtcatgtgtagtgaggagctcatccgtgtggcgattctgtggcacgaacagtggcacgaaggtttggaggaagcctcgcgtctttactttggagatcgcaacgtaaagggcatgtttgagatcttggagccactgcatgctatgctggagaggggaccacaaacactcaaggagacatccttctcgcaggcctatggacgcgagctgacagaggcgtacgagtggtcgcaacggtacaagacatcggcggtggtgatggatctggatcgagcgtgggacatttactatcacgtcttccaaaagatctcgcgccagctgccacaacttacctcgctggagctgccgtatgtctcgcccaaactgatgacgtgcaaagatctcgaactggcagtgcccgggtcctacaatcctggccaggagctcatccggattagtatcattaaaaccaaccttcaggtgattacttccaagcagcggccgcgaaaactgtgcatacgcggctccaatggcaaggactatatgtaccttctaaagggacacgaggaccttcgtcaggacgaacgcgtgatgcagctattctccctggtgaacacattgctgttggatgaccccgacactttccgtcgtaacttggccatccagcggtatgcggttatcccgctcagtaccaactcgggtcttattggttgggtgccacattgtgacacccttcatacgctaatccgggactaccgcgacaagaagaaggtgccactgaatcaggagcatcgcaccatgctcaattttgcgccagactatgatcacctcacgctgatgcagaaggtggaagtgttcgagcatgcgttgggtcagacgcaaggcgacgacttggccaagttgctgtggctcaagtctccgtcctctgaattgtggtttgaacggagaaacaactatacccgctcactggcagtcatgtcaatggttggatatatcctaggtctgggcgatcgtcatccatcgaaccttatgctggatcgtatgagcggcaagatactgcacatagactttggcgactgcttcgaggtggccatgacccgcgaaaagtttcccgaaaagatacccttccgtctcacccggatgctaataaaggcaatggaggtcactggcatcgagggcacctacagacgcacctgcgaaagcgtgatgctggtgcttcgccgcaacaaggattccctgatggcggtgctggaggcctttgtctatgatccgctgctcaactggagactgttggatgtggacaagaagggtaacgatgcggtggctggggcgggtgctccaggtggacgtggcggttccggaatgcaggatagcctcagtaactccgtagaggactccctgcccatggccaagtcgaagccctacgatccgacgctacagcaaggcggcctgcacaacaacgtggccgacgagacgaacagcaaagccagccaggtaatcaagcgggtcaagtgcaagctaacaggcaccgacttccagacggaaaagagcgtaaacgagcagtcgcaggtggagctgctcatccagcaggcgaccaataacgagaacctctgccagtgctacattggctggtgtccgttttggtag

SEQ ID NO: 2519 - protein, 2470 aa, Drosophila melanogaster
MSTTSVVQQFVNGLKSRNRNVQNKATQDLLFYVKTELREMSQEELAQFFDEFDHHIFTMVNATDINEKKGGALAMKCLINCEGSLTARKGISPYLNRLRDLLLINDVSVMEIAARSLVKLANMPTSKGADSFDFDIKKAFEVLRGERQEYRRHSAVFILRELAIALPTYFYQHILTFFEVIFNAIFDPKPAIRESAGEALRAALIVTAQRESTKQSSEPQWYRICYDEANGSFNADLGSSKDQKGVTRDDRIHGGLVVFNELFRCANATWERRYTSLKTLFPKTQHNKFLEASSSSSMGSQLNTLVPRLKVPFIDKLGSTQTHLGEGEHHKGVAKFASHNVLESAYAQEILQEHYTSICDNVLEQRTSKSPYVQQALLQILPRLAAFNRAVFVEKYLQTCVSHLMQILRGKEKDRTVAYITIGYMAVAVQSAIEVHLSSIMTSVKVALPSKDLTSKRKVPVDPAVFACITLLAHAVKSEIADDVKDILEQMFYTGLSPALTVCLRELSENVPQLKSAITEGLIGILSQVLMNKAAILPYTALPTIAIDGSLMQNGDGATTVLALKTLGTFNFEEQNMLDFVQRCADYFIVHEQQEIRLEAVQTCTRLLKLAVQSSESMENSKTLSDTVSHVIERLLMVAITDMDCNVRIRILRSLDETFDGKLAQPESLNSLFITLHDEIFEIRELAMVTIGRLSSINPAYVMPKLRTTMIELITDLKYSGMSRNKEQSAKMLDHLVISTPRLISSYMNPILKALVPKLHEPESNPGVILNVLRTIGDLAEVNGGSDEMELWADDLLSILLEMLGDAGSPDKRGVALWTLGQLISATGRVVTPYHKYPVLIDILINFLKTEQRRSIRRETIRVLGLLGAMDPYKHKMNKGLIDSQKDNVLIAYSDGKVDESQDISTAELLVNMGNALDEYYPAVAIAALMRILRDPTLSTRHTSVVQAVTFIFQSLGIKCVPYLAQVLPNLLDNVRTADNNLREFLFQQLAILVAFVKLHIISYMGDIFKLIKEFWTINTPLQNTLINLIEQIAVALGCEFRDYLAELIPQILRVLQHDNSKDRMVTRRLLQALQKFGSTLGYYLPLILPPIVKLFDSPYVPQQVSMVALETINNLACQLDFTDFSSRIIHPLVRVLDAEPELRDQAMTTLRSLAKQLGKKYLVFVPMVQRTLNKHRIVDPEYEELLSKIKSCSTLADSYGAGESELRPSRFKNNEPFVTDRNSNNKNLQVTTNELRTAWQVTRRVSKDDWVEWLKRLSIGLLKESPSHALRACRSLAQEYDTLLRDLFNAAFISCWTELSPDLKNELTQSLIQALQVTDMPEITQTILNLAEFMEHCDRDPIPIETKLLGTRAMACRAYAKALRYKEEEFLLREDSQVFESLILINNKLQQREAAEGLLTRYRNAANELNVQGRWYEKLHNWDEALEHYERNLKTDSSDLEARLGHMRCLEALGDWSELSNVTKHEWENFGTEAKSRAGPLAAVAAWGLQDWEAMREYVRCIPEDTQDGSYYRAVLAVHHDDFETAQRLIDETRDLLDTELTSMAGESYERAYGAMVCVQMLAELEEVIQYKLIPERREPLKTMWWKRLQGGQRLVEDWRRIIQVHSLVVKPHEDIHTWLKYASLCRKSGSLHLSHKTLVMLLGTDPKLNPNQPLPCNQPQVTYAYTKYMAANNQLQEAYEQLTHFVSTYSQELSCLPPEALKQQDQRLMARCYLRMATWQNKLQDSIRPDAIQGALECFEKATSYDPNWYKAWHLWAYMNFKVVQAQKSALDKQQPPGASMGMTMGSGLDSDLMIIQRYAVPAVQGFFRSISLIKGNSLQDTLRLLTLWFDYGNHAEVYEALLSGMKLIEINTWLQVIPQLIARIDTHRQLVGQLIHQLLMDIGKNHPQALVYPLTVASKSASLARRNAAFKILDSMRKHSPTLVEQAVMCSEELIRVAILWHEQWHEGLEEASRLYFGDRNVKGMFEILEPLHAMLERGPQTLKETSFSQAYGRELTEAYEWSQRYKTSAVVMDLDRAWDIYYHVFQKISRQLPQLTSLELPYVSPKLMTCKDLELAVPGSYNPGQELIRISIIKTNLQVITSKQRPRKLCIRGSNGKDYMYLLKGHEDLRQDERVMQLFSLVNTLLLDDPDTFRRNLAIQRYAVIPLSTNSGLIGWVPHCDTLHTLIRDYRDKKKVPLNQEHRTMLNFAPDYDHLTLMQKVEVFEHALGQTQGDDLAKLLWLKSPSSELWFERRNNYTRSLAVMSMVGYILGLGDRHPSNLMLDRMSGKILHIDFGDCFEVAMTREKFPEKIPFRLTRMLIKAMEVTGIEGTYRRTCESVMLVLRRNKDSLMAVLEAFVYDPLLNWRLLDVDKKGNDAVAGAGAPGGRGGSGMQDSLSNSVEDSLPMAKSKPYDPTLQQGGLHNNVADETNSKASQVIKRVKCKLTGTDFQTEKSVNEQSQVELLIQQATNNENLCQCYIGWCPFW

SEQ ID NO: 2520 - DNA, 7404 bp, Nasonia vitripennis
  CDS (1)..(7404)
atgacaagtacgcttgttttacaattcgtccagcggctcaagtcaaagcatgaggatgtcagaaataaagcagcccgtgagctctgtctctatgtcaagacagagctacgcgaggccacacaagaggaaattacagcttttatggatgagttcaatcaccacatatttgagatggtttctggctcagacatcaacgagaaaaaaggtggtatcctggcaatagtatgcctcattggtgcagatgtaggcaacatcaatactcgcaccattcgatttgccaactatctgcgaaaccttctgccttccagtgacattggagttatggagttggctgccaaaacagttggcaaactagctctggtttctggcacctttactgctgagtatgttgaattcgaagtcaagagggcctttgaatggcttagtggtgatagaaatgagaacaagagacacgcagcagttttggttctcaaagagctagcagtctctatgcccacatattttttccagcatattacccagttctttgaattgatctttaaagcagtctgtgaccctaagccagccattcgtgaaggtgctgtagaagccctccgcgcagctctagtcttgacagcacaacgtgaaactgccaagcagacacagaaacccacatggtacaagttgtgctatgaagagatagttgcaggctttgaggaggtttatgtccgggagaagagcttcaatcgggatgatcgaatgcacggctcattgctaattctcaatgagctgttgcgctgtagtaatctacaatgggagcggctttatgaagacctcatggagcggctcagctgttccagccagccgaccgacaatgatatcctgtcattgatgccgagattaaagacgagcctcatgtcaaagtggacggcctcagctcctcagagttcgttgcagagtgttcaacacaatctccatccagttcacgagtcgaacgcctgtcggagtttgatgctggagaaactcgatgaaatcaacgcagacgtgatgaaccagcgccactgccgcaactcgcacatacagaacgcgctcatgactctgctaccaagattagcggccttcaacaaggaaaaatttgttcaggacaatctacgcgagtgcatgcattatctaattgtcagcctgaggggcagagagaaggacagagcagctgcctttaccacgatcgggttgatagctgtagccgttgacgaggccatcaagccttacttacccaagattatggacgtgattaaaagctcgctaccgtccaaagagacacccaacaaaaagaggagctctgctctcgaacctgcggtttttgtttgcattacactgctgggacatgctgtgaaacagaccatcacgtcggatgtgagggatttgctggagccgatgctggctaccgggttgtcgccgattctcaccacctccttgagagaactggcgcatagcgtgccttccttgaagcctgatatatctcagggcctactcaggatgttgtcacaggtgctgatgtacaagcctcttcgtcatccaggtgcaccttggacagccacaagtcccgtttctgccccacctactgagatcgatgtagcttccacggtcttaggtcttcgcacccttggtaccttcaacttcgatggaaatccattattacagttcgtgcgtcgttgtgccgactacttcctcacatgggaagaaccggaggtacgtctcgaggccgtcaaaacgtgctcgagactgctgagattagcgcttggtcaacccggacctactgttactagtaccgtatctactgtgcttgggaaattgttagtcgtgggaatcacggataccgattcggatgttagatactgggtgctggcgtcgctggatgagccatttgatattcatctagcacaagcagagagtctctcatgtttgtttgtcgctatgaatgacgaggtttttgaaattcgggaattagctattcgtacaatcggtcggctgagcggcatgaatccagcctacgtgatgccatcccttcgtaaagctctcatacagttcctcaccgagctcgaacactcgggtatgggtcgcaacaaggagcaggcagcccgtatgctggatcatctagtcgtctcagcaccgagactcatccgaccctacatggaaccggtgctcaaagttttggtacccaagctaaaggaaaccgaaactaatccaggagttgtgctggcagttttgagagcagttggagatttggcagaggttagcggcgctgagatgcagccctggatgcctgagctgctcgcaatattgctagagatgctagtggacgcgtcgtcgccggaaaagagaggtgttgcactgtgggtcttgggtcagcttgttggtagtacgggtcatgtagtgcgaccgtatacacagtacccatcgctgctcgatgttcttctgaacttcctcaagaccgagcaacagcccgtcgttcgtcgtgaaactatccgtgtacttggtcttttaggcgcgctcgacccctacaagcacaaaatgaaccttggacagatatcatctccacagctcgaagctctgagctctcgaccgtctgccgatgctcgccctgaagctggtgacgagcttagcaccagtgagatgctggtcaatatgccctcggctaccctggaggagtactatccagccgtagccatcgcaaccctcatgcgcattatccgcgagccaactctcgcgcagcatcacactatggttgtccaagccgtcactttcattttcaagagtcttggtattaaatgcgtgccatatatatcccaagtgatgccgagttttcttaacgtgcttcggactgcagatgtcggattccgggagtatctcttccagcagctcgctattctcattgctatcgtcaagcatcatattcgcaactacctcgatgacatattcgcgcttgtgcaagagttctggacgtggaacagtccgcttcaaggcacgctcattcatctagtcgaacacatcgctgtggctttaggagccgaatttaagatatatcttcctcgcctgatgcctcaaatactgcgagtcctgagtcatgacacaagcaaagaacgccaggtcacggtgaaactgttactcgctttgcaaaagttcgccggaaacctcgacaattacctgcacttggtcttaccacctgtagtccgactcttccagacgagtccggattgcccggtcgctgtcagtcggtgtgctctggaaacagtcgaacaactagccgaaagccttgactttacagactttgcctcccgcatcgtacagccgctcgttcgaacgctggatcagtgttccgagcttcgagctccggcctgcgagactctgtgcgccttattgctgcaattggggcccaagttccacatcttcttgccacttgttcagcgtgtcatggtacggcataggatcgtccatccacgatttgagagtttagtagacaaagtgcaaagcgcatctagattaggaggcccaggacgttttgaagtacgccaggccagaagtaagagtcagcgcgcggaattgggcctagctagtgctgcagatacaaccgtcatcaagaagctcaacgtttctgcatcgaatcttcaaaaagcctggacagctactagacgcgtgtccaaggacgactggctcgagtggcttcgcagcctctccattggtctcttaaaagaatccccgtcgccggccttacgttcctgctgggctctggcccaaacctattcacagctaccgcgagacctcttcaacgcggcttttgtctcctgctggagcgaactcgacgagtcccaccgcaccgagctcgtggctactcttcaacaagctctcatggttcccgatatacccgagatcagtcagacaatcctaaatctcgccgagtttatggaacattgtgataagggaccgttacctttggatagtaaagtcttgggtgaacgagcgatgcattgtcgggcatacgctaaggcgctccactacaaagaggacgaataccacaagggccgcagcggtgctgtattcgagtcactcatcagcattaacaacaaattacagcagaaagaggctgcggaaggtctactcgagtacgttatgaatcagcagcaagagaacaacaagcaagagctgaaggtgcaggttcgctggtacgagaaactccataactgggacaaggctttgcatctgtatagggagaggttggaggttgatgcgcaagacgttgagtcgactttgggagagatgcggtgtttggaagctttgggagaatggggacaactgcacgaggtggcgatgagacaatggagttcgcatacccaagagactaaacagcgcatggccagaatggcagcggcggctgcctgggggttgaaccagtgggagagcatggaaaagcacgtggcgctgattcccaaagaaactcaagacggagctttctacagagctgtgttggcaattcacgacgagcaatatgacctggcgcacaagttgatagacaatgcgagagacttactggacaccgaattgacagccatggctggcgagagttatcagagagcttacaacgcaatggtcgaggtacagaagctcgcggagctcgaggaggtgatacagtacaagctcgtaccggaaagacgagcgaccatcaagtccatgtggtgggagcgattgcagggtggtcaacggatcgtagaggactggcagaagatcatacaggtgcacacgctcgttatttctccacaggacgatatgtacacatggctcaagtatgcgagtctttgtcggaaaagtggaaaccttgcgttgtgtcacaagacactggttatgctgctaggagtcgacccatccacagcgagacccgaccaagctcttcccattcaacatccacaggtaacattcgcttactgcaagcacatgtgggtggatggcaagcgtgacgcagcttatggtcaactccagcgcttcgtgcgtaccttcctaccaggccagcaacaacagcagcagcaaccagccgaagacgaacgtcaactcgaagctcgcaagcgcctactcgctcgttgttatctcaaactcggagagtggctggaagctctgcaaggtatcaacgaggactcgattcccaatgtcttgtcttactacgcgcacgcgacaaagcacgatccgagttggtacaaagcctggcacgcgttcgcctacaccaacttcgaagcggtattgttctataaacaccaacaaacggaaacggcattcaacgagcagcaacagcaacaacaaaatggaggtccaaacggagcgaatgttttggcaaacggagctgcaaagagtcaattgtcgtcccagtttataacgaggttcacggtaccagcgctggaaggtttcatcagatcgatcaatctgtcaaatgggaactctctgcaggatacgctcaggttgctgacgttgtggttcgagtatggacagtggcctgaagtttacgaggctattatagagggcattcgactcattgaaatcaacacttggctacaggttataccgcagctcatagccagaattgacacaccgcgagctttggtcggacgttgcattcataatcttctcgttgacatcggcaagactcatcctcaggctctggtatatccattgaccgtggcatcgaagagtgcgagtcacgcgcgtaagacggccgctaacaagatcttgaacagcatgagcgagcatagtccgacattggtacaacaggcgaagatggtgagtgacgagctcatccgcgtagccatactctggcacgagttgtggcacgagggtctcgaggaagcgagtagactgtatttcggtgaacgaaatgtcaaaggcatgtttgacacactagaacctttacacgcgatgctggagcgcggacctcagacgctcaaagaaacgtctttcaatcaagcctatggtcgcgacttaatggaagcacaagactggtgtcacaggtacaaggtgtcaggaaacgtacgcgatctcaatcaagcctgggacctttactaccacgtgttccggcgaatatcgagacaattaccacagctgacgagtctcgaattgcagtacgtcagtcctaagctgctgttgtgcagagatttggaactggctgtaccgggaagctatcaacccgggcagcctgttatcaggatcggtagtataaatagttcgctgcaagtcataacgagcaaacagcgaccgagaaagttatgcgtcaagggtagtaacggaaaggattacatgttcttgctcaaaggtcacgaagatcttcgtcaggacgagcgtgttatgcagctattcggtctagtcaatactttgttgctgcacgatccagatacgtttaggagaaatttgacgattcagagatacgccgttattcctttatctacaaatagtggccttattggatgggtacctcactgtgatactttgcacactttaatcagggattaccgagagaaaaagaagatacttctcaacatcgaacatagaattatgctgagaatggcaccggactacgatcacctgatgctcatgcaaaaagtcgaagtttttgaacacgccttagaacacacgtgcggtgacgatttggcccgtttgctctggttgaaatcaccatcgagcgaggtctggtttgatcgacgcaccaactacactcgctcactggccgttatgtcgatggttggatacatcctcggtttgggcgatcgacatccctcgaatcttatgttggacaggcttagcggcaaaatacttcacattgactttggcgattgcttcgaggtcgctatgactcgcgagaagttccctgaaaagatacccttccgtctcacccgaatgttaattaacgcgatggaggtgacgggtatagagggcacatacagacgcacctgcgaatcggttatgtcggtgctacatcgcaacaaggacagcttgatggccgtactcgaggccttcgtttacgatcctttgttgaactggaggctgatggacaacgccgctcctaagggcaagaggagcgacgcacagggcatgagcactagtagtagtcaggaacatggtgacatgctggattcgttgacagctacgttcccgaagaagggcgtaccttgtagcattgaaaacggaggtatgtgtgacagtaatcagccagaagctttgaacaaaaaggctcttcagatcataaacagagtccgtgataagctcactggccgcgacttttcacacgaagagacgctaagtgtgcagcgacaagtggatcttttgatacaacaagcaactaataatgaaaacctctgtcaatgttatataggatggtgtccattttggtaa

SEQ ID NO: 2521 - protein, 2467 aa, Nasonia vitripennis
MTSTLVLQFVQRLKSKHEDVRNKAARELCLYVKTELREATQEEITAFMDEFNHHIFEMVSGSDINEKKGGILAIVCLIGADVGNINTRTIRFANYLRNLLPSSDIGVMELAAKTVGKLALVSGTFTAEYVEFEVKRAFEWLSGDRNENKRHAAVLVLKELAVSMPTYFFQHITQFFELIFKAVCDPKPAIREGAVEALRAALVLTAQRETAKQTQKPTWYKLCYEEIVAGFEEVYVREKSFNRDDRMHGSLLILNELLRCSNLQWERLYEDLMERLSCSSQPTDNDILSLMPRLKTSLMSKWTASAPQSSLQSVQHNLHPVHESNACRSLMLEKLDEINADVMNQRHCRNSHIQNALMTLLPRLAAFNKEKFVQDNLRECMHYLIVSLRGREKDRAAAFTTIGLIAVAVDEAIKPYLPKIMDVIKSSLPSKETPNKKRSSALEPAVFVCITLLGHAVKQTITSDVRDLLEPMLATGLSPILTTSLRELAHSVPSLKPDISQGLLRMLSQVLMYKPLRHPGAPWTATSPVSAPPTEIDVASTVLGLRTLGTFNFDGNPLLQFVRRCADYFLTWEEPEVRLEAVKTCSRLLRLALGQPGPTVTSTVSTVLGKLLVVGITDTDSDVRYWVLASLDEPFDIHLAQAESLSCLFVAMNDEVFEIRELAIRTIGRLSGMNPAYVMPSLRKALIQFLTELEHSGMGRNKEQAARMLDHLVVSAPRLIRPYMEPVLKVLVPKLKETETNPGVVLAVLRAVGDLAEVSGAEMQPWMPELLAILLEMLVDASSPEKRGVALWVLGQLVGSTGHVVRPYTQYPSLLDVLLNFLKTEQQPVVRRETIRVLGLLGALDPYKHKMNLGQISSPQLEALSSRPSADARPEAGDELSTSEMLVNMPSATLEEYYPAVAIATLMRIIREPTLAQHHTMVVQAVTFIFKSLGIKCVPYISQVMPSFLNVLRTADVGFREYLFQQLAILIAIVKHHIRNYLDDIFALVQEFWTWNSPLQGTLIHLVEHIAVALGAEFKIYLPRLMPQILRVLSHDTSKERQVTVKLLLALQKFAGNLDNYLHLVLPPVVRLFQTSPDCPVAVSRCALETVEQLAESLDFTDFASRIVQPLVRTLDQCSELRAPACETLCALLLQLGPKFHIFLPLVQRVMVRHRIVHPRFESLVDKVQSASRLGGPGRFEVRQARSKSQRAELGLASAADTTVIKKLNVSASNLQKAWTATRRVSKDDWLEWLRSLSIGLLKESPSPALRSCWALAQTYSQLPRDLFNAAFVSCWSELDESHRTELVATLQQALMVPDIPEISQTILNLAEFMEHCDKGPLPLDSKVLGERAMHCRAYAKALHYKEDEYHKGRSGAVFESLISINNKLQQKEAAEGLLEYVMNQQQENNKQELKVQVRWYEKLHNWDKALHLYRERLEVDAQDVESTLGEMRCLEALGEWGQLHEVAMRQWSSHTQETKQRMARMAAAAAWGLNQWESMEKHVALIPKETQDGAFYRAVLAIHDEQYDLAHKLIDNARDLLDTELTAMAGESYQRAYNAMVEVQKLAELEEVIQYKLVPERRATIKSMWWERLQGGQRIVEDWQKIIQVHTLVISPQDDMYTWLKYASLCRKSGNLALCHKTLVMLLGVDPSTARPDQALPIQHPQVTFAYCKHMWVDGKRDAAYGQLQRFVRTFLPGQQQQQQQPAEDERQLEARKRLLARCYLKLGEWLEALQGINEDSIPNVLSYYAHATKHDPSWYKAWHAFAYTNFEAVLFYKHQQTETAFNEQQQQQQNGGPNGANVLANGAAKSQLSSQFITRFTVPALEGFIRSINLSNGNSLQDTLRLLTLWFEYGQWPEVYEAIIEGIRLIEINTWLQVIPQLIARIDTPRALVGRCIHNLLVDIGKTHPQALVYPLTVASKSASHARKTAANKILNSMSEHSPTLVQQAKMVSDELIRVAILWHELWHEGLEEASRLYFGERNVKGMFDTLEPLHAMLERGPQTLKETSFNQAYGRDLMEAQDWCHRYKVSGNVRDLNQAWDLYYHVFRRISRQLPQLTSLELQYVSPKLLLCRDLELAVPGSYQPGQPVIRIGSINSSLQVITSKQRPRKLCVKGSNGKDYMFLLKGHEDLRQDERVMQLFGLVNTLLLHDPDTFRRNLTIQRYAVIPLSTNSGLIGWVPHCDTLHTLIRDYREKKKILLNIEHRIMLRMAPDYDHLMLMQKVEVFEHALEHTCGDDLARLLWLKSPSSEVWFDRRTNYTRSLAVMSMVGYILGLGDRHPSNLMLDRLSGKILHIDFGDCFEVAMTREKFPEKIPFRLTRMLINAMEVTGIEGTYRRTCESVMSVLHRNKDSLMAVLEAFVYDPLLNWRLMDNAAPKGKRSDAQGMSTSSSQEHGDMLDSLTATFPKKGVPCSIENGGMCDSNQPEALNKKALQIINRVRDKLTGRDFSHEETLSVQRQVDLLIQQATNNENLCQCYIGWCPFW

SEQ ID NO: 2522 - DNA, 7371 bp, Anopheles gambiae str. PEST
  CDS (1)..(7371)
atgtcgatggtaaaggtgctgcagttcgtgaacgggctcaagtcccgcaacaaggatgtgcagaacaaggccatcaaggacctgtcgctgtacgtcaagacggagctgcgcgaaactccggacgacatgtttttcgaagactttaaccaccacatcttcgagatgctcaccagcacagacaataacgagaaaaagggcggaatactggccatcgattgtctcatcaacggcgatgtcgtgaacacgaccaacaagatttcccgctactcgaacaatctgcgaaatttgttgccgatgagcgacgtttgtgtgatgcagctggccgccaacgtgttggtcaagctggcgctgctgcccggctcgaacggtgccagctcgttcgagttcgacatcaaacgtgccttcgagtggctgtcggaggaccgggtcgagaacaagcggcacgccgcggtgctggtactgcgcgagctggccgtcgcaatgcccacgtttttctaccagcaggtcggaagcttcttcgatcacatatttgtcgcgatcaaggacccgaaggcggccatccgggagggtgccgggcaggcgctgcgggccgtactgatcgtgacgtcgcagcgcgaaggaaccaagcaaaacaataacacccagtggcacatgaactgctacgatcaggcattcgagtgcttgcgcgatacggtggggcgcgagaagaatttaaatcgcgacgatcgcgtccacggtgcgctgatcgtgttcaacgaaatactgcgctgttcgcacgcagcgtgggagaagaagtacatgcagctggacagtttgccggtggaccagaagcgatcgttgcgttcgcagcgggaagaggaagggcggggattcttcccacgcatccgtgtgccttttatggagaagtttggaaaccattcgggacaaagctcggtcagctacagctcgcgctactacgacgtcgtaacggatatgaagttcttccgccagaacagcagcgtgcaggagtcggcactgtaccgagcgctggtgaaggagaagtacgacaccatctgccaggcggtgctggatcagcgtagctccaagtcaccgtacgttatccagacgctgttggcgatctttccgcggctggcagccttcaatagggaggagtttgtgcggctgcatctgcgcacggtcgccaactacctgctgacgctgctacgaagcaaagagaaggaacgcaatgccgccttcgtatcgctcggctatattgcggtcgcggtggaaaaggaaattgaaccgtacaccaaacgcatcatggagttgatcggaagtgcactgccgctgaaggatacacccagcaagcggaaagcgccggtggatccttccgtgttcatgtgcgtcatgctgctggggcatgcgctgaaaggaggcataactcacgagatcaaggagataatagcaccgatgctatcgaccggtctaagtccggcactgatcgtttgcttgcgggagctctgcgaaacggtgccccaggcgcaacaggagataacggcgggcctgctgaagatactgtcgtacgtgctgatgaaccgacctttgccacaatttattgtgccaaagtcacactcgcagccacagtcgcaaccgccgcagcagcaggtccacgatacagccacgatagtgctggcgctgcaaacgcttggcaagtttagcttcgaaggatgcagcttgctacagtttgtgcagcgctgtgccgatcactttctcaacagcgagcagcaggagatccgcatagaagcagtccatacctgtacgtttttgctaaagctagcgctccaggcggcggaaagtaacgggaacgatgtgtcggaaacgcttacgcaaacgctcagctcggtgctggagaaaatcctcgtcgttggcatcacggacgtggatccggcggtgcgcttgcgagtgctgaaatcgctggacgaaagcttcgacacgcagctagcgcagccgtggtttctcagctcgctgctagtgacgatccacgacgaggtgtttgagatacgcgagctggcgatcatcatcattggccggctgtcgacgatcaatccggcctatgtgatgccaagcttgcgcaaaacgatggttcagttgctgaccgagctggagcattcgggcgtcagccgcaacaaggagcaaagtgcgagaatgctggatcatctgatcgtcagcacgccccggctggtggcgtcgtacatgcgcccgatactgaccattctcgtgccaaagctgaaggaaccggaccagaacccgagtgtggtgctgaacgtgctccgtgcgatcggcgatctggcggaggtgattggcggccaccatgtgctgcagaagtggtcggacgagctgctacagctgctgctggacatgctcagtgacgctggcagcacggaaaagcgagctgtggcactgtggacctttgggcagctagtcagtgcgaccgggcaggtagtggtaccgtacaacaagtacccgaatctgatcgatatactgataaacttcctgaaaacggagcagcaactgtacgtccgtcgggaaacgatccgagtgctgggtttgttgggagcgctcgacccgtacaagcacaagatgaatcgcgggctgatcgacagccagacgagtgcaaacattcttatttctgtcgacacgaaaaccgacgaacatacggacctgtccacgtcggaaatgctgatcaacatgagcacccagctggacgagtactatccggcggtggtcatatcgacgttgatgaaaattttgcgcgatcccaccctgtccaaccatcatctcagcgtggtgcaggccatcacgttcaccttcaccagtctgggcatcaaaggggtcccgtacctctcgcaggtgttgccctgtctgctgcgcaacatcgtcacagccgagatgagccttaaggagtacctgtttcagcagctgtccacgctgatatcgatcgtgaagcagcacattatcgggttcatggacgacattttcgagctgatcaagacctcgaccgcatcggccgcctcgctgcaaccgaccatcatcaatctggtggagaagattgcgattgcgctcggttgcgagttcaaagtgtatctacctcagctgatgccgcaaatattgcgcgtgctgctgcacgacacgtctaaggaccgggcggtgacggtgaagctactcggcgcgatgcgcaacttcggcaacaatttagacgactatctgcacctgattataccggcgatcgtgaagctgttcgagccgctcgacataccactgaacgtttccattaccgcactgcaaacgatcaactatctcgccgaggtgctagatttcactgatttttcttcgcgcatcgtgcacccgctggtgcgcgtgctcgatttctatcccgagctgcgtcccgtagcactcacgacgctctgctcgatcatgatccagctcggtcggaagtacctcgtgtttgtgccgcttgtgaatcgggtgatgatcaagcacaagatcccgtcggtggagtacacgaagctgctgacgaagctgcagaacaacagcacactggcgatggatgacgagttccgcatacgacaggcccggaatcggaatcgcgaaatttccctcccgagcgacagcacgatcaagaagttccccgtttcgatgtccgatctggaggcaatgtttaaggcgaatcgacgcgtctccaaggacgattggttggagtggctgcgccggctgagcatcattctgctgaaggagtccaaaaatccggcccttcgatcgtgcgccacactggcccaaaactacccacagctactgaaagacctgttcaacgctgcgttcgtatcgtgctggtcggatttgtcggaaaagctgaagcaggatcttgctcacagcctcacgcaggcgctgacggtgcaggatctgcccgaaattacccaaacggtgttgaatttggcggaatttatggagcactgcgaaagctacccgctgaagatcgactcgaagatactgggcgaacgagccatggagtgccgtgcttacgcgaaagcgctgcactacaaagaggacgaatttcaccggacagacgatccgccccagtcgctgttcgagtcgctgatcctgatcaacaacaagctgcagcagaaggaagcggcggaagggctgctggagtatgccggccgccatcggtccagcgccgaggagatgaaggtgcaagtgcgctggtacgaaaagctgcacagctgggaacaggcgcggtcactgtactcggaaaagctgaagagcaatccgaacgatttggagtcccggctcggtgagatgcgctgcctggaagcgttgggcgagtggtcggcattgaatgctgtcaccacgcagaactgggatgctctcggctcggagggacagagcaaggctggtcggctggcagcagccgccgcctggggtctgcaggactgggatgggatgcatcggttcgtgcgctgcattccggaggacacgcaggacggagcattctatcgcgccgtgctggccgtacataatgagcaatacgcgttggcgcaaagtttgatcgattcgacgcgtgatctgctggacacggagctgacagcgatggcgggcgagtcgtacgagcgtgcgtacggtgcgatggtatgcgtgcagatgcttgccgagctggaggaagtgatccagtacaagctgatcccggaacggcgcgagacgatcaaatcgatgtggtgggaccgcctgctcggtggccagcggctggtcgaggactggcagcgcgtcatacaggtgcactcgctggtgctgtcgcccaaggaggacattcgtacgtggctgaagtttgcgtcgctctgtcgcaagaatggatccttgaagttgtccgagaagacactcaccatgctgctcgagtacgatccgatggagaatctgagcgaaccgcttccaattgacaaaccgcacgtcaccttcgcctacacaaagcacctgcatatggcggggtacacgaaagaggcttacgaccacctgaaccggtttgtcgcgtccagtggtgcgggcgggcaggatgacttgaaggatgaaaatagacgcctgttggcgcgatgcttcctgaagctgggcatgtggcagagtagttccaccggcggaaacctggtaaaggaccacctcatcaatggcatcctggtgtgctacagccgggcaacgaagcacgatccgaactggtacaaagcgtggcacaactgggcgtacatgaactttgaagtggtgcaggcgaagaagcagcaggaagaatacaccaaaaatccgggaagcgcggcggagcgaaacttgataaagcattacgccgtgccggccgtccggggcttcttccagtcgatcaacctctcgcagggcaattcgctgcaggacacactgcgcctgctaacgctctggttcgatcatgcccagtacgaggaggtgtacgaagcgctcgtcgaaggaatgcgtgtgatcgacaaaaacacgtggctgcaggtgatcccgcagctgatcgcacgcatcgatacgccgcgcaatcttgtcggccagctgatcaactatctgctgacggagatcggtaaaactcacccgcaagcgctcgtgtatccgcttacggtggcctcgaagtcggcgccgggcacgcgtaagcaggcggcgcacaaaatcctcaacaacatgtgcgaacattcgaacacgctggtcaatcaggtactgctgatcagtgaggagctgattcgggtggccatcctttggcacgagcagtggcacgagggtttggaggaagcgtcccggctgtactttggcgagcagaatgtggaaggcatgttcgcgacgctggaaccgttgcacgccatgctgcagcggggaccgcaaacgttaaaggaatcatccttcaaccaggcgtacggacgtgacttgaccgaggcacaggaatggtgcaaacattataagaactctaaaaatacgcgagatttgaatcaagcatgggacctatactaccacgtgttccggcgcatttcgcgccagctcgtacagctcacctccctggagctgcagtatgtcagtccgaagctgctggcatgtcgcaaccttgagctggcagtcccaggcagctacacgcccggtcaacagctgatctgcatcgccagcatcgagacgaacctgacgatcatcagctcgaagcaacggcctaggaagctgtgcatccgcgggtcgaatggtaaaaactacatgttcctgctgaaaggccacgaagatttgcgccaagatgagcgagtgatgcagctgttcgggctggtcaacacactgctgctgaatgatcgtgacacgttccggcgcaatctaaccattcaacggtatgcggtgatcccgctgagcaccaactcgggtctgatcggttgggtgccccactgtgacacgctgcacaagctgatccgggactatcgcgattcgaagaaaacgatgctaaacatcgagcataggatcatgctgcgaatggcaccggactacgaccatctcacggtgatgcagaaggtggaggtgtttgagcatgcgcttgatcaaacgaaaggagacgatctggcgaagctgctctggctgaaaagcccttcgtcggagcagtggtttgatcggcgcacgaactacatccgctcccttgcggtcatgtcgatggtgggctacatcttgggtctcggcgatcgccatccttccaatctgatgctggataggttgagtggaaaaattcttcacatcgatttcggcgattgcttcgaggttgcaatgacgcgagaaaagttcccggagaaaatacccttccgcttgacgcgcatgctgatcaacgcgatggaggtgaccggcatcgaaggaacgtatcggcgcacgtgcgagagcgtaatgaacgtgctgcgccgtaacaaggacagtcttatggcggtactggaagcgttcgtgtacgatccgctgctcaactggcgcctgctagattcggaccgattgcgtcgttcaaagaacgccggtgacatggacagcgtgtcgggcagcatgcacgaagactctctgctgagctacaatgccagacgcgatgctcggttgaatgagctgaatgcaacgacgggaccggccgccggaggtcaaccgtcggctaccaatcccgtcgacgtaaccaataagaaggcacgtgcaattgtcgatcgagtgaaggacaagctgaccggcaaagatttcggcaaagcagaaccagtggccgtcaatagacagatcgacctgctgatccagcaggcaaccagcaacgaaaatctgtgccagtgctatatcggctggtgtccgttttggtaa

SEQ ID NO: 2523 - protein, 2456 aa, Anopheles gambiae str. PEST
MSMVKVLQFVNGLKSRNKDVQNKAIKDLSLYVKTELRETPDDMFFEDFNHHIFEMLTSTDNNEKKGGILAIDCLINGDVVNTTNKISRYSNNLRNLLPMSDVCVMQLAANVLVKLALLPGSNGASSFEFDIKRAFEWLSEDRVENKRHAAVLVLRELAVAMPTFFYQQVGSFFDHIFVAIKDPKAAIREGAGQALRAVLIVTSQREGTKQNNNTQWHMNCYDQAFECLRDTVGREKNLNRDDRVHGALIVFNEILRCSHAAWEKKYMQLDSLPVDQKRSLRSQREEEGRGFFPRIRVPFMEKFGNHSGQSSVSYSSRYYDVVTDMKFFRQNSSVQESALYRALVKEKYDTICQAVLDQRSSKSPYVIQTLLAIFPRLAAFNREEFVRLHLRTVANYLLTLLRSKEKERNAAFVSLGYIAVAVEKEIEPYTKRIMELIGSALPLKDTPSKRKAPVDPSVFMCVMLLGHALKGGITHEIKEIIAPMLSTGLSPALIVCLRELCETVPQAQQEITAGLLKILSYVLMNRPLPQFIVPKSHSQPQSQPPQQQVHDTATIVLALQTLGKFSFEGCSLLQFVQRCADHFLNSEQQEIRIEAVHTCTFLLKLALQAAESNGNDVSETLTQTLSSVLEKILVVGITDVDPAVRLRVLKSLDESFDTQLAQPWFLSSLLVTIHDEVFEIRELAIIIIGRLSTINPAYVMPSLRKTMVQLLTELEHSGVSRNKEQSARMLDHLIVSTPRLVASYMRPILTILVPKLKEPDQNPSVVLNVLRAIGDLAEVIGGHHVLQKWSDELLQLLLDMLSDAGSTEKRAVALWTFGQLVSATGQVVVPYNKYPNLIDILINFLKTEQQLYVRRETIRVLGLLGALDPYKHKMNRGLIDSQTSANILISVDTKTDEHTDLSTSEMLINMSTQLDEYYPAVVISTLMKILRDPTLSNHHLSVVQAITFTFTSLGIKGVPYLSQVLPCLLRNIVTAEMSLKEYLFQQLSTLISIVKQHIIGFMDDIFELIKTSTASAASLQPTIINLVEKIAIALGCEFKVYLPQLMPQILRVLLHDTSKDRAVTVKLLGAMRNFGNNLDDYLHLIIPAIVKLFEPLDIPLNVSITALQTINYLAEVLDFTDFSSRIVHPLVRVLDFYPELRPVALTTLCSIMIQLGRKYLVFVPLVNRVMIKHKIPSVEYTKLLTKLQNNSTLAMDDEFRIRQARNRNREISLPSDSTIKKFPVSMSDLEAMFKANRRVSKDDWLEWLRRLSIILLKESKNPALRSCATLAQNYPQLLKDLFNAAFVSCWSDLSEKLKQDLAHSLTQALTVQDLPEITQTVLNLAEFMEHCESYPLKIDSKILGERAMECRAYAKALHYKEDEFHRTDDPPQSLFESLILINNKLQQKEAAEGLLEYAGRHRSSAEEMKVQVRWYEKLHSWEQARSLYSEKLKSNPNDLESRLGEMRCLEALGEWSALNAVTTQNWDALGSEGQSKAGRLAAAAAWGLQDWDGMHRFVRCIPEDTQDGAFYRAVLAVHNEQYALAQSLIDSTRDLLDTELTAMAGESYERAYGAMVCVQMLAELEEVIQYKLIPERRETIKSMWWDRLLGGQRLVEDWQRVIQVHSLVLSPKEDIRTWLKFASLCRKNGSLKLSEKTLTMLLEYDPMENLSEPLPIDKPHVTFAYTKHLHMAGYTKEAYDHLNRFVASSGAGGQDDLKDENRRLLARCFLKLGMWQSSSTGGNLVKDHLINGILVCYSRATKHDPNWYKAWHNWAYMNFEVVQAKKQQEEYTKNPGSAAERNLIKHYAVPAVRGFFQSINLSQGNSLQDTLRLLTLWFDHAQYEEVYEALVEGMRVIDKNTWLQVIPQLIARIDTPRNLVGQLINYLLTEIGKTHPQALVYPLTVASKSAPGTRKQAAHKILNNMCEHSNTLVNQVLLISEELIRVAILWHEQWHEGLEEASRLYFGEQNVEGMFATLEPLHAMLQRGPQTLKESSFNQAYGRDLTEAQEWCKHYKNSKNTRDLNQAWDLYYHVFRRISRQLVQLTSLELQYVSPKLLACRNLELAVPGSYTPGQQLICIASIETNLTIISSKQRPRKLCIRGSNGKNYMFLLKGHEDLRQDERVMQLFGLVNTLLLNDRDTFRRNLTIQRYAVIPLSTNSGLIGWVPHCDTLHKLIRDYRDSKKTMLNIEHRIMLRMAPDYDHLTVMQKVEVFEHALDQTKGDDLAKLLWLKSPSSEQWFDRRTNYIRSLAVMSMVGYILGLGDRHPSNLMLDRLSGKILHIDFGDCFEVAMTREKFPEKIPFRLTRMLINAMEVTGIEGTYRRTCESVMNVLRRNKDSLMAVLEAFVYDPLLNWRLLDSDRLRRSKNAGDMDSVSGSMHEDSLLSYNARRDARLNELNATTGPAAGGQPSATNPVDVTNKKARAIVDRVKDKLTGKDFGKAEPVAVNRQIDLLIQQATSNENLCQCYIGWCPFW

SEQ ID NO: 2524 - DNA, 7272 bp, Gibberella zeae PH-1
  CDS (1)..(7272)
atggcgcaagcacagcagatcgccttggagcgactggagcaagtctcccgcggcctcaagtcaaaggttagcgacgatttgcgaaagcgatccgccgttcagcttcgcgagctcgtagttatttgccatcgagaccttagccccgaattgttccagtccttctacaacgcagtcaacaacaggattacacagctcatcacacatggaagcgactcttccgagcgactcggcggtatctacgctctcgatgcgctcatcgacttcgaaggcgtcgatgtcgccgttaaatacacgcgtttcacccagaatctaaagacgatcctccgtggaaaagacattaaccctatgcaaccagccgcaatcgcgcttggaaagttatgtcgacccggcggatcgatgatatcggaggtggtggattcagaggtcaacacagcactcgaatggctacagaacgaccgcgtggaagagcgacgatatagtgccgtcctcgtcctgcgtgaattggcccgcagcgccccaacgctcatgtatcaatacatcccgacaatttttgactggatctggattggtcttcgagactccagacagctcatccgggcgacatctgcggaaacagttagcgcctgcttccgaatccttcgcgaacgagaccaagagatgaagcagcggtggatgagcaatatttacaacgaagcgaagcagggtctcaaggtcaacaccgttgaatccatccacggttcattactcgtcttgaaagagcttctcgagcagggcgccatgtacatgcaggagcattaccaacaagcgtgtgagattgtctttaagcacaaggaccacagagacccgaccattcgaaagacagtggtcctcttgatccccgaccttgctagttattctccggccgatttcgcgcacacatggctacacaagtttatggtgtacctgtcgggcatgctcaagaaggacaaggagagaaacgatgctttcctggcaatcggtaacattgccaattcggtcaagagcgccattgctccttatcttgacggtgttttgatctacgtacgcgaaggtctcagcgtgcagtcccgtaagaggggatcagtcgatccggtattcgactgtatcagtcgtctcgccgtggctgtaggccagacgctcagcaagtatatggaggcactgttggatcccatctttgcatgcgaccttacccctaaactgacacaggcccttgttgatatggctttctacatccctccagtcaaacccacaatccaagaacgattactcgatatgctcagtgtggtgctctgcggcgaacccttcaagccgctcggtgcgcctcaccccaacactcttacctccgttccaattattcccaaggacgccaaggatcctctcgcttatgagcatcgaagggccgaggtcaagctggcgctcaacactcttggcagcttcgatttctccggacatgttttgaacgagttcgtccgggatgtcgcaatcaagtacgtcgaagatgaagacccagaaattcgggaggcggctgctttgacatgctgtcaactctacgtccgcgatcctattgtcaaccagaccagttatcatgcactccaggtagtcggggatgttatagaaaaacttctcactgtcggagtctcagatcctgaaccaaacataagaagaacggtcctggcagctctcgacgaacgattcgatcgacacttggccaaggccgagaacatccgcattcttttcttcgcgctcaacgatgaggtcttttccattagggaagtcgccatctctatcattggccgtttggctagatacaatccagcctatgttattccttcgctacgaaagacgctcatccaactactcactgagctggaattctccgacgtggcccgcaacaaagaggagagcgctaagctattgagtctcttggtccagaatgcgcagtctctcatcaagccatacgtcgagcccatgatctcggttctcttacccaaagcgaaagaccccaacccgtcggtggctgccaccatcctcaaggctatcggtgagctcgcgactgttggtggcgaggacatgatgccatacaaagaccgattgatgcctctcattcttgatgcgctacaagaccaaagctccaatgcgaagagagaggccgccttgcacgcacttggacagcttgcaagcaactccggatacgtcattttaccatatatcgagtaccctcaacttctagaaatcttgcagagcatcatcagaaccgaagggcaacgagtgccattgcgacaagaaaccatcaaacttatgggtattctcggtgcgctggatccttacaaacaccaggccgaagaacgaactcctgattcacgaaatggcgaggccactcaattgaccgacatctctctcatgatgaccggcctgacaccatcgaacaaggagtacttccctaccgtcgtcattaatgccctcctccaaatcttgaaggattcatccctcgtccagcaccacgccgctgtgattgaagcaattatgaacatcttccgcactctgggcttggagtgtgtgtctttcctcgaccgaattatcccggcattccttcaagtcattcgatcggccacctccacaaggctcgaatcgtacttcaaccaactcgctactcttgtcagcattgtcagacaacacatccgaaactacctgccatcaattgtcgagatccttcaagaatactggcacacctctccatcgctgcagactactattctgtcgctcgttgaggctatctccaggtcgcttgagggtgaattcaagatttacctcgctggtctcttgccgttgatgcttggagtcttggacaaggataactctgctaagcgcacgccatctgagagggttatgcacgctttcttagtgtttggtgccagcgcggaggagtacatgcatctcatcatcccagttatagtccgcacattcgagaaacagggtcagcctacatttattagaaagcaggccatcgacaccattggcaaaatctctcgacaagtcaaccttaatgactacgccgcaaagatcatccaccctctcacacgtgtgttggacatgggtgagcctgtgctacgaaccgcggctctggataccctctgtgctctcattcagcaattaggtaaggactacctgcacttcatgggcaccgtcaacaagaccatcaaccagcaccaaatccagcactccaactacgagctgcttgtgagcaagctccagaagggagaagttttgccacaggacctcagctcgggggctggttttggcgatggagccgacgaggctacctttgccgaccaaggcacgaagaagctagagatgaatgccattcacctcaaggctgcctgggatacaaagggcaagtcgaccaaggaggattggcaagagtggctacgacgcttcagtactactctacttacagaatcaccgaaccacgcccttcgagcttgcgccagtcttgcgagcgtataccttcctcttgctcgcgagctgttcaattctgcgtttgtgtcttgttggagtgaactatatgagcagttccaagacgagctcatccagaatattgagagcgcaatcaagtccgagaacgttccaccggatctgttgggtcttttgctcaacctcgctgagttcatggagcatgacgacaaggctttgccgatcgacatcagagtcctgggtagggaggctgctcgttgtcacgcgtacgcaaaggctttgcactacaaggaactcgagttcctgcaggatcagagcagtggtgctgtcgaggctttgatcgttatcaacaatcagctccaacagtctgatgctgccattggtattcttcgcaaagctcaactgtataaggaaggcattcagcttcgagagacctggttcgagaagttggagcgttgggaagaagcgcttgcgttttacaacaagcgtgaggaggaagtgcccgaggatcaagcaattcccgtcgacattgttatgggaaagatgcgttgtttgcatgccttgggagagtgggaggcactggcttcgctgactggcagcacctgggccaactctacaccagaagtccaaaggatgattgcacctttggcaacagctgccgcttggggtctcaacaagtgggattccatggacaactacctttcatcgctcaagaggtactcacctgatcgttcattctttggtgccattctggctctccaccgaaaccagttccgcgaggccatagcgtgtgtcacgcaagctcgtgaaggtctggataccgagttgagtgccctggttagtgagtcgtacaaccgagcataccaagtcgtcgttcgcgtccaaatgcttgccgaattggaagaactcatcgtgtataagcaatgcgatgagaagaagcaggccattatgagacgaacctgggaaacacgacttaagggttgtcaaaggaacgtcgaggtttggcagcgcatgctcaggctacgtgctatagtgattgcaccaactgagaacatgcacatgtggatcaagttcgccaacctttgccgcaagtctggtcgaatgggtctcgccgaaaagtcactcaaacaacttatcggaacagacgctcctttggagtctatgattccctactggaacgatcagcgacaacccggacctggtcctagaagcgcgccggcagcacaggtcatctacgctgtgctcaagtaccaatgggagactggacaacaagctgccaagaagacaaacatccccgaaaagacactgtactgcttgcgcaagtttactaatgatgctgcgcagagattggatatcaccagggcccatctcaatgctcaagtgggcagtgaagtcaacatcacgggcgactacggcttccagaaccctatggatcctacgattatgagccctcagacccagcgggcgttgtatgaacaaacggtcctgttggccaagtgctacttgagacagggagaatggctgattgcactcaacaaggacgactggcaatacactcaggtccaagacatcctcacctcttactctcaggcgaccaagtacaaccctcgttggtacaaggcttggcacgcttgggcactggcaaactttgagatcgtgcagactcttacagcccagaacgaaggaaccttatcgagggcggatcaatccatggtgattgaacacgtggtaccagctgtcaagggcttcttcaagtcgatcgcgctgtctgaaggaagctcgctgcaggacactcttcgtctgctcactctctggttcactcatggaggcagcgcggatgtcacttcagctgtcacagaaggctttgctaatgtcagcgtcgacacgtggctggaggtcattccccagttgattgcacgaatcaaccagcctaacaagcgcgttcagcaatcggtgcataacttgcttgccgatgttggacgagctcatcctcaagctttggtgtatcctctcaccgtcgccatgaagtcctggcagaacaccaggcgatctcgttccgcagctcaaattatggatagcatgcgacaacatagcgcaaacttggtcgctcaggcagacattgtcagccacgaactcattcgcgtggccgtcttgtggcacgagctttggcatgagggactcgaagaagcctcgcgcttgtactttggcgatcacaacattgaaggcatgtttgccactctggagcctctacacgagcttcttgagcgtggacccgagactcttcgtgagatttcgttcgcgcaagcatttggtcgcgaccttaaggaggctcaagactggtgcagacaatacgagacaagccaagacgtcaacgacctgaaccaggcatgggatttgtactaccaggtattccgcagaataagcaggcagttacctcaggttacaactctcgagttgacgtactgttcacccaaattgctcaacgcaaagaacctcgacctcgctgtgccgggaacatacaagagcgggcagcctattgtccgtatcatgtctttcgacacgacgtttagcgttatcaactctaagcagcgcccgcgaaagcttaatgtcaatggcagcgacggaaagtcgtacgccttccttctcaagggtcacgaagatattcgtcaggatgaaagagtcatgcagctgtttggtctctgcaataccctcctatcgcacgactcggaatgcttcaagcgtcacctcaacatccagcgctacccagctattcctctgtcgcaaaacagtggtctgctcggatgggttcccaacagtgacaccctccacgtccttatcagggagtaccgagagagtcgcaagattttgctgaatatcgaacatcgaatcatgctccagatggctcccgattacgacaacctgaccctgatgcaaaaggtcgaggtctttggttacgccttggacaacaccaccggccaagatctctaccgtgtattatggctcaagtcaaagtcgtccgaggcttggctcgagaggcgaacaaactacactcgctcgctcggtgtcatgtccatggtcggctacattctcggattgggtgatcgtcacccgtccaacttgatgcttgaccgtgtcaccggaaagattatccacatcgatttcggtgattgttttgaggttgcgatgaagcgtgaaaagtaccccgagcgggttcctttccgtctgacccgaatgttgacctatgccatggaggtcagcaacattgagggtagtttcagaatcacatgtgagaacgtaatgagggtattgagagacaacaaggaaagcgtcatggctgttctcgaagcgttcatccatgaccctctcctcacatggcgtctaacaaacgccccctccccagcaggccccaacttccgcaacgacagagacaccgccatgcccgtgcccggcggcgtccgcgcccgtcgccaatccatcctcgacagcgacgtcgccccctccgaactcctcaacgctcccgaaccatccatccaaacacgcgcgcgcgcccgcacaaacagctccgccggcgtccccgagaccaacggcggcgctccagaagtcgaaagccaaaacgcgcgagccgtcgaggttctcgatcgcgtgcagcagaagctcacaggtcgtgattttaagaataacgaggagctggatgttattaaccaggttaataagttgatcatggaggcgacgaagctggagaatctgtgtcagcattatatcggatggtgtagtttctggtag

SEQ ID NO: 2525 - protein, 2423 aa, Gibberella zeae PH-1
MAQAQQIALERLEQVSRGLKSKVSDDLRKRSAVQLRELVVICHRDLSPELFQSFYNAVNNRITQLITHGSDSSERLGGIYALDALIDFEGVDVAVKYTRFTQNLKTILRGKDINPMQPAAIALGKLCRPGGSMISEVVDSEVNTALEWLQNDRVEERRYSAVLVLRELARSAPTLMYQYIPTIFDWIWIGLRDSRQLIRATSAETVSACFRILRERDQEMKQRWMSNIYNEAKQGLKVNTVESIHGSLLVLKELLEQGAMYMQEHYQQACEIVFKHKDHRDPTIRKTVVLLIPDLASYSPADFAHTWLHKFMVYLSGMLKKDKERNDAFLAIGNIANSVKSAIAPYLDGVLIYVREGLSVQSRKRGSVDPVFDCISRLAVAVGQTLSKYMEALLDPIFACDLTPKLTQALVDMAFYIPPVKPTIQERLLDMLSVVLCGEPFKPLGAPHPNTLTSVPIIPKDAKDPLAYEHRRAEVKLALNTLGSFDFSGHVLNEFVRDVAIKYVEDEDPEIREAAALTCCQLYVRDPIVNQTSYHALQVVGDVIEKLLTVGVSDPEPNIRRTVLAALDERFDRHLAKAENIRILFFALNDEVFSIREVAISIIGRLARYNPAYVIPSLRKTLIQLLTELEFSDVARNKEESAKLLSLLVQNAQSLIKPYVEPMISVLLPKAKDPNPSVAATILKAIGELATVGGEDMMPYKDRLMPLILDALQDQSSNAKREAALHALGQLASNSGYVILPYIEYPQLLEILQSIIRTEGQRVPLRQETIKLMGILGALDPYKHQAEERTPDSRNGEATQLTDISLMMTGLTPSNKEYFPTVVINALLQILKDSSLVQHHAAVIEAIMNIFRTLGLECVSFLDRIIPAFLQVIRSATSTRLESYFNQLATLVSIVRQHIRNYLPSIVEILQEYWHTSPSLQTTILSLVEAISRSLEGEFKIYLAGLLPLMLGVLDKDNSAKRTPSERVMHAFLVFGASAEEYMHLIIPVIVRTFEKQGQPTFIRKQAIDTIGKISRQVNLNDYAAKIIHPLTRVLDMGEPVLRTAALDTLCALIQQLGKDYLHFMGTVNKTINQHQIQHSNYELLVSKLQKGEVLPQDLSSGAGFGDGADEATFADQGTKKLEMNAIHLKAAWDTKGKSTKEDWQEWLRRFSTTLLTESPNHALRACASLASVYLPLARELFNSAFVSCWSELYEQFQDELIQNIESAIKSENVPPDLLGLLLNLAEFMEHDDKALPIDIRVLGREAARCHAYAKALHYKELEFLQDQSSGAVEALIVINNQLQQSDAAIGILRKAQLYKEGIQLRETWFEKLERWEEALAFYNKREEEVPEDQAIPVDIVMGKMRCLHALGEWEALASLTGSTWANSTPEVQRMIAPLATAAAWGLNKWDSMDNYLSSLKRYSPDRSFFGAILALHRNQFREAIACVTQAREGLDTELSALVSESYNRAYQVVVRVQMLAELEELIVYKQCDEKKQAIMRRTWETRLKGCQRNVEVWQRMLRLRAIVIAPTENMHMWIKFANLCRKSGRMGLAEKSLKQLIGTDAPLESMIPYWNDQRQPGPGPRSAPAAQVIYAVLKYQWETGQQAAKKTNIPEKTLYCLRKFTNDAAQRLDITRAHLNAQVGSEVNITGDYGFQNPMDPTIMSPQTQRALYEQTVLLAKCYLRQGEWLIALNKDDWQYTQVQDILTSYSQATKYNPRWYKAWHAWALANFEIVQTLTAQNEGTLSRADQSMVIEHVVPAVKGFFKSIALSEGSSLQDTLRLLTLWFTHGGSADVTSAVTEGFANVSVDTWLEVIPQLIARINQPNKRVQQSVHNLLADVGRAHPQALVYPLTVAMKSWQNTRRSRSAAQIMDSMRQHSANLVAQADIVSHELIRVAVLWHELWHEGLEEASRLYFGDHNIEGMFATLEPLHELLERGPETLREISFAQAFGRDLKEAQDWCRQYETSQDVNDLNQAWDLYYQVFRRISRQLPQVTTLELTYCSPKLLNAKNLDLAVPGTYKSGQPIVRIMSFDTTFSVINSKQRPRKLNVNGSDGKSYAFLLKGHEDIRQDERVMQLFGLCNTLLSHDSECFKRHLNIQRYPAIPLSQNSGLLGWVPNSDTLHVLIREYRESRKILLNIEHRIMLQMAPDYDNLTLMQKVEVFGYALDNTTGQDLYRVLWLKSKSSEAWLERRTNYTRSLGVMSMVGYILGLGDRHPSNLMLDRVTGKIIHIDFGDCFEVAMKREKYPERVPFRLTRMLTYAMEVSNIEGSFRITCENVMRVLRDNKESVMAVLEAFIHDPLLTWRLTNAPSPAGPNFRNDRDTAMPVPGGVRARRQSILDSDVAPSELLNAPEPSIQTRARARTNSSAGVPETNGGAPEVESQNARAVEVLDRVQQKLTGRDFKNNEELDVINQVNKLIMEATKLENLCQHYIGWCSFW

SEQ ID NO: 2526 - DNA, 7371 bp, Candida glabrata CBS 138
  CDS (1)..(7371)
atgtcaagtttgaaactagaagatagggatagcagtgaaagtgccgcgttactccgatctgctgtaattggtaccccgaatgagcagagcatgtcaccggttcctatactcgactatgactctggttctgctagtaattttacaaagggggaatcaactatgttggaaagtgatgtgcttcccgatttggaatcattgcccatgctcatggactacattttagaattattgaaaagtccgaacgttagactaagactatcggctacaaataagctaaagaccgtcttaatatcattggctcatgagatatcaatagagcagtttcagagcttcaatcataagttggacaataagatttaccagatggttcacagtaaggatgtgagaagtcaaattgcaggtgtgctatccgttgactgtttaatatggtattattcacaaaccgaagaacttccaaattatactactaaacttgctggatatttaaaggtacttataccttccaaaaacttggatttaatgaagcaagcaattgagatactaggcaagttagctattccaacgagctcaataacttctgaatttttacagcacgaggttaaaaactgtatagagtggctaacaacatcacctgaaagcaaattctcaacccaaacccaagaactaaggaagcacgcgtcattacaaataattactgtattgagtaaaaactctcctactgtgttatacccatacatcaattctattcttgacaatatatggcgagcactacgagatccagataatttgatgcgttttgatgccgctaaagtagttggctgttgtttgagaatcatttcgaagagagatgaaagtgcatgtaaggaatggataatacaccttatgcaaggttgtgcgtttggactgactttaaaaacaacagatgctattcatgcaactttgttggtttatcatgagcttctcgaactggatagcgaatgcttaaatgacttttttgatgatatctactacgttactatgtcatttaaggatcataggtcaccattaattcgggaagaaatatgtagtattgtatcactgttggcatcacttaatccggtaatgttttctaatctttatttggacaaggtcatgaaccatttcctagatttacttcaaaatattacaacttacaacatttctaacaaagaaagatcgcatatctttatctctattggtgatattgctgataatgttggtgaaatgatgtttgaatttttagaacctacattaattacattgaaggaaagcctgagaacaaggtacaggacaagaaaagattacgaggagggtgtattctattgtattggaaaactatcttctgctatcagagaagatctacaaaaatatttggagggcggtctattaaaattaattctagaatgtcctttatcagatcatatgcaaaaaacactttctattttgagtgctaacacacctgactatgcaaagcatattgataaggaattgctagatctgttatgtatccatctttctggtgatcattttatagaacctggcacgcccataaaaggtaaaccgttttcaccaaatgcggcaagagtatggagaaatcaaaacgtttatcatcaaatcggaatagcaaatgatgacctaaatgacgctcaaattctgatacagactttgaagatattccgcgaaactaaatttaaggtagtattaactgagtttgttaagaatgtgataatatactatatcgaacatgaaaaccaacttgtgcgaaaactagctgctttaacaagttgtgaaatttttattaatgatagcatatgtaaagaaacttctctcaattctttgaatactgtatctgaagtactagagaaattgttaacagttgcggtgactgacttgaatcctgaaattagactagaaatattaaaacatctctcatccccatttgactcacatttggcaaaaccagagaatcttcagctgctgttcacagctctaaatgacgaactgattgctatccaaattgaggctatgaaaataattggtagactagtcacggttaatcctgcatatgttattccttccttaagaaactacttattgtctcttattactgaattgaagtatccaaatttttcaactagaaaagatgaggcagccacattgctatgtactttaatccaatcaagcaaaaatgttacgaaaccttatattgagcccattttaaacgttttattaccaaagttagatgacaactcctcaaccgtagcatccattgcacttaaagcaattggtgcactagcggtggttgggggtgaagatatgaagcagaataactcgacactatttccgttgatgataaaaacactccaggatcaatcaaactccttcaaaagagatgcagcattgaaatcattgggacaattggcagcctcttcaggatatgttatacgtccatttttagactatcctgatctgttaagtgtgttaattggtatcttaagggcagaaagtgcacaaaatattagaagggaaactgttagattaatcggtattttaggtgcgcttgacccacacaaacaaagagatgttgaagttaacctaaaaacaaagcttgcagtagaacagaatcaacctccaattgatgtggcattattaatgcaaggtaattctccatctaatgatgactattatcccacagtcgtgattgtttccctcatgaaaattctgaaggatccgtcattatcatcctatcatacatctgcagtgcaggccataatgcagatattccaaattatgggattgaaatgtatttcattccttgacaagattatacctgggataatttcagtcatgcatatgtgtcccagtaatcttttggatttttatttccaacagctatgtcaattgacagttataatgaaacaacatatacggccttatgttgacgaaatatatgatgcaattattgagttttttcgatttgagaacttacaggtcacaatattatctgttataaattctctatgttatgcactaaaaggtgagtttaaaagatttatccctttaactttaaatttattgttaggagttctagaaaaagatcgttcagctggaagagaaaactcaattagagttcttcagtcttttgtgatatttgacacaaatctagagttgtatgctcatactatattaccatcaatattaaaacttactgaattttctaccggccatcttagaaaggctgccatcataacggttggtaaactttcaaaatgtattaatttatcagagatggcgtcacgaatagttcactcattggcaagggtattgtatgttaatgatgacgaacttagggaagtgactctgaatacactatctttgttgttactacgtttgaaaagaaactatatcatatttgtcccagtagtcaatagaattttagttgattgctctataaagcacgccatatatgatgatttggttacaaaattacttaatggagaggctcttccgaatactatcatattggaagatgatactgagcagaaacaattatccttgtctaatatagctgaaactactgataaaaaacttccgataaaccaaaatggtttgaaatctgtttgggactgttctcagcttagaaccaaagaagactggcaagattggataaggcgtttatctatccagttcttaaaggagtcaccatctccagcgctacgcacatgtgctaatttggcaagcatttatcaccctctagcaagggaactattcaatgcctctttctccagcctttggtctgaattatacactcaataccaagaaagtttgatcggatctctatgtagtgcattatcatcaccacaaaaccccccagaaatacatcaagttttattgaacttaatagaattcatggaacatgatgataaaccgttgccaatcccaataaacactttaggacaatatgctgaaagatgtcacgcgtatgctaaagcactacattataaagaagtaaaatttataaaggagccggtaagctctacgattgagtccttgattagtattaacaatcaattacatcaaactgatgcagctataggtattctaaaacatgcacagcaacatcattcttatcagttgaaggaaacatggtatgaaaagctccaaagatgggatgatgcactagactcttataccaaaagggcggaagcaggagataactcaattgaagttactgtaggtagaatgaggtcattacatgctttgggtgaatatgaaaccttgtctcaactggcagaaaacaaatggaagacatctaatttgcaagtacgaaagaaaattgcacctctagctgctggggcggcttggggtttaggtgaatgggatgagattgaaaagtatattagcgtaatgaaagaaaattcgcctgataaggaattctttgatgcagttctgtgtttacacagaaacagatttgatgaggctgagaaacatatatttgctgctcgcgacttattggttacagaaatatcagcactaattaatgaaagttatactagagcttatggtgttgttgttcgtacgcaaatcatagctgaactcgaagaaataattgactataagaaggcatctcataactcggcaaaaagaacacattaccgcaatttatgggatcaacgtctactgggttgtcagaaaaatgttgacatttggcaaagaattctacgagtgcgctctttggtcgttaagccaaaacaggatatgcatatttggataaagtttgctaatttatgtcgtaagtctggcagaatgagtttggctcaaaaagctctttactcattactagaggatggtagtgatccaaatcaaccaaatactgcgaaggcaccaccaccagtagtttacgctcaattaaaatatctgtgggcgacatcttcccatgaagaggtcttgcatcatttaatcggattcacttcaagaatggctcatgatttgggtttggaccctagtaatatgatagcgcagagcgtaccgcaaaatgcgacggttgctccgcagcacattgagacatacacaaaattgctagcaaggtgctttttgaaacagggagaatggagagttgcaatacaacccaattggagagtgcaaaatcctgatgcgattttgggttcttacttattagcaacacactttgataagaattggtataaggcatggcacaactgggctttagccaattttgaggttattagtatgctaacgtcaaaaaataaaaatgaggacacgaacggcgctcaagttaatggggattggaggatcgaaaatagtataatgggaacagattattttagtaacgatgaaagtaagttctcccctgaaattatacagcgtcacgttgttcctgctatcaaaggtttctttcattcaatatccctccttaaggcaagttcacttcaagataatttacgtcttctgacattatggttcaccttcggtggagtagaagaagctaataaagcgatgcatgatggatttggtatgattaaaattgacaattggttagaagtcctaccacaattgatatctagaatacatcaacctaatcctgttgtgagtaaagcgttgctttcacttctttctgatttggggaaagcgcatccacaagcactaatttatcctttaactgttgcaattaaatccgagtctgtttcgaggcagaaagctgctttgtccataattgagaagatgaggatacatagtcctatcttagttgaccaagcggagttagtaagtcatgaactgatcaggttggctgttctatggcacgaattatggtatgaaggactggaggatgcaagtagacaatttttcggagagcataataccgaaaaaatgtttgcaacgttagaacctcttcatgagttactgaactgcgaacccgagactttacgagaggccacatttaagaaatccttcggcagagatctaaatgatgcttatgagtgggttctcaactacaagcgcacaaaagatgtaagcaacttaaatcaagcttgggatatatattataacgtctttagaaggattagcaggcaattgccacaattgcaatcattggaacttcaatacgtttctccaaaactattagcagcacatgatttggaattagctgtccctggaacatactcagccactaagaatgtgatcaagatatcttattttgaaccgacattaacagtcatatcgtcaaaacagagacctagaaagatatggattcatggtagtgacggtgttgaataccagtatgtcttaaaaggtcacgaggatattcgacaagacaacttagtaatgcagttatttggattggtaaataccctcctaagaaatgattctgaatgtttccaaagacatttggacatacagcaatatccagctattccattatctcctaaatctggtttattgggctgggttcctaacagtgacacttttcatgtacttattagcgaacaccgtgatgcaaagaaaattcctctcaacattgagcattgggttatgttgcagatggcaccagactttgacaatcttactctgcttcaaaagattgaagtatttacttatgctttagatagtacaaaaggtcaagacctgtataaaattttgtggctgaaaagtagatcatcagaggcatggctggatagaagaacaacatacacaagatcactagctgttatgtctatggttggttatattcttggtctaggtgatcgtcacccaagtaatttaatgttagacagaacaacaggtaaggtaattcatatcgacttcggtgattgttttgaagctgctatacttagggagaaattcccagagaaagtaccattcagattgactagaatgcttacattcgcaatggaggttagcggcatagaaggaagcttcagaataacttgtgagcacgtaatgagagttttgagggcaaacaaagaatctttaatggccatgttagaagcatttgcatttgatccattaatccattggggctttgatttaccaccgcagaaaataacagaaatgactggcattcagttgcaattaagtaacaccaacgaattgctacgtagaggagcaattactttagagcaagctaataaaatggaaaaagagcagcaagcggagatcaagaatgctagagcattgttggttcttcggagaatcatcaacaagttaactggtaacgattttaaaaggtgtaaggacctcggaattaatgaacaagttgataagttaatccagcaagctacttctgtggaaaatttatgtcaacattatatcggttggtgtccattttggtaa

SEQ ID NO: 2527 - protein, 2456 aa, Candida glabrata CBS 138
MSSLKLEDRDSSESAALLRSAVIGTPNEQSMSPVPILDYDSGSASNFTKGESTMLESDVLPDLESLPMLMDYILELLKSPNVRLRLSATNKLKTVLISLAHEISIEQFQSFNHKLDNKIYQMVHSKDVRSQIAGVLSVDCLIWYYSQTEELPNYTTKLAGYLKVLIPSKNLDLMKQAIEILGKLAIPTSSITSEFLQHEVKNCIEWLTTSPESKFSTQTQELRKHASLQIITVLSKNSPTVLYPYINSILDNIWRALRDPDNLMRFDAAKVVGCCLRIISKRDESACKEWIIHLMQGCAFGLTLKTTDAIHATLLVYHELLELDSECLNDFFDDIYYVTMSFKDHRSPLIREEICSIVSLLASLNPVMFSNLYLDKVMNHFLDLLQNITTYNISNKERSHIFISIGDIADNVGEMMFEFLEPTLITLKESLRTRYRTRKDYEEGVFYCIGKLSSAIREDLQKYLEGGLLKLILECPLSDHMQKTLSILSANTPDYAKHIDKELLDLLCIHLSGDHFIEPGTPIKGKPFSPNAARVWRNQNVYHQIGIANDDLNDAQILIQTLKIFRETKFKVVLTEFVKNVIIYYIEHENQLVRKLAALTSCEIFINDSICKETSLNSLNTVSEVLEKLLTVAVTDLNPEIRLEILKHLSSPFDSHLAKPENLQLLFTALNDELIAIQIEAMKIIGRLVTVNPAYVIPSLRNYLLSLITELKYPNFSTRKDEAATLLCTLIQSSKNVTKPYIEPILNVLLPKLDDNSSTVASIALKAIGALAVVGGEDMKQNNSTLFPLMIKTLQDQSNSFKRDAALKSLGQLAASSGYVIRPFLDYPDLLSVLIGILRAESAQNIRRETVRLIGILGALDPHKQRDVEVNLKTKLAVEQNQPPIDVALLMQGNSPSNDDYYPTVVIVSLMKILKDPSLSSYHTSAVQAIMQIFQIMGLKCISFLDKIIPGIISVMHMCPSNLLDFYFQQLCQLTVIMKQHIRPYVDEIYDAIIEFFRFENLQVTILSVINSLCYALKGEFKRFIPLTLNLLLGVLEKDRSAGRENSIRVLQSFVIFDTNLELYAHTILPSILKLTEFSTGHLRKAAIITVGKLSKCINLSEMASRIVHSLARVLYVNDDELREVTLNTLSLLLLRLKRNYIIFVPVVNRILVDCSIKHAIYDDLVTKLLNGEALPNTIILEDDTEQKQLSLSNIAETTDKKLPINQNGLKSVWDCSQLRTKEDWQDWIRRLSIQFLKESPSPALRTCANLASIYHPLARELFNASFSSLWSELYTQYQESLIGSLCSALSSPQNPPEIHQVLLNLIEFMEHDDKPLPIPINTLGQYAERCHAYAKALHYKEVKFIKEPVSSTIESLISINNQLHQTDAAIGILKHAQQHHSYQLKETWYEKLQRWDDALDSYTKRAEAGDNSIEVTVGRMRSLHALGEYETLSQLAENKWKTSNLQVRKKIAPLAAGAAWGLGEWDEIEKYISVMKENSPDKEFFDAVLCLHRNRFDEAEKHIFAARDLLVTEISALINESYTRAYGVVVRTQIIAELEEIIDYKKASHNSAKRTHYRNLWDQRLLGCQKNVDIWQRILRVRSLVVKPKQDMHIWIKFANLCRKSGRMSLAQKALYSLLEDGSDPNQPNTAKAPPPVVYAQLKYLWATSSHEEVLHHLIGFTSRMAHDLGLDPSNMIAQSVPQNATVAPQHIETYTKLLARCFLKQGEWRVAIQPNWRVQNPDAILGSYLLATHFDKNWYKAWHNWALANFEVISMLTSKNKNEDTNGAQVNGDWRIENSIMGTDYFSNDESKFSPEIIQRHVVPAIKGFFHSISLLKASSLQDNLRLLTLWFTFGGVEEANKAMHDGFGMIKIDNWLEVLPQLISRIHQPNPVVSKALLSLLSDLGKAHPQALIYPLTVAIKSESVSRQKAALSIIEKMRIHSPILVDQAELVSHELIRLAVLWHELWYEGLEDASRQFFGEHNTEKMFATLEPLHELLNCEPETLREATFKKSFGRDLNDAYEWVLNYKRTKDVSNLNQAWDIYYNVFRRISRQLPQLQSLELQYVSPKLLAAHDLELAVPGTYSATKNVIKISYFEPTLTVISSKQRPRKIWIHGSDGVEYQYVLKGHEDIRQDNLVMQLFGLVNTLLRNDSECFQRHLDIQQYPAIPLSPKSGLLGWVPNSDTFHVLISEHRDAKKIPLNIEHWVMLQMAPDFDNLTLLQKIEVFTYALDSTKGQDLYKILWLKSRSSEAWLDRRTTYTRSLAVMSMVGYILGLGDRHPSNLMLDRTTGKVIHIDFGDCFEAAILREKFPEKVPFRLTRMLTFAMEVSGIEGSFRITCEHVMRVLRANKESLMAMLEAFAFDPLIHWGFDLPPQKITEMTGIQLQLSNTNELLRRGAITLEQANKMEKEQQAEIKNARALLVLRRIINKLTGNDFKRCKDLGINEQVDKLIQQATSVENLCQHYIGWCPFW

SEQ ID NO: 2528 - DNA, 7416 bp, Candida glabrata CBS 138
  CDS (1)..(7416)
atgcaggccattttaagaaaaggagcagataagcgaataaaaacgggcaataaaagcaataaattgactgtacgaaagcatcgtaaatcagaggaagaactatcaaatgtttcggctccaggtggagacccaactgacaactcaacggcaagaagagctgcatcctcggctaatggggaagaaaatgcaaagtttattgatctcgaaaatggttgggatgattcggacatttcaccttcaaatttatatgatctatttgaaagactgaaaagtgatgaccagatggtgagaacaaatactgctatggaacttagaacatccatcatatcgattgccagagaaatacctactgatcaattccagagattcatcaacacactaaacaataaaatatttgaactgattcatggttccagttctaatgaaaagatgggaggaatcttagctgtcgattctcttatagacttttatttagaaatcggtgaactatcaaaccagacaacacgtctagcgaattaccttagagtactaatcccttctaatgatatagacgttatgcgtttggccacacaaactcttggaaagctggcacttcctcgagggacagtaacttctgaatttgttgactttgaagtcaaaacctgtttggaatggctaacagcatcgacagataacccaccattaaactttaaacaggaatataggagacatgcagcaatacttatactttactctcttatagaaaactctccatatttgctatttccttacatcaacccgatattggataatatatggggttcattaaaagatacaaagctaattataagaagagatgccgctgaaactatgagaaaatgcatggaaactttacaatccagagatccacaaaatgcaagagaatggtatcaaagatcgttttctacagcgactcaaggactgaattcaaataacatcgaaagcatacatgctacattattaacattcaaggaactacttaatctgaaggattcatacatcaaagataagtattctcagatatttcaggttgtgataaagtttagagatcataaaaatgacattgtgagacgagaagtctacgcaatactaccactacttgcaatgaatgattccgatatatttgccagtaaatatttggatcccacgatgtctttttatctcaaagtactgaaagatatggacagcagtacagccaacaatgcagataaagaagcgatatttatctctattggagatttatcagaaaatgtgagatcaaaaatgcactcctacattcaccaactggagataaatttgagagaaggactacaaacaaagtataaaattagaaaacactacgaaaaggcattattctattgcattatcaaattaactgccgctcttggtccagcaatcgctacaaatatcaataaaggatttttagatctaatattgtcatgccctttatcgtctcatcttttggaggttatggctaccataaaaaaatctattccagcactatcaacaagcattgataaaaggctaatagaaattgttcacgcatatttatctggggaaagatacaacgatggaaccaattctcaaataatgaaaacggtatcattaccgttggccaggaaatggagagatagggattactgttggaaaaccggtgaccaaaattccgataataacgacgacttcttacttgttcaaactctgaaaatggttgacataattgacccgaaacacttggtttcagaacacacaaaaatgtctataattgcttacattgaacatactcatgaaacagtaaggaaacttgctgcattgaagtctgtcgaactatacaagcttacagaggccaacctaccagatgatgaacatgcccttgatacatctgctacagttctaggcaaacttcttgttctggcaataactgatccaaactcaaatatacggttaagtatactacaatcttttgactatcattttagctctcaattagcacagccagataaccttagactactattttgctcagtgaacgatgaggtatatacaatcagactggaagctataagagtaataggtgctcttacagaattcaaccccatatatgttgtgccagaaatgcaaaaaatatttcttagctttttgacagaattgaaatattctgctacaaatagaaaaaaagaaaatatgctaactttgatccatgctgttataaattctcatcctgatactttagtaccgtttataaaagattgtcttgatagtctaatacaaagattagaagataattcatctgctgtagctacaatagccatgaaaactatcggtgcattggcggaagcagtgggacctgatataaccaattatgttcatcaactaatgccaataatcatatcgacattacacaatcaactaaattcaataaaaagagcgacagctataaaaacattgattcagatatcaagctcgactgcttatgtgatagacccactaattgagtaccctgaactccttggactattaatgaatattctaaaaaccgaatcaaatatggaaataaaacgtgatatcatccaattgatcggtacacttggtgctatcgatccatacaaataccgagcagttgagactaactctaaaggcgttcagaaaattgacacaacccagcattctacagccattgatttactgataaaaggaatgtcaccatctaatgaagagttttatccttctgtagtgatgcatagtcttgtgaaaatattgaatgacaattcattatcttcgtatcatactaatacccttcagacgatcatgcgtatctttcaggatatgggagtccaatcaatcatatttctgaaaatattggtcccagcaataaaatcagtggtgaaaacatgtccaccatctcatttggagttttatttccagcagttatcagttctagttaatactgttaatcaccatattgaacctttcaccgaagatatatttgaaatcattgctgatcatttctcaatcactaagttacaagtcgtcattatctctcttatcgagtcgatgtcacatttagtgaaaaataacctaaagagattccttcctaagacagtaaatttatttttgaacgtgttagaaaatgatcgctcaaatcaaaaaatggcttccgtttccattatgaaagcattaatagcgttcggaaaaaatttagaggattattcacatttaattattcctaccatcgtccgaatatgcgagtattcacaaaatcatttgagaaaaatctccattgttacatttggaaaattggcaaaatgtatcaatcttacagaactatcttcaatgattatcaatgcccttgtaagagtgttgacaaatggcgataagtctctaataaaggtcactatgaatactctctgcctgttattactgcagctcgggaatgattttgtcgtgtatataccaaccattcattctgttttaatcaaaaatagaatccaacactctatttatgatcaattagttaacaaactattgaatggtgaagttttgaacactaatatcttacttgataaagattctgaggaaaagaacaagaatataaacttacaaaacaatcccagaactgaaaaatttgtcgtcgatcaacaaatattaaaatcggcatgggattgctctcagcagaaatccaaagaagattggcaggaatggtttcgaaggttatctgttcacactattcgggagtccgcttcaccatcactgagggcgtgttctaatcttgtcagtgtttataacccattggcacgagatctattcaatgtttcattttcaagttgctggaatgaacttaatataggctcacgggagcatatactgaactcattatgtagcgctttatcctcgccgcaaaatccaactgaaatatacctaatcttgattaatcttattgagtttatggaacatgacatgaatcctttgccgattccagcaacaattacaggagaatacgctcaaaaatgcaatgcttttgcaaaagcactgcactataaagaaactgaattcattgaaaacgaaaaaccatgtatcatagagtctttgattgacataaataaccagttacatcaaccagatgcttcaataggtatcctaaagtatgcccaacagcattataatctccaattgaaggagacgtggtatgagaaacttcaaagatgggatgatgccttacaggcatacactgatcgtgaaaaaaatggggaagacacaccagaagtccttatgggtaaaatgagatccctgtacgcgttaggaaattggagtgaaattgctgatcttgcaaatgacaaatggaacactgttcctctacatattcaggaaaaactttcacccatagctgcaggatcttcatgggcgctacataattgggatgatatcgaaaaatattgttccatattacaggataattctattgataaagaatttttctcaactgtcatgtgcttgcaccacaacaattttgaagaagctgaacaacatgccgataatgtaaacagtttacttgttggtgaaatgtctgccttgattaatgaaagctatagtagaatatataattctgttgcaaaatgccaaacagttgcagaattaaaggaaattataaaatacaaacgtcttccgcgtatgtcgcccaaacgtaaagcgatgagagaaacctggaacaaaaggctgctaggttgccaacaaaatatcgatgtttggcaagtaatcctaaagactagatctttggttgttaatcctgaagatgatgaggaaatttggataaaatttgccaatctctgtagaagaaacggaagaatgaatatgactagagatgtactaaattctcttctgaaattcaatgagatgtctgagaacccagatattttacaggctagtcccgaggtcgtttattcctatttgaagtacaaatgggatacaggagaaaaaaactctgccttgaatcagttggctatatttataggcaaagttatcagagacttgggcctacaccctgaacacattatctctaataagacgttccaatcaaagactaacatatctcccaatgaaagaccaaaatatcagaaattacttgccacatgttttgcgaaacagggtgattggactatcgcccttgatcctaactggagcaatacagatccggggtcagttttaagttcctatcttctggcaactcattttgatccgcaatggtacaaagcttggcataactgggctttagccaattttgaagtaatatccatgatgtcatccacaaacaaggataccaattaccaaaaaagtaatgctccaataacaagcttctaccaaataagaaataatattttcgaaaagaacggcgaaactccttattacaatcaatttccatcaagactcataaataatcatgtcgtttctgctataaaagggtttttccattcaatcgcactgtccgattcaagtctattgcaagatgcattacgtcttttaactctatggtttacttttggaagtacttctgaaacgacacaggcgatgcaggagggttttaatatggttaagatcagtacttggcttgaggttttaccccaattaatttcgcatatacatcagccaaaccctctcattagtcgtgcacttcttactttactctcagatttgggtaaagaacatccgcaagcgcttgtataccctttaacagttgcaataaaatcagaatctttatctcgacaaaaagcagctatttcaattatcgataatgttcgctctcatagcccagtacttgttgaccaagctgaactattaagtcgtgagttgattagagtagtggccttatggaacgagatgtggtatgagggtttagaagacgcgagtcgacatttctttggagagaatgacaacacgaaaatgcttgagacactcgaaccactatatgagctcttgaataaaggcccagagaccatacgcgaaatatccttcaagtacgcttttggaaaagatctcacctatgcatatgaatgggtaaaaaaatacaaagaaacaggtgaggtaagtaacctaaaccaagcatgggacatttattatagcattttcaagaagataaacaaacagctaccacaaatggaaacattagaattgcaacatgtttcacctaaacttttagctgcgaagaatcttgagttagctatgcctggaacttatatccctggtactgaaatagttacaatagagagtgtgaatggtacatgtgaagttatatcttctaaacaaagacctagaaaaatagccttaaaaggaagtgatggtaaagagtacttatatgttctgaaaggtcatgaagatatcagacaagatagccttgtaatgcaattatttggtttggttaatacactactacagaacgatatcgaatgtttccagaggcatttggatatccaacagtacgcggcaataccattatcccctaaaacaggtcttcttgggtgggtaactgagagtgataccattcacgtgctgattaaagattatagagatgcaaagaaaatgccactgaatattgaacatctagttatgcttcaaatggcaccggattatgacagtctcactctattacaaaaagttgaggtctttaagtacgttctagataatactcaagggtttgatctttataacatattgtggttaaaaagcaaatcatctgaaacgtggttagagagacgtactacatacacccgatctttagcggttatgtctatgactggatatattttaggactgggtgaccgtcatccaagcaacttaatgcttaataggaatacagggaaagtagtacatattgactttggtgattgtttcgaagctgcaattttgagagaaaaatttccagaaaaagtaccttttagattaactagaatgttaatcaaggccatggaggtaagtggtgttgaaggtagtttcagaataacatgcgagaatgtaatgagagtgttacgtgataataaagattccctaatggcaatactagaagcatttgcatttgatcctcttattcggtggggatttgacctacccacagaacaaattaaaaaagagaatgacaagcacttcaaggcaactgaatctatatatggtattgacgaagcttcatcaatgagcaacataactactacgtcagtgaaggacaagaaaagagagtatatcaacactagggcagttttagttttgaagagaatatcaagcaagctcacaggtaatgacattccaaaacacgaagatctggatgttgcagaacaggtagatcatctaatcgaacaagctaagtctgttgaaaatttatgccaacactacattggatggtgcccattctggtaa

SEQ ID NO: 2529 - protein, 2471 aa, Candida glabrata CBS 138
MQAILRKGADKRIKTGNKSNKLTVRKHRKSEEELSNVSAPGGDPTDNSTARRAASSANGEENAKFIDLENGWDDSDISPSNLYDLFERLKSDDQMVRTNTAMELRTSIISIAREIPTDQFQRFINTLNNKIFELIHGSSSNEKMGGILAVDSLIDFYLEIGELSNQTTRLANYLRVLIPSNDIDVMRLATQTLGKLALPRGTVTSEFVDFEVKTCLEWLTASTDNPPLNFKQEYRRHAAILILYSLIENSPYLLFPYINPILDNIWGSLKDTKLIIRRDAAETMRKCMETLQSRDPQNAREWYQRSFSTATQGLNSNNIESIHATLLTFKELLNLKDSYIKDKYSQIFQVVIKFRDHKNDIVRREVYAILPLLAMNDSDIFASKYLDPTMSFYLKVLKDMDSSTANNADKEAIFISIGDLSENVRSKMHSYIHQLEINLREGLQTKYKIRKHYEKALFYCIIKLTAALGPAIATNINKGFLDLILSCPLSSHLLEVMATIKKSIPALSTSIDKRLIEIVHAYLSGERYNDGTNSQIMKTVSLPLARKWRDRDYCWKTGDQNSDNNDDFLLVQTLKMVDIIDPKHLVSEHTKMSIIAYIEHTHETVRKLAALKSVELYKLTEANLPDDEHALDTSATVLGKLLVLAITDPNSNIRLSILQSFDYHFSSQLAQPDNLRLLFCSVNDEVYTIRLEAIRVIGALTEFNPIYVVPEMQKIFLSFLTELKYSATNRKKENMLTLIHAVINSHPDTLVPFIKDCLDSLIQRLEDNSSAVATIAMKTIGALAEAVGPDITNYVHQLMPIIISTLHNQLNSIKRATAIKTLIQISSSTAYVIDPLIEYPELLGLLMNILKTESNMEIKRDIIQLIGTLGAIDPYKYRAVETNSKGVQKIDTTQHSTAIDLLIKGMSPSNEEFYPSVVMHSLVKILNDNSLSSYHTNTLQTIMRIFQDMGVQSIIFLKILVPAIKSVVKTCPPSHLEFYFQQLSVLVNTVNHHIEPFTEDIFEIIADHFSITKLQVVIISLIESMSHLVKNNLKRFLPKTVNLFLNVLENDRSNQKMASVSIMKALIAFGKNLEDYSHLIIPTIVRICEYSQNHLRKISIVTFGKLAKCINLTELSSMIINALVRVLTNGDKSLIKVTMNTLCLLLLQLGNDFVVYIPTIHSVLIKNRIQHSIYDQLVNKLLNGEVLNTNILLDKDSEEKNKNINLQNNPRTEKFVVDQQILKSAWDCSQQKSKEDWQEWFRRLSVHTIRESASPSLRACSNLVSVYNPLARDLFNVSFSSCWNELNIGSREHILNSLCSALSSPQNPTEIYLILINLIEFMEHDMNPLPIPATITGEYAQKCNAFAKALHYKETEFIENEKPCIIESLIDINNQLHQPDASIGILKYAQQHYNLQLKETWYEKLQRWDDALQAYTDREKNGEDTPEVLMGKMRSLYALGNWSEIADLANDKWNTVPLHIQEKLSPIAAGSSWALHNWDDIEKYCSILQDNSIDKEFFSTVMCLHHNNFEEAEQHADNVNSLLVGEMSALINESYSRIYNSVAKCQTVAELKEIIKYKRLPRMSPKRKAMRETWNKRLLGCQQNIDVWQVILKTRSLVVNPEDDEEIWIKFANLCRRNGRMNMTRDVLNSLLKFNEMSENPDILQASPEVVYSYLKYKWDTGEKNSALNQLAIFIGKVIRDLGLHPEHIISNKTFQSKTNISPNERPKYQKLLATCFAKQGDWTIALDPNWSNTDPGSVLSSYLLATHFDPQWYKAWHNWALANFEVISMMSSTNKDTNYQKSNAPITSFYQIRNNIFEKNGETPYYNQFPSRLINNHVVSAIKGFFHSIALSDSSLLQDALRLLTLWFTFGSTSETTQAMQEGFNMVKISTWLEVLPQLISHIHQPNPLISRALLTLLSDLGKEHPQALVYPLTVAIKSESLSRQKAAISIIDNVRSHSPVLVDQAELLSRELIRVVALWNEMWYEGLEDASRHFFGENDNTKMLETLEPLYELLNKGPETIREISFKYAFGKDLTYAYEWVKKYKETGEVSNLNQAWDIYYSIFKKINKQLPQMETLELQHVSPKLLAAKNLELAMPGTYIPGTEIVTIESVNGTCEVISSKQRPRKIALKGSDGKEYLYVLKGHEDIRQDSLVMQLFGLVNTLLQNDIECFQRHLDIQQYAAIPLSPKTGLLGWVTESDTIHVLIKDYRDAKKMPLNIEHLVMLQMAPDYDSLTLLQKVEVFKYVLDNTQGFDLYNILWLKSKSSETWLERRTTYTRSLAVMSMTGYILGLGDRHPSNLMLNRNTGKVVHIDFGDCFEAAILREKFPEKVPFRLTRMLIKAMEVSGVEGSFRITCENVMRVLRDNKDSLMAILEAFAFDPLIRWGFDLPTEQIKKENDKHFKATESIYGIDEASSMSNITTTSVKDKKREYINTRAVLVLKRISSKLTGNDIPKHEDLDVAEQVDHLIEQAKSVENLCQHYIGWCPFW

SEQ ID NO: 2530 - DNA, 7353 bp, Kluyveromyces lactis NRRL Y-1140
  CDS (1)..(7353)
atgctcagaagaaagggagagtccgccaagaaaaggttggtgtcaggaacagcagcctccttacaagagcttagtttgaagcccaattccaatggtatacaatcatctggtaaaaccgaggacacagatgtacctggggatagcatttccggcgaatttggtgcagcattatccgattctaatgttgaaaatagtgttaaagcgttcaatttgatctttaccaaacttaaaagtaccagtgagatggaacgtacagctgcctcattcgagttgagatcatcgttgatttcattggcaagggaagtttctacggaacattttcaacggttcagtaatgatattaataataaagtatttgaattgattcacgggaacgactctaacgaaaagctaggtggtgttttagctgttgatactttgattgatttctattctcgtactgacgaactaccaaatcaaacatcaagattggcaaactatttacgtgttctaataccatccaatgatattgaagtaatgagagcagcagcaggaaccttaggtaaactagcagttcccggtggaacattgacatcggaatttgtggaattcgaagttaaaacatgcattgagtggttgaccacatctccagaaaactcctcatcgaattcaaaacaagaatataggaaacatgcatctttattaattatcagtgcaattgctgataattctccatatctactatatccatttgtgaattcaatcttggataacatttggagagcgttgagagatacaaaacttgtaattagaacagatgcatctgtcacattgggaaaatgtttgactatcattaataaccgtgattcctctctgacgaagaaatgggttcaaagactatttaatggatgcatatatggattacaactcaatagtactgtttccatacatggtacattgttggtttatagacagttggtatcattggaaggtggatatttgaaggacaaattcgaagagatatatgagactactatgagatacagagaaaacaaaaacattataattagaaaggaaatctacgctatcattccggtacttgctgcgtttgatcctaagctatttacacaaaaatatttggattcaacaatgatccattacttgactttactaaagaatatgaactcgcatccggttacaaattctgacaagggtcctatcttaatttctgttggtgatattgcatattacgttggtccagatattggaccatatcttgacgccattgtcgaaaacctacgggatggcctaacgacaaaatacaaattcagaaaggattatgaacaggaaattttctattgcatcggcaaactcgcatgcgcagttcgtccattattagcaaaatatctaaacagaggactacttgaatatatgttagcatgccctttaagtgatcacatgcaagagaccttactgattgtatgcgagaaaatcccttcgttggagggaacaatcaatgaaaagctactcaatataatatgtcttgtactatctggtgagaagttcagaccaccgggatcccctacccctatgaaaccattctccgcagagaccgcaagaaattatagagatcaatcactcttcaagaaaactggtgaagccaataacgatatttttgatgctgttatacttacgaaggctttaaggatgctttccgacataaaacccaaatattctctcacagagttcattaggcgtgtcatcatatcatatatggaacatgacaatttgcaagtgaggaagcttgcagctttgacgtcatgcgatctattcgtagaggactccatctgtaagcaaacttcactttacgctttgaatgttgtttccgaggtattgagcaaactattgactgtagcaattacagatccagttgccgagattagacttgagatcttgagacacttagatactaattttgaccctcaattatcacaaccagataacactaaactactatttatggccctgaacgacgaagtctttgcaatccaaatggaagcaatgaggatatgtggtcggttagccctcgtgaatcctgcatatgtcattccatctttgaggaaaactcttattcagttattgactgaattgaaacactcaaagctaactagaaagaaagaagagtgtgcttctctattatgtacattgatcagctccagtagtgatgttacaaagccatatctagagcctgtaattgaaatactactaccgaagtcacaagactcttcctctgcggtggcatcaacagctcttaaagcaatcggtgagctatcggtggtcggaggtgaagatatggttcctttcttggatgaattgatgccattaataattgatactttccaagatcagtctaactcattcaaaagaaatgcagctttgaaagcattaggccaattatctgcctcttcgggatatgttattgatccgctattagattatcctgaattacttggcgttcttctcaatattttaaaatctgaaagttcacagaacattcgtagagaaaccgtcaggctgataggtattcttggtgctttagatccgtataaacacagagaagtggaacgtacatctagtacaaatattacggtagaacaaaatgcccctccaattgatgtggctttgttaatgcaaggtatgtctccatctaacgaggagtattatcctaccgtagtaattggagtcctcatgaagattttgaaagatccttcgttatctattcaccattcaactgttattcaagcgatcatgcacattttccagacaatggggcttcgctgtgtcatatttttgaaacagatcattcctggatttatactggttatgcacacatgtccaccttcacttcttgagctctacttccaacagctcagtgttttgatttcaattgtgaaacaacacatcagactacatgtgtctgaaattgtggaagtaatctcagaattcttccctatcgtaaagctacaattaactatcatctcggttatcgaatcactatcaagagccttagaaggagaattcaatccttatttacctaatatactatctttgtttttggatgttttggaaaaagaccagtcgaataagaaggttgtctcaattagaatattgaagtcattggtagtttttggaccacatctagaggaatatgctcacctcgtactgccaactatcataaaactatcggagtttagctcaggaaatttgaagaaggccgcaatcattactataggacgtctatcgaaaaatgtcaatccactagaaatgtcgtctaggattgtgcaagccctagtaagagtcttaaatacatcagaactcgagtacgtgaaagcaacaatgaacacattaagtttacttcttttacaactcaatattgattttactgtattcattccagttatcaataaaactttagtcaaacagaacattcagcacacaatatacgaccgtttggttgccaaacttttgaataatgagccactaccgaccaaaattattattgataaagatttcgatttacctaataaagaaatggacgatgtaaaggtagcttccaagaagcttcctgtcaaccaacttgtgctaaaaaatgcctgggattgtagtcaacaaagaacaaaggaggactggcaagagtggattagacggctatcaatttctttactcaaagaatcatcttctcatgctttacgtgcctgctccggattggctggtatctactatccattagctagagaattattcaacgcctcatttgcaagttgttggggtgaactttacacgcaatatcaagaggatttggttcagtctttgtgctctgctttatcctcaccaaacaatcctcctgaaatccaccagacattattaaatttggttgaattcatggagcatgacgacaaaccgctaccaatttctatatcaactcttggcgaatacgctcagcgttgtcatgcatatgcaaaagctttacattataaagaactggagttcattgaagagccaacaacttcaactatcgagtccttaatcagtatcaataatcaattacaccaaacagatgcagcaatcggtattttgaagcatgcgcagcaacaccacgatctacaattgaaggaaacttggtacgaaaagttacaaagatgggatgacgctttgactgcgtataataagcgtgaggctgctggtgaagattcgatagaagttacaattggtaaaatgagatcattacacgccttaggtgactgggatcaattgtctgaacttgcagcagacaagtgggcttcgtcaaagatagacattaagagagcaatcgctcctctggctgcgggtgctgcgtggggtttagctcaatgggatcgaatcgagcagtacattgaggtgatgaaaccacaatctccagataaggccttctttgctgccgttctttgtctacatcgcaacaatttcgataaagcacaagaacaaatctttgctgccagagatcttcttgttactgaaatgtctgccttggtgaacgaaagttacaaccgtgcttatggtgttgtggtaagaactcaaatggtcgcggaattagaagaaataattcagtataaaaatttaccacagggttccgatagacgggctatgatacggaagacatggaacaaaagattgttaggttgtcaaaagaatgttgatgtctggcaaagaattctaaaggtacggtcactagttataaagcctaaacaagatatgaaagtatggattaaatttgctaatctttgtaggaagtccggacggttaggtctagctcagaagacattgaacactcttctggaagagagtagtgatccaaagaatccaaatactgctcgtgcacctccaccagttgtctacgcccaattgaaatacatgtgggctacaggttctcaaaaggaagcactcaaccatttaataagctttacttctcgtatggcacacgatctaggcctcgatcccagtaacatgatagctcaaagtgtcccacagaatagcagcgtatctcagcatcacattgaagactatacgaagttacttgctcgttgtttcttaaagcaaggtgaatggagagtctcactacagccaaattggcgcctggaaaatcctgatgctatcctaggttcctatttactagctactcactttgataagtcgtggtataaagcttggcataattgggcattggcaaacttcgaggtcacttcgtcgcttacccagcgaatcaaagatgacaaagttctaacacttgaagacgcctctacggagtttaccaatggtgccgtggcagggcttggcgcgaatgaaaatttccctccagaactggtccaacgtcatgtcgtgccagccatcaaaggttttttccgttctattgctctttcccaatcgagttctttacaggatacgttaagattactcactttgtggttcaaattcggtggtattccagaagctgcacaagctatgcatgaaggctttggattgatcaagatcgataactggttagaagttatcccacaattgatctcccgaattcatcaaccaaatcaaaccgttagtagatctttactatctttgctagctgatttgggtaaagcccatccacaggcattagtgtatccattgacagttgccattaaatctgattcggtctcaagacagagggcagctttgtccatcatagataagatgagaatgcacagtcctaaacttgtcgatcaagcagaattagtaagtgacgaattgatcagagtcgctgttttgtggcacgaactttggtacgaaggtcttgaagatgctagtagacaattctttggtgaacataacacggaaaagatgtttgccactttggagccattgcatgagatgctaaaacgtggtcctgaaaccttgcgtgagatttcgttccaaaattcgtttggtagggatttgaacgatgcccacgagtgggtaatgaactacaagagaacaaaagatatcaacaaccttaaccaagcttgggatatctattataatgtcttccgtcgtattagcaggaaactccctcaattacagacgttggatctccaacatgtttcaccaaaactagctgctgcgaaagatttagaacttgctgttccaggtacatatcatgccggaaaacctgtcattagaattacccatttcgagccaatatttactgttatttcatccaaacagcgtcctcgtaggctatctatcaagggtagcgatggtaaagactatcaatatattgtcaagggccatgaagatatcagacaagataatttggtcatgcaattgtttggtttggttaatactttattacagaataaccccgagagtttccaaaggcatttgaacattcaacaataccctgctatcccattatcacctaaatccggtcttttgggatgggttccaaatagtgatacattccatgtcttgatcagagaacatcgtgaagcaagcaaagttccactaaatatagaacacagaataatgctccaaatggctcctgattatgataacctaactctattgcaaaaagtggaagttttcacttatgctcttgataacaccaagggccaggacttgtataaggttctatggttaaagagtcgttcatcagaatcatggctcgaacgtcgtacaacttacacaagatcgttagccgtcatgtcaatggtaggatatattttaggtttaggtgatcgtcatccaagtaatttgatgttggaccgtgttactggtaaagttgtccacattgatttcggtgactgtttcgaagctgcaattctcagagagaaatacccagaaaaggtaccattcagattaacaagaatgttaacgtacgcaatggaagtcagtggtattgaaggtagtttccgtatcacctgtgagaacgtaatgatggtcctaagggataataaggagtccttgatggctattttggaagcctttgcatacgatccattaatcaactggggtttcgatctaccgactcaagccgtgatggaacagacgggaatagatctacctcttgcaaatccaagtgagttactaagaaagggcgtcatcaccgttgaagatgcggccaagatggaactacaacaaaaggcagaagtccgcaacgcaagagccactcttgttctcaaaagaatcgctgataaacttactggtaacgatttcccaaggtatcaagaactatctgtgcctgatcaagtcgacaagttgatccagcaagctacatcagtagaaaacctatgtcaacattacatcggctggtgttcgttctggtga

SEQ ID NO: 2531 - protein, 2450 aa, Kluyveromyces lactis NRRL Y-1140
MLRRKGESAKKRLVSGTAASLQELSLKPNSNGIQSSGKTEDTDVPGDSISGEFGAALSDSNVENSVKAFNLIFTKLKSTSEMERTAASFELRSSLISLAREVSTEHFQRFSNDINNKVFELIHGNDSNEKLGGVLAVDTLIDFYSRTDELPNQTSRLANYLRVLIPSNDIEVMRAAAGTLGKLAVPGGTLTSEFVEFEVKTCIEWLTTSPENSSSNSKQEYRKHASLLIISAIADNSPYLLYPFVNSILDNIWRALRDTKLVIRTDASVTLGKCLTIINNRDSSLTKKWVQRLFNGCIYGLQLNSTVSIHGTLLVYRQLVSLEGGYLKDKFEEIYETTMRYRENKNIIIRKEIYAIIPVLAAFDPKLFTQKYLDSTMIHYLTLLKNMNSHPVTNSDKGPILISVGDIAYYVGPDIGPYLDAIVENLRDGLTTKYKFRKDYEQEIFYCIGKLACAVRPLLAKYLNRGLLEYMLACPLSDHMQETLLIVCEKIPSLEGTINEKLLNIICLVLSGEKFRPPGSPTPMKPFSAETARNYRDQSLFKKTGEANNDIFDAVILTKALRMLSDIKPKYSLTEFIRRVIISYMEHDNLQVRKLAALTSCDLFVEDSICKQTSLYALNVVSEVLSKLLTVAITDPVAEIRLEILRHLDTNFDPQLSQPDNTKLLFMALNDEVFAIQMEAMRICGRLALVNPAYVIPSLRKTLIQLLTELKHSKLTRKKEECASLLCTLISSSSDVTKPYLEPVIEILLPKSQDSSSAVASTALKAIGELSVVGGEDMVPFLDELMPLIIDTFQDQSNSFKRNAALKALGQLSASSGYVIDPLLDYPELLGVLLNILKSESSQNIRRETVRLIGILGALDPYKHREVERTSSTNITVEQNAPPIDVALLMQGMSPSNEEYYPTVVIGVLMKILKDPSLSIHHSTVIQAIMHIFQTMGLRCVIFLKQIIPGFILVMHTCPPSLLELYFQQLSVLISIVKQHIRLHVSEIVEVISEFFPIVKLQLTIISVIESLSRALEGEFNPYLPNILSLFLDVLEKDQSNKKVVSIRILKSLVVFGPHLEEYAHLVLPTIIKLSEFSSGNLKKAAIITIGRLSKNVNPLEMSSRIVQALVRVLNTSELEYVKATMNTLSLLLLQLNIDFTVFIPVINKTLVKQNIQHTIYDRLVAKLLNNEPLPTKIIIDKDFDLPNKEMDDVKVASKKLPVNQLVLKNAWDCSQQRTKEDWQEWIRRLSISLLKESSSHALRACSGLAGIYYPLARELFNASFASCWGELYTQYQEDLVQSLCSALSSPNNPPEIHQTLLNLVEFMEHDDKPLPISISTLGEYAQRCHAYAKALHYKELEFIEEPTTSTIESLISINNQLHQTDAAIGILKHAQQHHDLQLKETWYEKLQRWDDALTAYNKREAAGEDSIEVTIGKMRSLHALGDWDQLSELAADKWASSKIDIKRAIAPLAAGAAWGLAQWDRIEQYIEVMKPQSPDKAFFAAVLCLHRNNFDKAQEQIFAARDLLVTEMSALVNESYNRAYGVVVRTQMVAELEEIIQYKNLPQGSDRRAMIRKTWNKRLLGCQKNVDVWQRILKVRSLVIKPKQDMKVWIKFANLCRKSGRLGLAQKTLNTLLEESSDPKNPNTARAPPPVVYAQLKYMWATGSQKEALNHLISFTSRMAHDLGLDPSNMIAQSVPQNSSVSQHHIEDYTKLLARCFLKQGEWRVSLQPNWRLENPDAILGSYLLATHFDKSWYKAWHNWALANFEVTSSLTQRIKDDKVLTLEDASTEFTNGAVAGLGANENFPPELVQRHVVPAIKGFFRSIALSQSSSLQDTLRLLTLWFKFGGIPEAAQAMHEGFGLIKIDNWLEVIPQLISRIHQPNQTVSRSLLSLLADLGKAHPQALVYPLTVAIKSDSVSRQRAALSIIDKMRMHSPKLVDQAELVSDELIRVAVLWHELWYEGLEDASRQFFGEHNTEKMFATLEPLHEMLKRGPETLREISFQNSFGRDLNDAHEWVMNYKRTKDINNLNQAWDIYYNVFRRISRKLPQLQTLDLQHVSPKLAAAKDLELAVPGTYHAGKPVIRITHFEPIFTVISSKQRPRRLSIKGSDGKDYQYIVKGHEDIRQDNLVMQLFGLVNTLLQNNPESFQRHLNIQQYPAIPLSPKSGLLGWVPNSDTFHVLIREHREASKVPLNIEHRIMLQMAPDYDNLTLLQKVEVFTYALDNTKGQDLYKVLWLKSRSSESWLERRTTYTRSLAVMSMVGYILGLGDRHPSNLMLDRVTGKVVHIDFGDCFEAAILREKYPEKVPFRLTRMLTYAMEVSGIEGSFRITCENVMMVLRDNKESLMAILEAFAYDPLINWGFDLPTQAVMEQTGIDLPLANPSELLRKGVITVEDAAKMELQQKAEVRNARATLVLKRIADKLTGNDFPRYQELSVPDQVDKLIQQATSVENLCQHYIGWCSFW

SEQ ID NO: 2532 - DNA, 7554 bp, Debaryomyces hansenii CBS767
  CDS (1)..(7554)
atgtctacaactcagctacaaatagttgacggtatagcattaacccaaattttcaatggtttaaaatcaaataaggaagaagagagaaatagatatgccttagaattacgaaattatctagcgtctatagctagagatctatctccggagcagttcaatcggtataataatgatatcaacaaaactatttttgaatttttgcatagtaatgaaacctcggagaagttggggggtatagcagcgttgaattcattgattgattttgattcgggtgtaggagaagaaaatgctacaaagacggctagattttcaaactacttgggttcattaatcttgtcaaacgatttaacaatcatgaagcaagcaaccatgactttaggtaagttggcgacacccggtggtactcttacaggtgacttcgttgattttgaagcaaaaagggccatagaatggttacagagtgacaataaacaacacgagaacagaaggcacgcagcaatattgattatcactgcattggtggataatgctcctacgttattgtataattttataaaccagattttggagcatttatggattccattgagagatagcaaattggtgataagaactgatgcagctattgctttacagaaatgtatgcgaataatttatgatagagatattaactctcgtcgattttggatcaaacatttcatagatatggcttcaaagatattaaacgaaaatgttgctagaaaccccacatctgaatccaacgactcaagcaataatggaagcggcaataatagtgtgaactctgttaacgcagcggcaagtacggcctataatttaatttattccacagctacgggatcacaaactaacgagtcaatccacggttctcttcttgtgtacagggaactaattacatttcatagtgatccatacattcattccaagtttgaattgatttacgaaaatacagtattgtataggaatcacaagcaagctataattaggcaagaattaactaagatcattccactactatgcaaagtaaatacagaattatttgttgaaaaatatttgcacagaacattgttgcattatttgtcacagttaaaacaattaaaaagtcaacacagtgagactgccaataatgataaaagtgccatttttagaagtatagggttaatttcgttggaagtagggaaccaaatggctacttatttggatgctatattagataatattcgagatgggttatcttatccttctaatccaagcgtgcaactgattttagtaaatgcagtatctaataatggagataatccactatctggtgcagtgacgtcgagtaatggatcctcgcaatcgacaatcaatggtttgaatagcatttctacttcaggttccgggcccacaaagtatagattgagtcgaaagaatactgaacctgccatttttgattgcatcagtaaattgtcgattgccgtaggtccagctttgacaaagcatttacaacgtgatatattagatatgatgtttagtaattgttccttatcggtctacatgcagaatgttttacaaactttgatcgttaatattccgatgttaactaatcttataagcatgaagttattaaacttattaagtttggttttatcaggtaagattttccaacctcctggttcgccttacggatccatcaaaatgaacgaatcattagcaagagactatagattaataatgatatcaagagacacaggattgagtatcaacagtatacttaatgacgcggatgactatgaaaattatgatagtgcaatcttggtccaagcattaaatatgctagcattttttgagttcgaaaactaccagctaaacgagtttgttagatactgcacaattacgtatcttgaacacaacgttcctaaagttcgtcaaacagccacgataacatcctgtgaaatatttatcaaggatccaatttgtcaacaaaccagcgtgaatgcattaaacgctgttaatgaggttttagacaagcttctatcaatagccatcaccgatcctataccagaaatacggttagaaggtttaaattgtttggcaaatgctggaaatcttgatcctcaactttcccaagctaataatgttagacttctatttattgcattaaacgatgaagtattcagtattaggaagatagcgataaaaatattgggtagattatcatcgataaatcctgcctatattgttccttctttaaggaaaactttaatacaattgttatcgcgtttggaatactcaccaacaagccgtaaaaaggaagaaagtgctacattgatatcgcttctcataagcaattcaaaagaattaaccagaccttacgtgaagccaatagttgaagcattattgcctaaggctaaagatcccagttcatcagtggcagcaagtgcaatcaattgtcttggtgagctagcagttgtaggtggggaagatttgcaaccttttattcctgatttgatgccactaattttggaaacgtttcaagatcagagttcttcttataagagagatgctgctttgaagacgttgggccaattggcaagttcgtctggctacgttattaagcctttacttgactatccgcagttattggggatgttagtaggaatattgaaactggagagttcgcctcacataagaagggaaacagtaaggctattgggtatattaggtgctttggacccttataagcatcgtgaagttgaacaaaattctaagaatataccttcagaacaaaatgcaccaccagtggatgttgcattgttaatgcaaggtatgtcaccttctaatgatgaatactatccgacagttgccataaataacctaatgaaaattttaaaagacccatcattgacagctcatcataataaagtaattcaagccattatgtacattttccaaacattgggattaagatgtgtttcatttttaccacagatcattcctggaattattaatgtcatgaatacatgtcagccttcgatgttgaaattttacttccagcaactaggtgcattaatattgatagttaaacaacacataagaccattccttcctgaaatatttgaagtcatcaaagagtcgtttaacataaacatccaattaaatgttcaggtgatcattataaatttgatagaatccatttcaagggctttagaaggggaatttaaaatgcatcttccagatgttttgaatttgatgttaaatgtttttgaagatgataaatcagttaagagagaaccatcgttacatgttttgaaagcatttgttgtttttggaagtagcattgaagaatatgtccatataattgtcccaaacatcgtgaaaatgtttgaaatggggccgattgtattacgtagggctgcaattgagacaattggaagattatcgaagcaagttctattaaatgatatggcatctagaatcatacatcccattttacgtgtattgcgccaaggcaatgatgaattgaaaactacggcgatgaatactttaagttacttactattgcagttgggtaatgagttcagtgtgttcattcctgtaatcaaatcattgttgatacagcagaaaattcattcagcaattttcgagcaacttgttaataagttattaagtggagatccattaccagcttatcttaacatttataaggattatgatatccatgttaaccattttgatgttcctgacgttgatatgccatcgaaaaagttaccggtaaaccaaggtgcattaaaggcagcttgggattcaagtctgcgtcaaaccaaagaagactggcaagaatggattgggaggttaagtaaagaattattgaagcaaagtccatcgcatgcaataagagcatgcgctgggttagcaactgattatcatcctttggcaaaggacttgtttaacgcaagttttgcaagttgctggagtgaattatattcccagcaccaagaagagttagtagaatcattttgtattgcattatcatcagcaaacaatcccccagaaatacatcagattttattaaatttagctgaatttatggaacatgacgataaatctttaccaatagcaataacaactttaggtcagtatgcgcaacggtgccatgcatatgctaaagcattgcattatcaagaattagaattttatgtggaacctacgacaccaaccattgaatctttaattagtatcaacattcagcttcaacaatctgatgcggctgttggaattttgaaacatgcacagttacatcatgatctccaattaaaagagacatggtatgagaagttacaaagatgggatgatgccttgcgagcttatagtttaagagagaaacaggaaccggacaatatggagattaccatgggtaaaatgagatgttaccatgctttaggagaatgggagcagttatcagaattagcccaaagtaaatggaataactcttcaagtgacataaagagaggagtggctcctttagcagcagcagcagcttgggggttaggccaatgggatagaatggatgcatgtattaaggttatgaaaactgaatccccagataaagctttctttaatgcaattttaagtttacatcgtaatagttttgaggatgcatctaatcacatattgaaagcaagagacctattagtaactgaaatcacagcattggtgagtgaaagttataatagagcttatggtgtcgtagtaagggtacaaatgcttgcggaattagaggaaattattaagtataaatgcttaccacaagggtcagagaaacgtgttataatgagaaaaacctggaataccagattacttggatgtcagaggaatgttgacatttggcaaagaatgttgaaagttagagctcttgttattaaacctaaacaagatatggatatgtggattaaatttgcaaatttatgtcgtaaatcaggaagattgaatttggctgaaaagtccttaaactatttgttggaagaaggttcaccagaaaatccatctagagctccaccacaagttgtgtatgcacaattgaaatatatgtgggctaagggccaacaaagagaagcattacgccatttagttgattttacaactcgaatgtctcaagatttgggtttaaacccaaatgacttaattactcaaccattaccgtctgaaggtccaggtattccaaagcatgtggaagagtataccaaattattggctagatgttttttgaagcaaggtgaatggcaaatattattgaacaataattggaggactgaaacatcagaaattattttgggggcatatcttttggctacacattttgatgacaaatggtataaagcatggcataattgggctcttgctaattttgaagttatttcactttttacttcgcagaataacaacggcaacaatggtacaatcaatgttagtcaaggtgaaataatggatcaaaatgatcaagttgttacatcatctgatgaacaatctcaacagccacagagacagatacaacctgcaaatattataccgatggatgttgttcagcgacatgttgttccatcaataaaaggattctttcacgctatcgcattgtcaaatacaaattctttgcagaatacgttgagattacttacattgtggtttaagtttgggggaataccagaggcagctcaagctatgaatgagggatttaatatggttaagattgataactggttggaagttgtacctcaattaatctcacgtattcatcaaccaaatcaaacagtcagtagatctttaattggattattgagtgatttgggtaaagcgcatcctcaggcactcgtgtatccgttagctgtcgcagttacgtctgaatcggttagccgtaaaagggcggcattgtcaattattgataaaatgcgtttgcattgggctacgttggtagatcaatctgatttagttagtcatgaattgatcagagttgcagtcctctggcacgagcagtggtacgaaggtctagaggatgcatcaagacttttctttggtgaaaagaacactgaaaagatgtttgaggtgttagaacctttgcatcaaatgctacaaaaaggccccgagactatgagagaagcatcatttaataatgcatttggtagagaacttgctgatgcctatgaatgggttttgaacttccgtcgtacaaaagacattactaatctaaatcaagcgtgggacatttattataatgttttccgcagaattagtagacaattgcctcaattgctgagtttggaattacagtatgtatcgccaaagctagaggaagcaaataatcttgaattggctgctccaggtacataccatgctggaaagccaacaatcaagattgttaagtttgatccaacgttctcagttatctcatcgaaacagagaccaagaaaattatcttgtaaaggtagtgatggtaaagaataccagtacgttttgaaaggacacgaagacattagacaagataatttggttatgcaattatttggtttagttaacacattattggtaaatgatccagaatgtttcaaaagacatttagacattcaacaatatccagcaattccgttatcacctaaagttggtttattaggttgggtaccaaacagtgatactttccatgtcttgattagggaataccgtgagtcgcgtaagattttattaaatattgaacatcgtattatgttgcagatggctcctgattatgacagtcttacattactacaaaaagtggaagtattcacaggggctttagacaacaccagaggccaggatttgtataaggtattatggctcaaatcaaagtcttcggaagcgtggttagatcgtcgtacaacgtatactcgttcattggcagtaatgtctatggtaggctacattttaggtttaggtgaccgtcatccttctaatttgatgcttaataggattacaggtaaggttattcatattgattttggtgattgttttgaggctgctattttacgtgaaaagtatcccgaaaaggttccatttagattaacaagaatgcttaattatgctatggaagttagtggtattgaaggttcattccgcataacatgtgaacatgttatgagagtcttaagggacaataaggagtcattaatggcaattttggaagcattcgcatatgatccattgattaattggggatttgacttcccgacaaaagcagtggcggaagctactgggattaatgtaccgcaagttaatatagcagaattattgagaagagaacaaatagatgaacaagaagcagctagattaacgagacaaaacgaaatcgagattagaaacgcgagagctgcattggtgttgaagagaattactgataagttaactggtaatgatattaaaagattgaatgatttagatgtaccaactcaagtggataaattaattcagcaagctacaagtgtagagagtttatgtcagcattatattgggtggtgttcattttggtag

SEQ ID NO: 2533 - protein, 2517 aa, Debaryomyces hansenii CBS767
MSTTQLQIVDGIALTQIFNGLKSNKEEERNRYALELRNYLASIARDLSPEQFNRYNNDINKTIFEFLHSNETSEKLGGIAALNSLIDFDSGVGEENATKTARFSNYLGSLILSNDLTIMKQATMTLGKLATPGGTLTGDFVDFEAKRAIEWLQSDNKQHENRRHAAILIITALVDNAPTLLYNFINQILEHLWIPLRDSKLVIRTDAAIALQKCMRIIYDRDINSRRFWIKHFIDMASKILNENVARNPTSESNDSSNNGSGNNSVNSVNAAASTAYNLIYSTATGSQTNESIHGSLLVYRELITFHSDPYIHSKFELIYENTVLYRNHKQAIIRQELTKIIPLLCKVNTELFVEKYLHRTLLHYLSQLKQLKSQHSETANNDKSAIFRSIGLISLEVGNQMATYLDAILDNIRDGLSYPSNPSVQLILVNAVSNNGDNPLSGAVTSSNGSSQSTINGLNSISTSGSGPTKYRLSRKNTEPAIFDCISKLSIAVGPALTKHLQRDILDMMFSNCSLSVYMQNVLQTLIVNIPMLTNLISMKLLNLLSLVLSGKIFQPPGSPYGSIKMNESLARDYRLIMISRDTGLSINSILNDADDYENYDSAILVQALNMLAFFEFENYQLNEFVRYCTITYLEHNVPKVRQTATITSCEIFIKDPICQQTSVNALNAVNEVLDKLLSIAITDPIPEIRLEGLNCLANAGNLDPQLSQANNVRLLFIALNDEVFSIRKIAIKILGRLSSINPAYIVPSLRKTLIQLLSRLEYSPTSRKKEESATLISLLISNSKELTRPYVKPIVEALLPKAKDPSSSVAASAINCLGELAVVGGEDLQPFIPDLMPLILETFQDQSSSYKRDAALKTLGQLASSSGYVIKPLLDYPQLLGMLVGILKLESSPHIRRETVRLLGILGALDPYKHREVEQNSKNIPSEQNAPPVDVALLMQGMSPSNDEYYPTVAINNLMKILKDPSLTAHHNKVIQAIMYIFQTLGLRCVSFLPQIIPGIINVMNTCQPSMLKFYFQQLGALILIVKQHIRPFLPEIFEVIKESFNINIQLNVQVIIINLIESISRALEGEFKMHLPDVLNLMLNVFEDDKSVKREPSLHVLKAFVVFGSSIEEYVHIIVPNIVKMFEMGPIVLRRAAIETIGRLSKQVLLNDMASRIIHPILRVLRQGNDELKTTAMNTLSYLLLQLGNEFSVFIPVIKSLLIQQKIHSAIFEQLVNKLLSGDPLPAYLNIYKDYDIHVNHFDVPDVDMPSKKLPVNQGALKAAWDSSLRQTKEDWQEWIGRLSKELLKQSPSHAIRACAGLATDYHPLAKDLFNASFASCWSELYSQHQEELVESFCIALSSANNPPEIHQILLNLAEFMEHDDKSLPIAITTLGQYAQRCHAYAKALHYQELEFYVEPTTPTIESLISINIQLQQSDAAVGILKHAQLHHDLQLKETWYEKLQRWDDALRAYSLREKQEPDNMEITMGKMRCYHALGEWEQLSELAQSKWNNSSSDIKRGVAPLAAAAAWGLGQWDRMDACIKVMKTESPDKAFFNAILSLHRNSFEDASNHILKARDLLVTEITALVSESYNRAYGVVVRVQMLAELEEIIKYKCLPQGSEKRVIMRKTWNTRLLGCQRNVDIWQRMLKVRALVIKPKQDMDMWIKFANLCRKSGRLNLAEKSLNYLLEEGSPENPSRAPPQVVYAQLKYMWAKGQQREALRHLVDFTTRMSQDLGLNPNDLITQPLPSEGPGIPKHVEEYTKLLARCFLKQGEWQILLNNNWRTETSEIILGAYLLATHFDDKWYKAWHNWALANFEVISLFTSQNNNGNNGTINVSQGEIMDQNDQVVTSSDEQSQQPQRQIQPANIIPMDVVQRHVVPSIKGFFHAIALSNTNSLQNTLRLLTLWFKFGGIPEAAQAMNEGFNMVKIDNWLEVVPQLISRIHQPNQTVSRSLIGLLSDLGKAHPQALVYPLAVAVTSESVSRKRAALSIIDKMRLHWATLVDQSDLVSHELIRVAVLWHEQWYEGLEDASRLFFGEKNTEKMFEVLEPLHQMLQKGPETMREASFNNAFGRELADAYEWVLNFRRTKDITNLNQAWDIYYNVFRRISRQLPQLLSLELQYVSPKLEEANNLELAAPGTYHAGKPTIKIVKFDPTFSVISSKQRPRKLSCKGSDGKEYQYVLKGHEDIRQDNLVMQLFGLVNTLLVNDPECFKRHLDIQQYPAIPLSPKVGLLGWVPNSDTFHVLIREYRESRKILLNIEHRIMLQMAPDYDSLTLLQKVEVFTGALDNTRGQDLYKVLWLKSKSSEAWLDRRTTYTRSLAVMSMVGYILGLGDRHPSNLMLNRITGKVIHIDFGDCFEAAILREKYPEKVPFRLTRMLNYAMEVSGIEGSFRITCEHVMRVLRDNKESLMAILEAFAYDPLINWGFDFPTKAVAEATGINVPQVNIAELLRREQIDEQEAARLTRQNEIEIRNARAALVLKRITDKLTGNDIKRLNDLDVPTQVDKLIQQATSVESLCQHYIGWCSFW

SEQ ID NO: 2534 - DNA, 6951 bp, Yarrowia lipolytica CLIB122
  CDS (1)..(6951)
atgtccgacgcgagcgttttgaatagcatcttccagcagttgcggacagcccgcacactgactgaaaaaacacacgctgcagaagaactgcgcgaccatctaacctccgtcacgcacgaactcaacacagagcctctctcgcgctacaacaacgacatcaaccttcgcatttccgagctaatccacaatggcgaccccgtcatccggctgggcggtatcatggccattgaccggctcattgacgtcgatgtcggcgaggaaaacgccataaaagtgacccggttcaccaactacctgaagacgactattccaggagatacagaatcgatgcgcattgccgtcgacgctctcggccgtctagctgccacgggaggcaatttgtctgccactgtggttgaatccgaggtcaacagagctctcgaatggctccagagcgaccgaggagagggctctagacgccatgctgccgtcatggtgatcaagagtatggcccagcattgtgccacgttgctgtacgggtacatgagccagatccttgacctgatctgggtgggactgcgtgatccgaaggtgcagattcgggttgactcggccgaggcgctgcagtactgcctgaacattgtgcattctcgtgaccagacccttaaaaagcagtggttcaaccgaattatggaggaggccaaggtgagtttgaacatgggtggtgtcgacaccattcatggcgctctgctcacctacaaggaagtccttcgaggaggcatgtttgagaactcacgatacgacgaggtgtgtgaggttgtgttagccaaccgcgactcgcgtgacgtgctgatccgaaagacggtgctcaacatcatcccagaccttgcccaatacaatccctggcagtttacaaagcggtatctgcacaaatgcatgttgtaccttctttcacagctcaagaaggacaaggaccgtaaccttgtttttctgtcgattggccagatttccttttctgtccggtcggccatggctccttacttggacgccattctggaaaatatccgagaaggtctcagtctgaaatctcgatataggaaggagcaggagagtgccattttctcctgtattggcatgttggctgttgctgtgggtcaggctctggccaagcatctgaaccaaaaaattctggatctcatcatggcttgtggtttgagtgaacacctgcacaattgtctgagtgagctggttcacaacattcctccactgggcccttccatccagcagcggttgttgaacatcatctcgttcactctctctggccacccctttaagctccctgggtctcctgctgcgacttcttctgcagagtacatgtctgtgacacgtgcacgggagtaccgagagactgaggacgacaaggatgatgcagccgtggttgcgcttgctcttcacattctcggcacgtttaacttcaagggtttgtcgctgaccgagtttgtgcggttctgtgcaatcacttatgttgatcatgactctcctgaggtgcgaaaagcagccgccctctcatcttgcaccatttatctcaacgaccctattgtgttccagttctccgctcatgctctgagtgccgtttccgaagtggttgagaagctgttgacggtggctgtggttgatcctgaccctgatatccgaattggtattctcactacatttgatccgcgaattgaccctcatttgtcccaggccgagaacgtgcgtcttttattcactgctttgaacgacgaggtttttgcgattagacagctgtccattggcattatcggtcggctgacaaagataaaccctgcttacgttgttcctcatctgagaaaaacgttgattcatcttctgaccgaactggagtatgccaagtttggacgtaccaaggaagagagtgcgcggctgcttgcacagctgattgggtcgacgcacggactcatcaagccgtacgtcaaacccatcatcaaggtgctgcttgctcgtgcacgtgacacgtcttccaacgtggcctccgcggttatcactgctatcggagagctagctgccactggacgggaaggcatgattgagtacattcccgagattatgcctattttcttggaaactttttcggatcagaatgctcagaagaagctggctggtctgaaatctctcggacagctctcttcctcttccggatacgttattcagccgctgctggattacccccagctgctcacactgcttactaacactctcaagagcgacaatgttgatactcgtcgagaaactgtccgtctcatgggtattcttggagctctggatccttataagcatcgagaggtggagagaagtacccaggatgattcagcagagtatgactcgatccccacagatgtggctcttctcatccagggcatgtctccctcttcggacgagtacaaccacactgtcgtgattacaactctaatggcgattctcaaggaccagtcgcttgtatcgcaccacaatgctgttgtccaagccattgtcatcattttcaagtcgctgggtctcaagtgtgtgccgtttttgaatcagattatccctggctggctgcaagtgcttcgaagcagtactccttctatggccgagttttttgtccagcagttggctcttctggttctcattgtcaagcagcacattaggtcgtatcttgacgacatttttgctgttgttcaggagctctttgccattccatccatgcagcctgttgtcctgacgctggttgaaaacattgctcggtctctgagtggcgagttcaagctgcatgtgcctactctcttgcctctgcttcttggcgtgctggagaacgacaaaagcaccaccaagctcacctccatcaaggtgctgcagacgttcgtggtgctgggcgccaacattgaggactacattcacctcatcatccccatcattgtgcgaatgttcgaatactcgactcatcagctcaagaaacgggccattcagactattggacagttgtctcgaactgtggatctcaccgacatgtcgtcgcgaatcgtgcatcctctgttgcgtgtactggcagcctgtcctgtgactgaagagcccaattcgcaccatgatgagttgcggcgaaccgtcatggagactctgtcatcgctgtgtttccagctgggttccgattacaccattttcatcccccttgtgaacaaggctatgctcaaggccggagtgaactctccctcctacgaccagctggtcaaccgactcctctctggagaaccactgcctgcgtccatggaccccgacagtcgaatccaggagctcaacaatactcctccggataccacctcgctcaacaagctgcctgtgaaccaacagcacttgaagaccgcgtgggacactgcgcaatgctcgactaaggaggattggcaggagtggatgcgacgtctctcgactgctttcctgcgcgagtcttcttctcacgccctgcgagcctgtggtgtcattgctaacaactatcagccattggccaaggacctgttcaatccgtccttctactcgtgctggtctgagctctacgaccagtacaaggacgacttggtgaaccacattgagacggctctgatggcgcccaacatgccgcccgagacgctgcagatcctgctaaacctggccgagtacatggagcacgacgacaagccgctaccgatcgatatgcgtactctggctgcctatgctcaccgctgccatgcctacgccaaggcgctgcactacaaggagctggagtttatgcgggagcctacgacgcccatcattgagaatctgatcgctatcaacaactcgttgcagcagagcgacgctgctatcggtattctcaagcacgtgcagcagcatcatcagtggcagctcaaggaatcgtggtacgagaagctgcagcggtgggacgatgctctcgaggcctacgacaagcttgatgacaattccatggaggtcacaatgggtaagatgcgatgtctgcatgcccttggtgagtgggagtcgctggccgagattgcacaggagaaatggacttcatcaggccccgaggtgcgacgagtggtggcacccctggctgccgcagcttcctggggtttgtctcagtgggagcgaatggacacatatattagtgtcatgaaggtggactctgccgacaagtccttcttcaacgctgtggtgagcatccacagaaacaactttgatgaggcccatacgcatatcactcgtgcacgtgacttgctggctaccgagctcaccgctctcatttctgagtcgtacaaccgagcctatggtgttgttgtgcggttccagatgctggcagagctggaggagattatcgtctacaagggtctgggtcgcaactccgaggagcaggctgccatgcgggccacgtggatgaagcggctcaagggctgtcagcgaaacgtagaggactggcagcgaatgctcaaggtgcggtctctggttgtcaagccgaaacaggatatggagatgtggatcaagtttgcaaacctgtgtcgaaagagtggtcggctctctttggctgaaaagtcgctcaatgctcttcttgaccccgatgatcccgactcacagacttccagagctcctccacctgttgtttacgcccagctcaagtacatgtgggctactggcaactgggaagatgccctgaatcacctcgttgactttaccaatcgaatgtcgctcgatctgggcctggatcctgaagatctcatcactcagaaactaccctcagaaggcgctgctgtccctaagaagattcaggactacactcgtcttcttgctcgatgtttcctcaagcagggcgagtggcagatttcgttgcaggacgactggaaggagaagaaccccgattctatcctcggctcgttcctgttggccactcattttgacgccaaatggtacaaggcgtggcacaactgggcgctggcaaacttccaggttgtgtctctgcggtactcggaaaaggaggagttggccctggaagacgtgtctcaatatgtggtacctgccatcaagggtttcttccattccatctccttgtccaatggatcttctctgcaagacactcttcgtcttctgaccctgtggttccggtacggccatgtgtctgacgcgtctcaggccctttatgacggattccagatgctttctattgacacgtggctggatgtcattcctcagctcatttctcagattcaccagcggtctcaggttgtttccaaggctctgcagggtcttctgattgagctcggtaagaaccatccccaggctctgctgtacctgctcaacgtggctgtcaagagtgactctctgtcgcgtcaacaggccgctatgaacgttattgacaaaatgagaactcacaaccccatcctagtcgagcaggctgagctggtgtccaaggagctcattcgagtggctgttttgtggcacgagcaatggcacgagggtctggaagatgcgtcgcgattcttctttggcgagcgaaacattgaaaagatgttccagacgctagagcctctacacgcaatgctggagcggggtcccgaaactctgcgagaagtgtccttccaaacagcttttggacgtgacttgcacgatgccaacgagtgggtgtggagttttaagcgaaccaatgaccctgcccacctcaaccaggcctgggacatttactacaatgttttccgacgaatcgccaagcagttgccccagctcatctcgcttgacctgcagtacgtgtctcccaagctgctggcagccgagaatctcgagctggcggtgcctggttcgtacgctccgggcaaggagattgtgcgaatcatgaagttcgacccaattttcaccgttatctcgtccaagcagcggcccagacggctgtcgtgcaagggcagtgatggtaaggactacgtgtacgctctcaagggccacgaggatatcagacaggataacctggtgatgcaattgtttggactggtgaacactctgctatctcaggactcggagtgtttcaagcgacatctcaacattacaaagtaccctgccattcctctgtcccccaagtctggtctcctcggctgggtgcctcattcggacactctgcatacactcatcaaggaataccgggatggccgaatcctcatcaacgtggagcatagattcatgctgcagatggcgccggactacgatccattgacgcatctgcaaaagattgaggtgtttacgtacgctctggacaacactaagggccaggatctgtaccgagtcttgtggctcaagtcgcggtcctcggaagcttggttggagcgacgatctcaatacacacgatccttggctacgatgtccatggttggctacattctcggacttggagatcgacatccctccaacctgatgctggaccgatacactggtaaggtgattcacattgatttcggtgactgtttcgaggctgccattctgcgagaaaagtaccccgaaacagtgcccttccgactgactcgaatgctcacatacgccatggaggtgtcaggaatcgagggctcgtaccgaatcacgtccgagcatgtgatgcgggtcatccgagacaacaaggagtcgctgctggccattctggaagcctttgcctatgatcctctcatcaactggggtttcgagcttcccagaggcgaggatctgcctgtcaagcggttcgatgaggacgaaaaggtcaatgttcgaatggctcgagcgcacttggtcctcaaacgaatccaggacaagctgtctggaaacgacatcaagaacagaaaaaatgtcgatgtgccggcacaggtggactacttgattcagcaggccactagcattgagaatctgtgtcagcacttcataggttggtgttctttctggtag

SEQ ID NO: 2535 - protein, 2316 aa, Yarrowia lipolytica CLIB122
MSDASVLNSIFQQLRTARTLTEKTHAAEELRDHLTSVTHELNTEPLSRYNNDINLRISELIHNGDPVIRLGGIMAIDRLIDVDVGEENAIKVTRFTNYLKTTIPGDTESMRIAVDALGRLAATGGNLSATVVESEVNRALEWLQSDRGEGSRRHAAVMVIKSMAQHCATLLYGYMSQILDLIWVGLRDPKVQIRVDSAEALQYCLNIVHSRDQTLKKQWFNRIMEEAKVSLNMGGVDTIHGALLTYKEVLRGGMFENSRYDEVCEVVLANRDSRDVLIRKTVLNIIPDLAQYNPWQFTKRYLHKCMLYLLSQLKKDKDRNLVFLSIGQISFSVRSAMAPYLDAILENIREGLSLKSRYRKEQESAIFSCIGMLAVAVGQALAKHLNQKILDLIMACGLSEHLHNCLSELVHNIPPLGPSIQQRLLNIISFTLSGHPFKLPGSPAATSSAEYMSVTRAREYRETEDDKDDAAVVALALHILGTFNFKGLSLTEFVRFCAITYVDHDSPEVRKAAALSSCTIYLNDPIVFQFSAHALSAVSEVVEKLLTVAVVDPDPDIRIGILTTFDPRIDPHLSQAENVRLLFTALNDEVFAIRQLSIGIIGRLTKINPAYVVPHLRKTLIHLLTELEYAKFGRTKEESARLLAQLIGSTHGLIKPYVKPIIKVLLARARDTSSNVASAVITAIGELAATGREGMIEYIPEIMPIFLETFSDQNAQKKLAGLKSLGQLSSSSGYVIQPLLDYPQLLTLLTNTLKSDNVDTRRETVRLMGILGALDPYKHREVERSTQDDSAEYDSIPTDVALLIQGMSPSSDEYNHTVVITTLMAILKDQSLVSHHNAVVQAIVIIFKSLGLKCVPFLNQIIPGWLQVLRSSTPSMAEFFVQQLALLVLIVKQHIRSYLDDIFAVVQELFAIPSMQPVVLTLVENIARSLSGEFKLHVPTLLPLLLGVLENDKSTTKLTSIKVLQTFVVLGANIEDYIHLIIPIIVRMFEYSTHQLKKRAIQTIGQLSRTVDLTDMSSRIVHPLLRVLAACPVTEEPNSHHDELRRTVMETLSSLCFQLGSDYTIFIPLVNKAMLKAGVNSPSYDQLVNRLLSGEPLPASMDPDSRIQELNNTPPDTTSLNKLPVNQQHLKTAWDTAQCSTKEDWQEWMRRLSTAFLRESSSHALRACGVIANNYQPLAKDLFNPSFYSCWSELYDQYKDDLVNHIETALMAPNMPPETLQILLNLAEYMEHDDKPLPIDMRTLAAYAHRCHAYAKALHYKELEFMREPTTPIIENLIAINNSLQQSDAAIGILKHVQQHHQWQLKESWYEKLQRWDDALEAYDKLDDNSMEVTMGKMRCLHALGEWESLAEIAQEKWTSSGPEVRRVVAPLAAAASWGLSQWERMDTYISVMKVDSADKSFFNAVVSIHRNNFDEAHTHITRARDLLATELTALISESYNRAYGVVVRFQMLAELEEIIVYKGLGRNSEEQAAMRATWMKRLKGCQRNVEDWQRMLKVRSLVVKPKQDMEMWIKFANLCRKSGRLSLAEKSLNALLDPDDPDSQTSRAPPPVVYAQLKYMWATGNWEDALNHLVDFTNRMSLDLGLDPEDLITQKLPSEGAAVPKKIQDYTRLLARCFLKQGEWQISLQDDWKEKNPDSILGSFLLATHFDAKWYKAWHNWALANFQVVSLRYSEKEELALEDVSQYVVPAIKGFFHSISLSNGSSLQDTLRLLTLWFRYGHVSDASQALYDGFQMLSIDTWLDVIPQLISQIHQRSQVVSKALQGLLIELGKNHPQALLYLLNVAVKSDSLSRQQAAMNVIDKMRTHNPILVEQAELVSKELIRVAVLWHEQWHEGLEDASRFFFGERNIEKMFQTLEPLHAMLERGPETLREVSFQTAFGRDLHDANEWVWSFKRTNDPAHLNQAWDIYYNVFRRIAKQLPQLISLDLQYVSPKLLAAENLELAVPGSYAPGKEIVRIMKFDPIFTVISSKQRPRRLSCKGSDGKDYVYALKGHEDIRQDNLVMQLFGLVNTLLSQDSECFKRHLNITKYPAIPLSPKSGLLGWVPHSDTLHTLIKEYRDGRILINVEHRFMLQMAPDYDPLTHLQKIEVFTYALDNTKGQDLYRVLWLKSRSSEAWLERRSQYTRSLATMSMVGYILGLGDRHPSNLMLDRYTGKVIHIDFGDCFEAAILREKYPETVPFRLTRMLTYAMEVSGIEGSYRITSEHVMRVIRDNKESLLAILEAFAYDPLINWGFELPRGEDLPVKRFDEDEKVNVRMARAHLVLKRIQDKLSGNDIKNRKNVDVPAQVDYLIQQATSIENLCQHFIGWCSFW

SEQ ID NO: 2536 - DNA, 7329 bp, Apis mellifera
  CDS (1)..(7329)
atgtcaagtatacttgtacaacaatttgttcaaagacttaaatccagaaatgaagaaatacgtaacaaagcagctagagatttatgtctctatgttaaaacagaactacgtgaagtatcacaggaagaaattacagcttttatggatgaatttaatcaccatatatttgaaatggtatctggttcagatgtaaatgaaaaaaaaggaggtatcttagctatagtttgccttattggagctgatgtgggaaacattaatacaagaactataagatttgcaaattatttaaggaatttattaccctctaatgatgtgggtgttatggaattagctgctaaaacagttggtaagctagcattagtttctggtacttatacagcagaatatgtagaatttgaagtaaagcgtgcctttgaatggcttggtggtgatagacatgaaggtaaaagacatgctgctgttcttgttttaagagaacttgctgtttctatgccaacatatttttttcaacaagtgacaccattttttgaactcatatttaatgcaatacgtgatccaaaacctgtgataagagaaggtgctgttgaagcattaagagctgctttagttgttactgcacagagggaaacagcaaagcaaatgcacaaatcacaatggtacaaacaatgttatgatgaaatagtaacaggattcgaggaaatatatactagagaaagaggagtaaatagggatgatagaatacatggttcactcttaatattaaatgaattattaagatgtagtaacattcaatgggaaaaaaattatgaagctttaatggaacgattaaattgttctactcaacaaaatgagaatgatatattgtcattaatgcctcgattaaaaacaacaatagtatctaaatggtctaattcttctcaaaattcgactaattctcaacagacattatatccatcacatgaatctgcagtatgtcgttgtttaatgcaagaacgattagatgatatatataatgatgtaatgaatcagagaatatctagaaatccacatattcaacatgctcttatgatattgttaccaagacttgcagcatttaataaagaaaaatttacaaaagatcatttaagagaatcactagcatatcttctaatgactttacgtagtagagaaaaagatagatatgctgcatttacaacaattggatttatagcagttgcagtagaagattcgataaatccttatctttcaaaaattatggaaatgatcaaaagtttattaccttctaaggaaacatctactaagaaacgtggagcatctttggagcctgcagtattcatttgtataactttacttggacatgcagtaaaacaagttatagctgcagatgtcagagatttgttagaatctatgttacagactggattaagtcctattcttacaacttctctcagagaactagctcatagtgttccatcattaaaacctgatatatctcaaggacttttacgaatgttatctcaagttttgatgcagaaacccttaagacatcctggtgcaccatggactgcaactagtcctatatctggtcctccaactgaagtggatattccatctacagttttagctttaaaaactctaggaacatttaattttgatggtaatccacttttgcaatttgtaaggcgatgtgctgatcattttcttacatctgaacaagcagaagttcgattagaggctgtaagaacatgttcaagattattacgattagcattaaatcaacctggacctacagtgactaatactgtctctactgttctcggaaaattattagttgtaggtataacagatacagatcctgatgtaagactttgggttttagcttctttggatgattcatttgatattcatttagcacaagcagaaaatctttctgcattatttattgcaatgaatgatgaaatgtttgaaataagagaattagcaattcgcacaatcggacgattaagcacaatgaatccagcatatgttatgccttctttacgtaaaacacttatacaatttttaactgaattagaacattcaggtatgggtcgtaacaaggaacaagctgcacgaatgttggatcatttagtagtcagtgcacctagacttattcgaccatatatggaacccattctaaaagttcttgttccaaaattaaaggagcctgaatcaaatcctggtgtaattttagctatattacgcgctattggtgatttagcagaagttaatggtgctgaaatgcaacaatggatgcctgaacttctctctatactacttgaaatgttagtcgacgcgagctctccagaaaaaagaggagttgctttatgggttcttggacaactagtgggaagtacaggacatgttgttaagccatatatgcaatatccttcattactagatgtattgataaatttcttaaaaacagaacaacaattaattattagaagagaaactataagagttcttggattattaggtgctttagatccttataaacataaaatgaaccttggtcagattgattctcaattggatacccttacttctatggctgatactaaaagtgaagctgaaaatacacaagatttaactactagtgaaatgttggtcaatatgtcctcttcaactttagaagaatattatccagccattgctattgcaactcttatgagaattattcgtgatccaacattatcacaacatcatactatggtagttcaagctgtaacttttatattcaaaagtttaggaattaaatgtgttccatatatttctcaagtgatgccaagttttcttaatgtagttcgtacagcagatgttaattttcgtgaatatctatttcaacaattggctattcttattgccattgtgaagcagcatattagaaactatttggatgatatatttaatttaattaaagaattttggacagtgaatagtccattacagagtactctgatacttttagttgagcacattgctattgctttgggtgcagagtttaagatttatttaccacagttaatgccacaaatattaagagttttaacacatgacacaagtaaagataaatcagtcacagtcaaacttcttcaagcacttcaaaaatttggaaataatctggataattatcttcatttagttttaccaccaattgtaaaattatttcatgctactgattgcccaataactgtaaataaagtagcgcttgaaacagttgatcatttagcagatacattagattttacagattttgcatccagaattgtgcatcctttagtacgaactctagatcaatgtccagagttacgaaatacagcaatggatacactatgtgcattggtgatacaattaggaaaaaaatatcaaatctttattttactagtacaaaaaattatgacgaaacataaaattgttaattcacgttatgaagttttaattgataaaattttgacagaaacaactgttgctgacggtgaggattatttattaatgagacatcgacattcaagaaacaaaaatcgtgacttatcgttaacatcatctgatacaactacgattaaaagattacacgtgtctgcctcaaatcttcaaaaagcctggactgcaacaagaagagtttcaaaagatgattggctggaatggctaagaagtttgtcgattggtttactcaaagaatcaccatcaccagcactaagatcatgttgggctcttgcacaaacttattccaaattacctagagatttatttaatgcagctttcgtttcttgttggaccgaattggacgatacttataaggcggaacttatacaaaccttacaacaagcattaatggttcctgatcttccagagataacacaaacaatcttaaatttagcggaatttatggaacattgtgacaaaggaccattacctttagacaataaaattttaggtgaaagagcaatgcattgtagagcttatgcaaaagcattacattataaagaagatgaatttcataagagcaggaatagtaatgtttttgaatctttaatctctattaataacaagcttcaacagaaagaagctgcagaaggtttactcgaatatgttatgaatcaaaataatcagcaagatctaaaagtgcaagttcgttggtacgaaaaactacataattgggataaagctttacaattatatagagaaagactagaaagcgattctacagatgtagagtcgactttaggtgaaatgcgttgtttggaagcccttggagaatggggacaattgcacgatgttgctaccaaacaatggtctcatcaaaatgatgaaactaaacaaagaatggctagaatggcagcagctgcagcatggggtttaaatcaatgggaaagtatggaaaaatatgtctctttaataccaaaagatactcaggatggtgccttttatagagctgttttagcaattcatgatgaacaatacaatattgcccatcaacttattgatagtgctagagatttgctagatacagaattgactgctatggctggtgaaagctatcaaagagcttataatgctatggtagaagtccaaaaattggcagaactagaggaagtgatacaatttaaattagtcccagaaagaagatccactattaaatccatgtggtgggaaaggcttcaaggtggacaaagaatagttgaagattggcaaaagattatacaggttcacacattggtggtttcacctcaagatgatatgtatacatggttgaaatatgccagtctttgcagaaaaagtggtagcttaatgttatgtcataaaacattagttatgttacttggaacagatccttcattaactcctgatcaggcattaccgaccactcatcctcaagtaacatttgcctattgtaaacatatgtgggtagcaaataaacgagaagaagcatacaatcaactgcaaagatttgtacagatgtctttacaaccgacaactctatcagtagtcaatcaagaagatgagaagcaacaggaaataagaaaaagattacttgccagatgttatttgaaacttggagaatggttagaagcattgcaaggcataaatgaacattctataccagctgtgctatcttattatgctgcagctacagaacatgattctacttggtacaaagcatggcatgcttttgcttatactaactttgaaacagttttattttataaacatcagcaaggtgactcaaatactgagaatattccaggaaatgggactcataataatctttctagttcacagtatatatctcaatttactgtaccagcagttgaaggattttttagatctattaatctttctcatggtaattctttgcaagatacacttcgtttattgaccttatggtttgattatggtcaatggccagaggtatatgaagctattgtcgaaggtatccgtttaattgaaatcaatacttggctacaagtaattccgcaacttatagcaagaatagacacaccccgagctttagttggtcgatgcatacatcatcttctaatagatattggaaaaacgcatccacaagctttggtttatcctttgactgtagcgtcgaaaagcgctagtcatgctagaaagactgccgccaataaaattcttaaaaatatgtgtgaacatagtccgacattagtacaacaagcaatgatggctagcgatgaattaattagagttgcaattctttggcatgaattatggcatgaaggattagaagaagctagcagattatacttcggcgaaagaaatgttcgaggaatgtttgatacattggaacctttacatgcaatgttagaaagaggtccacagactttgaaagaaacgtcctttaatcaagcttatggcagagatttaatggaagcacaagaatggtgccgcagatataaagcttcacgcaatgttcgagatttaaatcaagcttgggatttatattatcatgtttttagaaggatatctcgacaattaccacagttaactagtttagaacttcaatatgttagtcctaaattacttctttgtagggatttagaactggctgtaccgggaagttatagtccgggacagccaatagttagaatagcaagtatacatagttccatgcaagtaataaccagcaaacagcgaccgcgaaaattatgtataaaaggtagtaatggtaaagattatatgttccttttgaaaggacatgaagatctcagacaggatgaacgcgtaatgcagttatttggtctagtcaatactcttttattacatgatccagatacatttagaagaaatcttactattcaaaggtatgcggtaattccactatccacaaatagtggtttaattggttgggtaccgcattgtgatacattacatacacttatcagagattatagagaaaaaaaaaaaatactattaaatatagaacataaaataatgctaagaatggccccaggttatgatcatcttatgcttatgcaaaaagttgaagtatttgaacatgctcttgagcatacatatggtgatgatttatcgcgacttctttggttaaaatcaccatcaagcgaagtatggtttgatcgtaggacaaattatacacgttctcttgctgtaatgtctatggtgggctatatccttggtcttggtgatcgacatccatctaatttgatgttggatcgtttaagcgggaaaatattgcatatcgattttggagattgttttgaagtggccatgactcgagagaaatttcctgagaaaatcccatttcgattaacaagaatgttaatcaatgcgatggaagtaacgggaatcgagggcacatatagaagaacttgtgaatctgtaatgtcagtgttacatcgtaataaggatagtttaatggcagtattagaagcatttgtatacgatcctctattaaattggcgattaatggacaatgctgcattaaaaggtaaaagatctgatgctcagggaatgagtgctagcagtaatcaagagcagagcgatgcattagattctcttactgccacattaccaaagaaaggagtaccatgtagtgttgaaaatggaggtgatactaatcaaccagaggcattaaataaaaaagcccttgctattattacaagagtaagggataaattaacgggacgtgatttctctcatgaagaaacattgagtgttcaacgtcaagttgatcttttaattcaacaagctaccaataatgagaatttatgtcaatgttatattggatggtgtcccttttggtaa

SEQ ID NO: 2537 - protein, 2442 aa, Apis mellifera
MSSILVQQFVQRLKSRNEEIRNKAARDLCLYVKTELREVSQEEITAFMDEFNHHIFEMVSGSDVNEKKGGILAIVCLIGADVGNINTRTIRFANYLRNLLPSNDVGVMELAAKTVGKLALVSGTYTAEYVEFEVKRAFEWLGGDRHEGKRHAAVLVLRELAVSMPTYFFQQVTPFFELIFNAIRDPKPVIREGAVEALRAALVVTAQRETAKQMHKSQWYKQCYDEIVTGFEEIYTRERGVNRDDRIHGSLLILNELLRCSNIQWEKNYEALMERLNCSTQQNENDILSLMPRLKTTIVSKWSNSSQNSTNSQQTLYPSHESAVCRCLMQERLDDIYNDVMNQRISRNPHIQHALMILLPRLAAFNKEKFTKDHLRESLAYLLMTLRSREKDRYAAFTTIGFIAVAVEDSINPYLSKIMEMIKSLLPSKETSTKKRGASLEPAVFICITLLGHAVKQVIAADVRDLLESMLQTGLSPILTTSLRELAHSVPSLKPDISQGLLRMLSQVLMQKPLRHPGAPWTATSPISGPPTEVDIPSTVLALKTLGTFNFDGNPLLQFVRRCADHFLTSEQAEVRLEAVRTCSRLLRLALNQPGPTVTNTVSTVLGKLLVVGITDTDPDVRLWVLASLDDSFDIHLAQAENLSALFIAMNDEMFEIRELAIRTIGRLSTMNPAYVMPSLRKTLIQFLTELEHSGMGRNKEQAARMLDHLVVSAPRLIRPYMEPILKVLVPKLKEPESNPGVILAILRAIGDLAEVNGAEMQQWMPELLSILLEMLVDASSPEKRGVALWVLGQLVGSTGHVVKPYMQYPSLLDVLINFLKTEQQLIIRRETIRVLGLLGALDPYKHKMNLGQIDSQLDTLTSMADTKSEAENTQDLTTSEMLVNMSSSTLEEYYPAIAIATLMRIIRDPTLSQHHTMVVQAVTFIFKSLGIKCVPYISQVMPSFLNVVRTADVNFREYLFQQLAILIAIVKQHIRNYLDDIFNLIKEFWTVNSPLQSTLILLVEHIAIALGAEFKIYLPQLMPQILRVLTHDTSKDKSVTVKLLQALQKFGNNLDNYLHLVLPPIVKLFHATDCPITVNKVALETVDHLADTLDFTDFASRIVHPLVRTLDQCPELRNTAMDTLCALVIQLGKKYQIFILLVQKIMTKHKIVNSRYEVLIDKILTETTVADGEDYLLMRHRHSRNKNRDLSLTSSDTTTIKRLHVSASNLQKAWTATRRVSKDDWLEWLRSLSIGLLKESPSPALRSCWALAQTYSKLPRDLFNAAFVSCWTELDDTYKAELIQTLQQALMVPDLPEITQTILNLAEFMEHCDKGPLPLDNKILGERAMHCRAYAKALHYKEDEFHKSRNSNVFESLISINNKLQQKEAAEGLLEYVMNQNNQQDLKVQVRWYEKLHNWDKALQLYRERLESDSTDVESTLGEMRCLEALGEWGQLHDVATKQWSHQNDETKQRMARMAAAAAWGLNQWESMEKYVSLIPKDTQDGAFYRAVLAIHDEQYNIAHQLIDSARDLLDTELTAMAGESYQRAYNAMVEVQKLAELEEVIQFKLVPERRSTIKSMWWERLQGGQRIVEDWQKIIQVHTLVVSPQDDMYTWLKYASLCRKSGSLMLCHKTLVMLLGTDPSLTPDQALPTTHPQVTFAYCKHMWVANKREEAYNQLQRFVQMSLQPTTLSVVNQEDEKQQEIRKRLLARCYLKLGEWLEALQGINEHSIPAVLSYYAAATEHDSTWYKAWHAFAYTNFETVLFYKHQQGDSNTENIPGNGTHNNLSSSQYISQFTVPAVEGFFRSINLSHGNSLQDTLRLLTLWFDYGQWPEVYEAIVEGIRLIEINTWLQVIPQLIARIDTPRALVGRCIHHLLIDIGKTHPQALVYPLTVASKSASHARKTAANKILKNMCEHSPTLVQQAMMASDELIRVAILWHELWHEGLEEASRLYFGERNVRGMFDTLEPLHAMLERGPQTLKETSFNQAYGRDLMEAQEWCRRYKASRNVRDLNQAWDLYYHVFRRISRQLPQLTSLELQYVSPKLLLCRDLELAVPGSYSPGQPIVRIASIHSSMQVITSKQRPRKLCIKGSNGKDYMFLLKGHEDLRQDERVMQLFGLVNTLLLHDPDTFRRNLTIQRYAVIPLSTNSGLIGWVPHCDTLHTLIRDYREKKKILLNIEHKIMLRMAPGYDHLMLMQKVEVFEHALEHTYGDDLSRLLWLKSPSSEVWFDRRTNYTRSLAVMSMVGYILGLGDRHPSNLMLDRLSGKILHIDFGDCFEVAMTREKFPEKIPFRLTRMLINAMEVTGIEGTYRRTCESVMSVLHRNKDSLMAVLEAFVYDPLLNWRLMDNAALKGKRSDAQGMSASSNQEQSDALDSLTATLPKKGVPCSVENGGDTNQPEALNKKALAIITRVRDKLTGRDFSHEETLSVQRQVDLLIQQATNNENLCQCYIGWCPFW

SEQ ID NO: 2538 - DNA, 7116 bp, Aspergillus nidulans FGSC A4
  CDS (1)..(7116)
atggcgcaagcaggtccgatcacggacgtcacccagaggctcttcatcgagctgaagtctaagaacgaggaaacgcgggtccgagctgcttacgagctttacgaaaatgttcttgccatctcaagagactggcctcccgagaagttcattgaattctataacgccgttagtcaacgcatcgcccagcttgttgtcaccggcagtgatgcacacgaaaggatcggcggtctcctagctcttgaccgactaatagatttcgatggcgtggacaatgcgcagaagacaacgaggttcgccagctatttgcggagcgccctgcgcagcagcgataatgccgtacttgtctacgccgctcgggcacttggtcgcctggcgaagcccggtggtgcccttactgcagaattggttgagagtgaaatacagtcggcactggaatggcttcagtctgaacgacaagaaggtcgacggtttgctgcggtgctggttattcgggagctcgctaaagggtcgcccacgcttctttacgggttcgttcctcagatcttcgaactcatctgggttgctctgagagaccccaaggtacttatccgagagactgctgcagaagcagttcggcagctatggtttgcgagaatatacgaggaagcgctccagggcttgaagtcgaataatgtggactggatccatggatcactcttggttcttaaggaacttctcctcaaaggagccatgttcatgaatgaacattatcgaaatgcgtgtgaaatcgtgcttcgtctcaaggaccaccgagacccgaaaattcggacgcaagttgttctcacaattcccattcttgcctcctacgctccggttgatttcaccgaaacatacctgcatagattcatggtgtatcttcaagcccagctcaaaaaggacaaggagcgcaatgctgctttcatagctatcggaaagattgcaaatgcggtgggtgtagctattgcacaataccttgatggtatcattgtttacatccgcgaaggactggccctgaaagccaaaaatcgagctgccattaatgaagcgccaatgtttgagtgtattagtatgctctcgctggctgttgggcaggctctcagcaaatacatggaatcgctcctcgatcccatctttgcatgtggcttaagtgaatccctgacacaggctcttgttgatatggctcattatattccaccaatcaagcccacgattcaagtaaagctgctggatatgcttagcctgattcttgatgggacgccttttcgccccctaggttgtccggaaagcaggctacctccgctgccgtctttcgccaaagacttcaccctgcaagaactgcattctgacgctgaaattgcgctggctctccacaccctgggaagcttcgatttttctggtcatattttgaatgaatttgtgcgcgacgttgccattcactatgttgaaaacgacaaccctgaaattcggaaggctgcggctcttacctgctgccagctatttgtgcatgaccccattatcaatcagaccagcagccactcaatacaggttgttagcgaggtcatcgacaagctattgaccgttggtgtcggcgaccctgatcctgagattagacgcactgtgctatggtccttggatcgcaaatttgaccggcaccttgcacggccagaaaatatccgatgcctcttcttggccgtgaatgatgaagtgttcgctgtcagagaggcagcgatctgcataattggccgcctttccagtgtcaacccagcctacgtattccctcccctaaggaagttgctggtgaacttgctcactggacttgggttcgcaagcactgctcgccagaaggaagaaagtgcacagcttattagcctttttgtttcgaatgccacgaaacttatccggtcgtacgtcgaccctatggttacgactctgctaccgaaagcagttgatgccaatcacggcgtcgcctccacaacactgaaagctgtcggagaacttgcaagcgttgggggcagcgatatgaaagcctacctgcctaagctgatgccaatcgttctggatgccttgcaggacctttcatctcatgctaagagagaagcggctttgcgaacattgggccagatagccagcaactcaggctacgttatcgacccgtacaccgaccaccctcatctgctggcggtgcttattggtatcatcaagacggagcaggcaggatcgcttcgcaaggaaacgataaaagttctaggaattctaggtgcactggacccttataaataccagcaaataagcgaaaccgcaccagacgtccaccatatcaacgaagtacaagtggtgtcagacgttagtcttattatgcaaggccttgccccttccaatgaagagtactacccaactgttgttatccatactctcatgcagaacatacttcgcgagaactcccttgcgcaatatcattctgctgtcatcgacgcgattgttacgatctttaagacccttggcttgaagtgtgtccccttccttggccagatcattcctggtttcatttctgtcattcgaggttcaccctcaagccggctcgaatcttatttcaaccaaatggcaatccttgtcaatattgtgcggcagcacatcagagcctttcttcctgaaataattgaggtcattcgggaattctgggacacgtcatatcaggttcaagcgaccattctctcgcttgtggacgcgatagccaagtcccttgagggtgaatttaagaagtaccttgcaaatctcattcctccaatgctggacacactggaaaaggataatactccgcgccgccagccttccgagaggattttgcatagcttcttagtattcggctccagtggcgaagagtacatgcatctgattgtgccctccattgtgcgtctgtttgataggtcccagaacccagcgagcatcagaaagtcagctattgacagcttgaccaaactttcgcgacaagtgaatgtctccgattttgcgtccttgattgtacactccctttctcgagtcgttgccggcaacgaccgtatgttacgacaggctgctatggattgcatatgctctttgatattccagcttggccaggatttcaaccattatattcatctgctgaacaaggtcttgaagcatcatcaagtcaatcacgtgaactatcagatccttgtcacaaagctccagaaaggagacccgctcccacaggatctcaatcctgacgagagctatgccccattggcggatgacgcgaactatgcagagatcggtcaaaagaagatggtggtcaatcaacaacatcttaagaacgcctgggacgcttcgcaaaagtcgactcgcgaagactggcaagaatggatccggaggttcagtgtagagcttttgaaagaatcaccttcgccggcgctgcgtgcttgtgccagcctggcgggcatctaccaacccctcgctagggatctattcaatgccgctttcgtctcctgttggacggaattgtacgaccagtaccaggaagagctggttcggtcaatcgaaaaagccctcacctcgccgaacattccaccggaaattcttcagatcttgctcaatcttgctgagtttatggagcacgacgacaaggcgctgccgattgatatccgcactcttggaaaatatgctgccaaatgtcacgcgttcgcaaaggcgctccactacaaagaactcgagttcgagcaagatcagaactctggagctgtagaggcactcattactatcaacaatcagctccagcaatccgatgccgctattggtatccttcggaaggctcaggcgtatcgggatgttgaactgaaggagacctggtttgagaaacttcagcgatgggaagaagcccttgcagcttacaaacgtcgtgagaagattgaccccgactctttcggtatcacaatggggaaaatgcgctgtctacatgctcttggagaatggaaagtgttgtctgacctcgctcaggagaagtggaaccaggcctctctagaacaccggaaatcaatcgctcctctcgctgcggcagctgcatggggtcgcggtcaatgggagctgatggattcgtacctaggagttatgaaagaacaatctcctgaccgttcgttctttggggcaatactggcaattcatcgcaaccaatttgatgaagccattatgtacatcgaaaaggcccggaacggccttgacacggaactctcagcacttctcggagagtcatataaccgtgcctacaatgtagttgttcgcgttcaaatgcttgctgaactcgaggagatcatcacctacaaacagaatgttggtgatcccgagagacaagaggcaatgcgccagacctggaacaggcgacttctcggctgccagcagaatgtagaggtatggcagcgcatgctcaaggtcagagcacttgttacaacaccgcgagagaacctagacatgtggatcaagtttgccaatttgtgtcgcaaatcaaaccgcatggggttagcggaacgttctctcgcctctctagaaactgtcatccctgacggcaacggcggcactcgcactatctccccaccagaagtcacatatgctcgcttgaagtttagctgggcaactggccgccaacgcgaggcccttcatatgctccgtgaatttactgccaacctaacagaagacttcactcgcttcaatgcacttgttgcctcacaatctgaccataacggtatcaacggcgttaatggtatcgcagaaggaaaccataccgatatcatggcccttcgagagcgcgttggtgatgtcaacaagtttagaaagctccttgcaaagagttatctaagacttggtgagtggcaaacggctctacaacgaggggactggcggccagagcatgtccgcgaagtactcaacgcatattcagcagccaccaggtacaaccgcgattcctacaaagcctggcactcatgggccctggccaactttgaggtcgtgacgacaattgccagccaggcaagtaaggacggcggaaatctggcattggttccagggcatatcgtaacagaacatgtgattcctgcgattcgcggcttttttaggtccattgccctctcttcgacgtcgtctcttcaggatactcttcggttgctcactctctggttcaaccatggtggtgaccaggaggtgaactcggtcgttacagagggtttcacggctgttaatatcgacacgtggctcgccgtcactcctcagcttattgcccgcatcaatcagcccaacttcagggttcgcagcgccgttcatcgcttgcttgctgaagttggcaaggcacatccccaagccctcgtgtatccgctcacagttgcgatgaagtcgaatgttgcccgacgatcacagtccgcaggcaacattatggagagcatgcggacacacagtgcaaacctagtggagcaggctgatcttgtaagtcatgagctgattagggtcgctgttctgtggcacgaactctggcacgaaggactggaagaggcgtcacgtctctatttcggtgaccataacgtggatgggatgtttgcaactctcgcaccgcttcatgaaatgcttgataaaggtgctgaaaccctgcgcgaagtatcgtttgcccaagctttcggacgtgacctggctgaggccaagcattactgcatgctctatcgcgagacggaagaaatcggtgacctaaaccaagcgtgggatttgtattacacagtgttccgcaaaatcagccgacagctaccacagttatcaaccctagatctcaaatacgtctcgcccaaactcaaggattgcgtggaccttgatctcgctgttcctggtacctaccaaagtggcaggcccattatccgaatcatcagtttcgatccaatcctacatgttcttcaaacgaagaagcgaccacggaggatgactttgaagggcagtgacggcagctcctacatgtatgtggtgaagggccacgaagatatccgacaagatgagagagtcatgcagttattcggcctggtcaacactcttctcgataacgatagtgaaagcttcaagcggcatctaacggtgcagcgcttcccggccattcctctgtctcagaactctggtatcatcggctgggtcaccaatagtgacaccctccatgctttgataaaagaataccgggaaacgcggcgtattctcctcaacatcgagcataggatcatgttacagatggctccagactatgacaatctaacgctcatgcagaaggttgaagtatttggctatgcgatggacaacacaaccgggaaggatctgtaccgtgttctgtggttgaagagtaagagctccgaagcctggcttgagcgtcgtaccaactacactcgttcacttggagtcatgtccatggtcggctacatccttggtctaggtgaccgccacccgtccaatcttcttctggacagagtgaccggcaaagtggttcatattgactttggtgactgcttcgaagttgccatgcatcgtgaaaagtatccggagcgcgtgccattccgtttgacgcgtatgttgacgtttgcgatggaagtcagcaacattgaaggaagctaccggatcacttgtgaagctgtcatgcgggtgatacgtgagaacaaggactcgctgatggccgttctggaggcttttattcacgaccctctaatcaactggcgtctgggaattcgcgagtctcctgaccgaatgccatttaacgcggagcgtcgtcaatcgattgtctccaatgtcaacctcgagcacggcgtccaacccagcaacttctctcggcaccgtcggccttcaatccttgaaggtggtattctcgacgctcaagaaggggtgcctaatgaggcacgtgaggctcagaatgcaagagccttacaggtgcttgctcgggtgcgggagaagctgaccggccgggactttaagcctagcgaagagctcaatgttagcgatcaagttgacaagcttcttgcacaggcaactagtgttgagaacatctgtcagcattggattggatggtgcagtttctggtga

SEQ ID NO: 2539 - protein, 2371 aa, Aspergillus nidulans FGSC A4
MAQAGPITDVTQRLFIELKSKNEETRVRAAYELYENVLAISRDWPPEKFIEFYNAVSQRIAQLVVTGSDAHERIGGLLALDRLIDFDGVDNAQKTTRFASYLRSALRSSDNAVLVYAARALGRLAKPGGALTAELVESEIQSALEWLQSERQEGRRFAAVLVIRELAKGSPTLLYGFVPQIFELIWVALRDPKVLIRETAAEAVRQLWFARIYEEALQGLKSNNVDWIHGSLLVLKELLLKGAMFMNEHYRNACEIVLRLKDHRDPKIRTQVVLTIPILASYAPVDFTETYLHRFMVYLQAQLKKDKERNAAFIAIGKIANAVGVAIAQYLDGIIVYIREGLALKAKNRAAINEAPMFECISMLSLAVGQALSKYMESLLDPIFACGLSESLTQALVDMAHYIPPIKPTIQVKLLDMLSLILDGTPFRPLGCPESRLPPLPSFAKDFTLQELHSDAEIALALHTLGSFDFSGHILNEFVRDVAIHYVENDNPEIRKAAALTCCQLFVHDPIINQTSSHSIQVVSEVIDKLLTVGVGDPDPEIRRTVLWSLDRKFDRHLARPENIRCLFLAVNDEVFAVREAAICIIGRLSSVNPAYVFPPLRKLLVNLLTGLGFASTARQKEESAQLISLFVSNATKLIRSYVDPMVTTLLPKAVDANHGVASTTLKAVGELASVGGSDMKAYLPKLMPIVLDALQDLSSHAKREAALRTLGQIASNSGYVIDPYTDHPHLLAVLIGIIKTEQAGSLRKETIKVLGILGALDPYKYQQISETAPDVHHINEVQVVSDVSLIMQGLAPSNEEYYPTVVIHTLMQNILRENSLAQYHSAVIDAIVTIFKTLGLKCVPFLGQIIPGFISVIRGSPSSRLESYFNQMAILVNIVRQHIRAFLPEIIEVIREFWDTSYQVQATILSLVDAIAKSLEGEFKKYLANLIPPMLDTLEKDNTPRRQPSERILHSFLVFGSSGEEYMHLIVPSIVRLFDRSQNPASIRKSAIDSLTKLSRQVNVSDFASLIVHSLSRVVAGNDRMLRQAAMDCICSLIFQLGQDFNHYIHLLNKVLKHHQVNHVNYQILVTKLQKGDPLPQDLNPDESYAPLADDANYAEIGQKKMVVNQQHLKNAWDASQKSTREDWQEWIRRFSVELLKESPSPALRACASLAGIYQPLARDLFNAAFVSCWTELYDQYQEELVRSIEKALTSPNIPPEILQILLNLAEFMEHDDKALPIDIRTLGKYAAKCHAFAKALHYKELEFEQDQNSGAVEALITINNQLQQSDAAIGILRKAQAYRDVELKETWFEKLQRWEEALAAYKRREKIDPDSFGITMGKMRCLHALGEWKVLSDLAQEKWNQASLEHRKSIAPLAAAAAWGRGQWELMDSYLGVMKEQSPDRSFFGAILAIHRNQFDEAIMYIEKARNGLDTELSALLGESYNRAYNVVVRVQMLAELEEIITYKQNVGDPERQEAMRQTWNRRLLGCQQNVEVWQRMLKVRALVTTPRENLDMWIKFANLCRKSNRMGLAERSLASLETVIPDGNGGTRTISPPEVTYARLKFSWATGRQREALHMLREFTANLTEDFTRFNALVASQSDHNGINGVNGIAEGNHTDIMALRERVGDVNKFRKLLAKSYLRLGEWQTALQRGDWRPEHVREVLNAYSAATRYNRDSYKAWHSWALANFEVVTTIASQASKDGGNLALVPGHIVTEHVIPAIRGFFRSIALSSTSSLQDTLRLLTLWFNHGGDQEVNSVVTEGFTAVNIDTWLAVTPQLIARINQPNFRVRSAVHRLLAEVGKAHPQALVYPLTVAMKSNVARRSQSAGNIMESMRTHSANLVEQADLVSHELIRVAVLWHELWHEGLEEASRLYFGDHNVDGMFATLAPLHEMLDKGAETLREVSFAQAFGRDLAEAKHYCMLYRETEEIGDLNQAWDLYYTVFRKISRQLPQLSTLDLKYVSPKLKDCVDLDLAVPGTYQSGRPIIRIISFDPILHVLQTKKRPRRMTLKGSDGSSYMYVVKGHEDIRQDERVMQLFGLVNTLLDNDSESFKRHLTVQRFPAIPLSQNSGIIGWVTNSDTLHALIKEYRETRRILLNIEHRIMLQMAPDYDNLTLMQKVEVFGYAMDNTTGKDLYRVLWLKSKSSEAWLERRTNYTRSLGVMSMVGYILGLGDRHPSNLLLDRVTGKVVHIDFGDCFEVAMHREKYPERVPFRLTRMLTFAMEVSNIEGSYRITCEAVMRVIRENKDSLMAVLEAFIHDPLINWRLGIRESPDRMPFNAERRQSIVSNVNLEHGVQPSNFSRHRRPSILEGGILDAQEGVPNEAREAQNARALQVLARVREKLTGRDFKPSEELNVSDQVDKLLAQATSVENICQHWIGWCSFW

SEQ ID NO: 2540 - DNA, 7233 bp, Ustilago maydis 521
  CDS (1)..(7233)
atgtccgtccttggcacccatcagagcgatgcgctcaatcgcatctttgctggactcaagagcagagatgaggccacacgtcaagcagctggcgaagagctcaaatcgcacgtcgcactcgtcgtctcggaactcaagggtgacagcctctcctcgttcaacaacgatctacaccgcagaatcttcgaacttgcgcacagtcagcatgttcacgaaaagcttggtggtgtcattgccatcgaagacctcatcgaacaggaaagcgaggacaatagcgctcgtctctaccgcttctaccaatacctcaaacctaatttgccatgcaacgatgcttccgtcatgatcgccgcctcccgcgccttgggaagggtcgcctaccacggcggtcaatcgctcggagaacagtttatcgaatacgaagtgcttcgtgtgctcgatttcctccaagccggcgatcggaacgagtcgggacgatacgctgccgtgctcatcatccgtgaaatggcaaaaagggtgccgcagcagtttcatccctacgttcctcgtgtcctagaccgcatctgggttgctctccgagatgttcgtgtcatcgtcagagaaggggccgcagaagccatgggtgcctgtctcggcatcatcgctgcacgtgaaaagcagatgggcagtcattttttcgagtcaatctacgaagaggccgaaaagggcctcaagatgagcgcacccgaagccatccacggaagcctgctcgctgtacagcagctgctgcagcactcgaaaaccttcatgcgcaatcgcttccagcgcgcctgcgagctcgtcttccgtctgcacaagcatcgcgatcctctgatccgccgcaccatcaccaacctggtccccgtcctggcgcgctacgacccacactatttcgccgaggagcatctgcgagccgtcatgggcattctcacagagcaactacgaagagaaaaggaccgatcgcccaaggagtcagcacagacgtttgaaacaatcggctttgttgctgcagccatgggtcccaggatgaagcctttcatcgagccagtcctggcctgcgtcaaggagggcctgcagatgcgcggaaagaaaaacgccccacccgaaggccccatctttctctgtgtcggcaaccttgccaccgcagtgggtccacatctcacacgatacatgcacgacctcctcgacctcatgttctcttgtggcctcagcatcccgctcgtcacagcactcgatggcatcgtaaaggcaattccgccactcatgaaggtggtacaggatcgtctcttggacatgctttccatgacgctgattggacaaccctaccgcccgctcggagctcccgccagtcttcgcccctcggccaacgctagtcgcgatgtggttgccgctcaaaccgtcgaatccaagggtgtcgagaccataacggtcgcactgcagacgctgggcaggttcgacttccaaggccacattctcaacgaattcgtccgtaactgcacgctcccttacctcgaggatgaccatgctgccgtgcggcaagctgcggctgagacgtgcgccgacttgttcgtcaacgaccccatctgccgtcaaaccagcatgcacgccatcgaggtggtcaacgatgtgctcgacaagctcatgaccgtcggcattgctgatccagatccagaactccgatggacagtgctcagcaagtttggcgctcaggagcaatttgatcgccatcttgcccaatccgaatatgtccgttccctcttcatcgcgctcaacgacgaaaaattcaaggttcgcgaggtggccattgtcatcatcgggcgtctggcaaagcacaacccagcctacgtcatgccctccctccgcaaagcactcattcagctgctcaccgagcttgaatattcgacggtcagccggcacaaggaagaggctgctaagctgctgaccgaggtcgtccgtgcctcacaacgtctcgtcaagtcgtatgcgttgcccatgcttgaggtgctgttgcccaaagcaaacgatcccagcgtcggtgtcgcggccagagtcatggagtgtctcggtgaactcgccaaagtgggaggagaggatcttgcgccaaacgtcgatcagctcatgcgtcttgccatcgaccaactctcaagcaccgcacctggctcatccaccgcaaagcgggacgctgctctcaagacacttggtctcgtcgcttccaacactggccacgtcgtcaacccatacctcacgtatagaaacctgctcggcacggtcgtcaagatcctcaaaacagagcagtccaagcccgtccgtcgcgagacgatccgtgtcatgggcatccttggtgctctggatccatacagatacaagctgctcgagaagaacggcgacgagggtcaagacgagacatcaaagggaagcggcaccgacctctttgagcttgctttggcaatcggcacttcgaccgacgactactaccagaacatcgccattgatgcgctcatcaccatcctcaaggacccttcgctctcgacacatcatcatgccgtcatcgaggccatcatgtacatgttcaagacgcaaggtctcaagtgcgtcactttcctgcctcagatcattccagctttcctcaacgtgatccgcacctgtggcacgggcctgtccgaattctactttcagcagctagccattctcatctcgatcatcaagcagcacgtccgcagctacctggagcccatctttgagctggtccaggaaaattggaaccccaattcaagcatccagctcaccattgtctcgctcgtcgaggcggttgcgaaagcgcttgaaggcgagttcaaatcatatctgcctatcttgctgcccaacatgctccagacgctcgacggtgagataaccagcaagcgtcagcctacattgctccgtatcctgcaggccttctacgtctttggttcgaatatcgaggagtacttgcatctggtgctgccggtcgtcgtcaagatgttcgagcgcccggacgcgtcgcagacgcttcgacgtgctgctatcttgaccgtaggtaacttgtcgcgcaaagtcagcttctgcgaccatgcatcacgcgtaatccaccctctggtccgtgtgctgcctacggggactagcgacattcgcaacgccgtcatggagacattgtctgcgctcgtagtgcagctcggcgcttcgtacgccatctttattcccgtcgtcaataaggtgctgattcaaaatcgtatacagcatgcgacgtacgatcagctcgtctccaagctgctgaatggcgaacgcctgccgcaagacctgtctgcggctgacaatgcgttggggagcaagatcgacgagtcgccccaagccgaggctaacaagatgactgtcaaccagcaacatctcaagcaagcctgggatacgtccaaagtgtcgacgagcgaagactggcaagaatggctcagaaggatggcggtcgagttcatgcgcgaatcgccaagccatgccttgagggcctgcagaagtctagcagacgtttacccagcgttggcgtacggccttttcaacgtcgcctttgtttcgtgctggaccgagctgtacgagcagtatcagagcgatctagtcaaggcgcttgagacagcattcgatgcacctgaagtgcctggcgatgtggtgcacatgctactcaatctggccgagtttatggagcacgatgacaaggcgttgccaatcaacattcgcgtgcttggcgaccgcgcatacaagttccacagctatgcaaaggcgctccactacaaggaggccgagttcctcacagatccttcgccgcaggtcgtcgaaagtctcatcgatatcaacaccaagttgcagcagtccgatgcggcgttcggtgccctcacgtacgctcgggagcatctcgacatcacccatcacgaagagtggtacgagaagctgcaccgctgggaggaggccttgactgcgtacgaccgcaaagccatgctcgacccagacgactatggcgtcgcctttggcaagatgcgctgtctgcatgctttgggagaatgggagcacctatcggaccttgtgcagcagaaatggggcagagctgacatggaggaccgccgacatatggcgccgcttgccgcggctgccgcctggtcgctcggtcagtgggacaccatggacgactacatttcggccatgcgctccgactcatctgagcgctccttctaccgtgccatcctgcacacgcatcgttcgcaacgagccgcggccaacaagcagatcgccaaggctcgagagtcgctcgactcggagctcactgctctcatcagcgagagctatggccgtgcatacgacctcatggttcgtacacagatgctttccgagctcgaggaggcactggcatacaagctcgactacaaggagcagcctgaccgccaggcgaccattcgctccacgtggatgaagcgtctcaaaggctgccagcccgaggtagaggtgtggcagcgcatcctctctgtgcgttcgatcgtgctcactccggccgacgatacggaaacgtggatcaagtttgccaacttgtgccgcaagtccggacgcatggtgttggctgaaaagacgcttaactcgctgctgggcccggaacgtacgaatgctgatccacgatcgccgattggtcccagagcaccgcctccggtcatctacgcccacctgaaattcatgtgggcttctggagccagaattgagtcgcttagctatctgcaagagtttacgctcaatctcgctgaggatcttggggtccacactgtcgacgagcacggcaaccttgtcacgcaggactggcagtcgtcgccacatctcggcgagtttgcacgcctgctggcacgctgcttcttcaagcaaggcgaatggcagatgtcgttgcgcgagaactgggtcacggacgacaacagcaatgtgatcgagagctaccgcagagcgactgagctcgatcgaaactggtacaaggcatggcacgcttgggcgctggcgaacttcgaggtcatctcgcaccacgaggagaggaatgaacagatcactccgcagatgattgctgccagtatcgtgccttcggtgcagggcttcttccgctcgatcgcgttggcgagtggtaactcgttgcaagacacgctccgcctgcttaccctatggttcaagtatggtcatcaagaggacgtctcgcaggcggttagtgaagggtttgctagtgtcatcgtggatacgtggctcgaggtgattccgcagattattgcacgtatcactgcgccctctccacgagtgcgtcgcctgatccacaacttgctgtcggatgtcggtctggcgcatccgcaggcgcttgtctatcctctcacggtcgctgccaagagtccgagtcatatgcgtatccaggctgccatggggatcatggacaatgtgcgcgagcactcgcccgttctcgtcgagcaggcgttactggtgtcgaacgaattgatccgtgttgcgatcctgtggcatgagatgtggcacgaagggcttgaagaggcatcgcggctgtactttaccgaggacaacatcgacgccatgtttgccacactcgagccgctccacgacgcgttggaaaagggccccgagacccttcgcgagacttcatttgcccagacgcacggccgcgacctggcagaagcgagggaatgcggtcgacgcttccgccagtacggtgacatctcggatctcaatcaggcctgggatctgtactaccacgtctttaagaagatcgccaagcagctgccggcgggtaactcggtgcagctcgacctgcagtacgtctcaccgaagctgctggcaatgcgagacttggagctggcggttcccggtacgtatcaatccggaaagccgattgtatgcatcacgcgcttcgagcagatcgtgctcgtcattgcatcgaaacagcatcctcgtcgactcaagatgaagggttccgacggcaagacgtaccaatatctgctcaaaggtcacgaggacttgcgacaggacgaacgcgtcatgcaactgttcggtctggttaatacactgctctcgattgactcggagagctacaagcgtcgactcgagatccgtcggttccccgtgattccgctctcgcccaacacgggcatgttgggctgggtggaaaatacggatacgctgcacgtactcatcaaagagtatcgagaacagcacaagatcctgctcaacatcgagcatcgattgatgcttcagatggcgccggactacgaccacttgacgctcatgcagaaggtcgaggtgttcgagtatgcgttggacaacacgccggggcaagatctgtaccgagtgttgtggctcaagtcgcgcaattccgagtcgtggttggagcgacggttggcgtacacgcgttcgctggcggtgtcgtcggtcgcaggctacatcctgggtcttggagatcgacacccttcgaatctgttgctcgatcggttgaccggtcagattgtgcacattgatttcggcgattgcttcgagatcgcatgccatcgtcctaagtttcctgaaaaggtgccgttcagattgacgcgcatgctggtgaatgcgatggaagtgggcgggatcaaggggacattcaaggtaaccgcggagaacacgatgcgcgtgctgagggacaacaaggagagcgtgttggcgttgttggaggcgtttgttcatgatccattgatttcttggaggttggttgcggatgatggcgccgagagggcgcctgatgcgaaggagaatgaagctgtagccgccgaaggtggcgctgcttccggtacggcgacgggtgcagtcactggtgcggccaatgtcggcgcgggtggaactgtggctcccaaccaacgccaagaccaagcgctttatcctgcagctggtgcaccgggcggtggtatcgctctacctcccaccgccaccgccaccgccacggctgcagctgcagctgcacccaacgccgtccaagcgggtggccaggacatgcgcaaccaacgcgctctcgaagtcgtccgtcgcatccaaaacaagctcagcggcagagacttcaatcccgcagaaagcctcagcgtcgctgctcagatcgaacgcctcgtacaggacgccacgagcaaagagaatctgtgtgtcgccttcgtcggctggtgttccttctggtaa

SEQ ID NO: 2541 - protein, 2410 aa, Ustilago maydis 521
MSVLGTHQSDALNRIFAGLKSRDEATRQAAGEELKSHVALVVSELKGDSLSSFNNDLHRRIFELAHSQHVHEKLGGVIAIEDLIEQESEDNSARLYRFYQYLKPNLPCNDASVMIAASRALGRVAYHGGQSLGEQFIEYEVLRVLDFLQAGDRNESGRYAAVLIIREMAKRVPQQFHPYVPRVLDRIWVALRDVRVIVREGAAEAMGACLGIIAAREKQMGSHFFESIYEEAEKGLKMSAPEAIHGSLLAVQQLLQHSKTFMRNRFQRACELVFRLHKHRDPLIRRTITNLVPVLARYDPHYFAEEHLRAVMGILTEQLRREKDRSPKESAQTFETIGFVAAAMGPRMKPFIEPVLACVKEGLQMRGKKNAPPEGPIFLCVGNLATAVGPHLTRYMHDLLDLMFSCGLSIPLVTALDGIVKAIPPLMKVVQDRLLDMLSMTLIGQPYRPLGAPASLRPSANASRDVVAAQTVESKGVETITVALQTLGRFDFQGHILNEFVRNCTLPYLEDDHAAVRQAAAETCADLFVNDPICRQTSMHAIEVVNDVLDKLMTVGIADPDPELRWTVLSKFGAQEQFDRHLAQSEYVRSLFIALNDEKFKVREVAIVIIGRLAKHNPAYVMPSLRKALIQLLTELEYSTVSRHKEEAAKLLTEVVRASQRLVKSYALPMLEVLLPKANDPSVGVAARVMECLGELAKVGGEDLAPNVDQLMRLAIDQLSSTAPGSSTAKRDAALKTLGLVASNTGHVVNPYLTYRNLLGTVVKILKTEQSKPVRRETIRVMGILGALDPYRYKLLEKNGDEGQDETSKGSGTDLFELALAIGTSTDDYYQNIAIDALITILKDPSLSTHHHAVIEAIMYMFKTQGLKCVTFLPQIIPAFLNVIRTCGTGLSEFYFQQLAILISIIKQHVRSYLEPIFELVQENWNPNSSIQLTIVSLVEAVAKALEGEFKSYLPILLPNMLQTLDGEITSKRQPTLLRILQAFYVFGSNIEEYLHLVLPVVVKMFERPDASQTLRRAAILTVGNLSRKVSFCDHASRVIHPLVRVLPTGTSDIRNAVMETLSALVVQLGASYAIFIPVVNKVLIQNRIQHATYDQLVSKLLNGERLPQDLSAADNALGSKIDESPQAEANKMTVNQQHLKQAWDTSKVSTSEDWQEWLRRMAVEFMRESPSHALRACRSLADVYPALAYGLFNVAFVSCWTELYEQYQSDLVKALETAFDAPEVPGDVVHMLLNLAEFMEHDDKALPINIRVLGDRAYKFHSYAKALHYKEAEFLTDPSPQVVESLIDINTKLQQSDAAFGALTYAREHLDITHHEEWYEKLHRWEEALTAYDRKAMLDPDDYGVAFGKMRCLHALGEWEHLSDLVQQKWGRADMEDRRHMAPLAAAAAWSLGQWDTMDDYISAMRSDSSERSFYRAILHTHRSQRAAANKQIAKARESLDSELTALISESYGRAYDLMVRTQMLSELEEALAYKLDYKEQPDRQATIRSTWMKRLKGCQPEVEVWQRILSVRSIVLTPADDTETWIKFANLCRKSGRMVLAEKTLNSLLGPERTNADPRSPIGPRAPPPVIYAHLKFMWASGARIESLSYLQEFTLNLAEDLGVHTVDEHGNLVTQDWQSSPHLGEFARLLARCFFKQGEWQMSLRENWVTDDNSNVIESYRRATELDRNWYKAWHAWALANFEVISHHEERNEQITPQMIAASIVPSVQGFFRSIALASGNSLQDTLRLLTLWFKYGHQEDVSQAVSEGFASVIVDTWLEVIPQIIARITAPSPRVRRLIHNLLSDVGLAHPQALVYPLTVAAKSPSHMRIQAAMGIMDNVREHSPVLVEQALLVSNELIRVAILWHEMWHEGLEEASRLYFTEDNIDAMFATLEPLHDALEKGPETLRETSFAQTHGRDLAEARECGRRFRQYGDISDLNQAWDLYYHVFKKIAKQLPAGNSVQLDLQYVSPKLLAMRDLELAVPGTYQSGKPIVCITRFEQIVLVIASKQHPRRLKMKGSDGKTYQYLLKGHEDLRQDERVMQLFGLVNTLLSIDSESYKRRLEIRRFPVIPLSPNTGMLGWVENTDTLHVLIKEYREQHKILLNIEHRLMLQMAPDYDHLTLMQKVEVFEYALDNTPGQDLYRVLWLKSRNSESWLERRLAYTRSLAVSSVAGYILGLGDRHPSNLLLDRLTGQIVHIDFGDCFEIACHRPKFPEKVPFRLTRMLVNAMEVGGIKGTFKVTAENTMRVLRDNKESVLALLEAFVHDPLISWRLVADDGAERAPDAKENEAVAAEGGAASGTATGAVTGAANVGAGGTVAPNQRQDQALYPAAGAPGGGIALPPTATATATAAAAAAPNAVQAGGQDMRNQRALEVVRRIQNKLSGRDFNPAESLSVAAQIERLVQDATSKENLCVAFVGWCSFW

SEQ ID NO: 2542 - DNA, 7083 bp, Cryptococcus neoformans var. neoformans B-3501A
  CDS (1)..(7083)
atgtcttcacaatcagacgttctcgacaacatctttcagcgtctgtctgccaggtcggaggatgtccgcgctcaggccggtcaagatcttgcagagcacgtcgtagcttatacccaggaatacccgggacatgatgcttcgaagggtgtatgggcacaggtctttcacaagacattcgagtttactaggagcaacaatcagctagaaagattaggtgcaattatttccatctcgcaattgttacaactaacgaaggatgacacactggatcgtgctcaacaaaaggttctacgcctctatgaatatcttcggcctctcacaacatgcggcgattcgaccgtcatgcttcccgcctcgctcgtcgttgaagatatggtccgcaattcccccacccttcacaccgatactttccttggcaaagaagttggacaagcgctggtaatgattgacgactcacgtcaagaagtcggtcgtttcagtggtgctcttcttctctatgctttcgcccgtgctgcccccggagtattccatcaatacatccccaaggtcttggaaaagatttgggttccccttcgcgactcaagatctgtcgttcgagaacgtgcgagcatgctcttatctacctgccttgacactctcaaaacccgaggagaccgaccatcaaccgacacctaccgcaagatctttgaagaggcccgtcttggtctcctcaaagccagctcaacagagtctatcttgggttctctccttgctttcaattccatgcttcaaaatcaacagctttcgatggcggaatattatcgctccatttgcgaactaaccttcaaataccgtgattcgaaggaagtttccatcaggaaggctgtcatcgccctcataccttctatggcgacatatgatagcgacgactttgaggcacattatttgcataggagtatggcgtatttgctacaagcgttgaacaggccggcggacagggacatttcgtatgtggcattgggtcatatggccgtacatcttggatcgaaaatgaaaccttttattgacgacattatgcggatcattcgagatcatctacgcatgcgaggcaaaaaaaatgctccatacgaagcccccatcttccagtgtcttgcgatgctcgctacctctgtcggccctatgcttacccgccagatgcacgaaatcctcaacctgatgttcccctggggcctttcggaacccttatgtacagcccttcaagccactgcctcacatatccctcctctattgaggactatccaagataggttgttggagatgctttcacagactttgaccggacacagctatagaccgttaggtgcgcctgccccaagaggtggagcgcagatggatcttaaccttttgcaatctacaaccaatgcccagtcagcagacaccctaaaacttgctcttcgtctccttgcgcgctttgattttgtcggccatacccttagcgagtttgtccgtgacgctgctcttccgtatctggaacacgacagtgtcgaggtccgacgtgaagccgtgttggcgaccacgaccctgttcatgacggacccgatctgtcaacagacgagcagtaattcggtcgagattgtaaatgatgtgttgagtaaattgttaaccgtagccattaccgatcctaatgctggaatccgccggacagtgctcgatcacctcgaagacaagtttgatcgccatctcgctcaggctgacgatatccgatgtctctttatcgctctcaacgatgaagtttttggtaatcgtgagaggactatctcgatcattgggagattggcacaccataacccggcttatgtgatgcctcatttgagaaagagtttgatcaatattgtcactgagttggagtattctaccaatgcgcgacaaaaggaagagagtgccaagctgctctgtcttataatcggcgctgccgcaggtctcgtcaagtcttatgcccctaccatcctatccgttcttctccgcactgcttccagccccgattcttctatcggtgtccaagccgaatgcctcaaatgtattggtgagcttgccagagttgcgggcgaagaactcgtcccctccgtccgagccattctcgacctcgtcattgaaatgctcaatgaccaggcttcccccgccaagagagatactgccctcaagactttagggcagattgcgagtaacacaggagaagttatcaaaccctatacggattaccctcagttgatgggggtgctgtttaggtttttgagaatggaggcgaattcgagtgtcaggcaagagacgatcaagacgattggtatgctcggtgccttggatccctttaagcacaagactttgttgggtgatgtggacgaccctatcgacgaagggacaacctcgcgagtcaatgacattgtgttgctcaaccaacacaactcttcagtcaatgacgagttcttccagactgttgtcatccattctttagtcaacgtcttgcatgactctacttacaaggatcattatcaagccgtggaagcaattatgatgatttttaggactcaacgattgagatgtgtcaacttcctccctcagatcgtccctgcattcctcaatgtcattcgcattgcacattcctctcgtaccgagctttacctcaaacaacttgcgcaatttattacaatcgttaaactgcatatccgcaactacctcaatgatgtctttgatctaatccacgagttctggaaccccaactctactcttcaaattaccatcatctccctcgttgaggccatcgcgaaggctgtggaaggtgaattcaaggcatacttgcccaagcttttgcagcagattttgagatcgtttgatggagacttgtcagccaagcacctcccggagctgaaactcaacactttgcttcagattctgaaagccttctacgtctttggcgaatctatcgaagactacctccaccttgtcttgcccgtcattgttcgatcttttgagaacccggccgcccccgattctctccgcattgctgctttgcgcactacaggacagctttgtcgtaaagtcaacttttcggaccatgcgagtcagatcatccacccgttggtaagaactttgggtaatagctcagaggagttgaggcagactgcaatggaaacactttgcgttttggtgttgcagttcggcccagattatgctatcttcattcctatggtaaacaaagctttggtggaaaacaaaatatcacatcctggttacgaagcgctcataacccaattgctcaaccgcgagcgccttcctccagatcttggccctgtcgaacgatacgccagtgactctgccgtcgaagcctctgccccagagcctgttgctcttaaggtcaaccagcaggctcttaaactggcctgggactgttcccacttgcttaacaccagcagcaggaccgagtggatctcttggattattggcttgggtcatgagatgatgagagaaagccctagtcaagccataagggccgcaaggagtttggcgttgagtagtgtggccttcaccaaggaacttttcaatgttgctttctactcatgctggcaggagctgtttgagagttaccaggaggatttatggcataatcttgaccgagcaatcaagaaagatgatgtccccggcgatgttgtcaatatgattctcggggccactcagttcttggagcatgatgaaaaggaagtagctatcgaaagtcgtgttttgggcagtgtcgctgccaattatcaagctctcgcggtcgctttacattacaaagaacaggaattcttcctggaccctagcaaggaagtcatcgaagacctcattgacgtcaaccagaaactccagcaaagcgatgccgcctggggtacccttgaatgggctcagacagagatgggtatgactactgaggtcgagtggtacgaaaagcttggaaggtgggaggaagcgttacaagtgtggaacgagcgagatgccgatgcttcgaccactttctcagagtgggagatcactgaaggcaaggtcacttgtctgcacgctatgggcgaatgggaacaactctccgactttgtccaggctcgatgggccaacaggacggcagaggagaaaaagttgctctcgccgttagcggcagcagctagttggtcgctgaaacaatgggatctgatggacgattacatctccgccatgaagggcgacggagcggatcgcgcgttcttcaaggctatcttagctgtgcacagaaaccaaatccctgctgctttgaagcaaatctccaaggcgcgagaaaggctggatccagagttgactaccttaactggtgacagctacggccgagcgtacgatactgtcgtgaggattcaaatgcttgctgagcttgaggaaatcattgcctacaaggatcacgccgacgagcctgcccgacaggagatgcaacgacagacttggaagaagcgtttggctggatgtcagcgcgatgtcgaagtttggcagcgcattcttcaggtcagatcccttgtactcaagcctaatgaggatatggacacttggattgagtttgcggacctctgtcgaacatctgacaggctgaacttggccgagaaaacgctgacatctcttgttggcttccaatacccatcaatggaagacactcgaggacgagcaccacctcccatcattttcgcttacctacgtatggcctgggcgaagaaccttcaaatcgactctcgagaagaacgttacgaaactctccaacacttgcgagacttcacggaccagcttaccgacgatgttggtatcggagcgaggggccccaacggcagactcatgttacctgaccagaagttgtatggatcttacaccaagctgctggcgcagtgccatgttgaattgggtcagtggcaagcgactttgagggaaagccaaggatctgctgatccctcgggcattctccacgactattctctcgccactgaacttgaccctgagtggtaccaagcttggcacacttgggctttggccaatttcgaagttattacccagcttgaagtatcacagcaaggtctctcacctattcactttacgacctatatcatccctgctgtcgaaggtttcctcaagtctatctcgctttctcctggcaactccttgcaagatactttaaggctgctgactctctggtttacatatggatactctagcggagtgacagcggccgttagccaaggtctgcccactgtcaacattgatgtctggctcgaggtcatccctcagattattgcccgtatccaaacgccacgccagtctatacagcagctcattgtacagctcttgcatgatattggcaaagcccatcctcaagcccttatctaccctcttaccgtcgcctccaaatctacagtcgcagcccgacgcactgttgctcaaaatatcacccataaaatgcgagagcactctcccaagatcgttgaccaggccgagcttgtcagtactgagctcatccgagcggctatcttatggcatgagatgtggtatgatggtttggaagaagcgtcaaagcactactttggtgaccatgatatccctggcatgctgggagttcttgaacctttgcatgagattgtcgaaaacggaccccaaaccttgcgtgagacgtcctttattcaatcgttcgggcatgatttgcgtatcgcccgagagcatctcaagcgttaccgtataactcaggatgggaccgaaattcaacaagcatgggatgtctactactccgtcttccagcgtctcggcaaacagctcaagctcctgaacgtcattgagctgcaatatgtctcgcccaagttgatggccgttcgagacttggatattgctgttccaggtacctaccagagtggcaagcctatcatcggtattaagaacgttatcccgaccttcaaggtcattgcttccaagcaaaagccaagacaatgcagcatgcgcggtatggatggtaaagaatatgcgtactgcctcaagggtcacgaggacttgcgacaagacgagcgtgttatgcagctcttcggtttggtcaacactcttcttaataatgatcacgagtctgccaaacgacatctcagtatccagcgattttctgttactcctctttcccctagtgccggtttactcggttgggttacccacagtgataccatccacgtcctcatcaaacaataccgagaccaaaggaaaatcttggtggatattgagcacaaacttatgcagcagatgtctgatgagagctacgattctctgccgctcttgcacaaggtcgagatcttccagtatgccttggataacacaactggtcaggatttgtaccgcatcttgtggctcaagtctcgtaactcagatatctggcttgagagaaggaccacctacactagaagtctgggtctcaactcgatggtcgggtatatccttggcctgggtgacagacatccttcaaacctgttgctcgatcagattacgggtaagatggtgcacattgactttggtgattgtttcgaggttgctcaacagagagacaagtaccctgagaaagtaccgttccgacttacccgaatgctcattcatgccatggaggtctgcggtatcactggcaacttttcgcgaagctgtgaagtgtccatggaagtccttcgtgacaacagagaatcacttatggccgtgcttgaagcatttgtgtacgatcctcttattgcttggcgtcttacggcgacggacaaacgacctggtggcgttggcgaagtcaaggacctggatgacccggcggtgtacggaaagcagaggaaaaacaaggcgaacgagacagagattctcaatgatgtagaaaataccgaggtgaagaatgacaagggtctgcaggtcattgaacgagtacgacgaaaattgaccggtcgagattttaagcccgacgttgtactcgatgtcaagtcccaagtggagaaattggtggttgaggcgacaaagacagagaacctgtgtgtggcgttcttgggatggtgttccttctggtaa

SEQ ID NO: 2543 - protein, 2360 aa, Cryptococcus neoformans var. neoformans B-3501A
MSSQSDVLDNIFQRLSARSEDVRAQAGQDLAEHVVAYTQEYPGHDASKGVWAQVFHKTFEFTRSNNQLERLGAIISISQLLQLTKDDTLDRAQQKVLRLYEYLRPLTTCGDSTVMLPASLVVEDMVRNSPTLHTDTFLGKEVGQALVMIDDSRQEVGRFSGALLLYAFARAAPGVFHQYIPKVLEKIWVPLRDSRSVVRERASMLLSTCLDTLKTRGDRPSTDTYRKIFEEARLGLLKASSTESILGSLLAFNSMLQNQQLSMAEYYRSICELTFKYRDSKEVSIRKAVIALIPSMATYDSDDFEAHYLHRSMAYLLQALNRPADRDISYVALGHMAVHLGSKMKPFIDDIMRIIRDHLRMRGKKNAPYEAPIFQCLAMLATSVGPMLTRQMHEILNLMFPWGLSEPLCTALQATASHIPPLLRTIQDRLLEMLSQTLTGHSYRPLGAPAPRGGAQMDLNLLQSTTNAQSADTLKLALRLLARFDFVGHTLSEFVRDAALPYLEHDSVEVRREAVLATTTLFMTDPICQQTSSNSVEIVNDVLSKLLTVAITDPNAGIRRTVLDHLEDKFDRHLAQADDIRCLFIALNDEVFGNRERTISIIGRLAHHNPAYVMPHLRKSLINIVTELEYSTNARQKEESAKLLCLIIGAAAGLVKSYAPTILSVLLRTASSPDSSIGVQAECLKCIGELARVAGEELVPSVRAILDLVIEMLNDQASPAKRDTALKTLGQIASNTGEVIKPYTDYPQLMGVLFRFLRMEANSSVRQETIKTIGMLGALDPFKHKTLLGDVDDPIDEGTTSRVNDIVLLNQHNSSVNDEFFQTVVIHSLVNVLHDSTYKDHYQAVEAIMMIFRTQRLRCVNFLPQIVPAFLNVIRIAHSSRTELYLKQLAQFITIVKLHIRNYLNDVFDLIHEFWNPNSTLQITIISLVEAIAKAVEGEFKAYLPKLLQQILRSFDGDLSAKHLPELKLNTLLQILKAFYVFGESIEDYLHLVLPVIVRSFENPAAPDSLRIAALRTTGQLCRKVNFSDHASQIIHPLVRTLGNSSEELRQTAMETLCVLVLQFGPDYAIFIPMVNKALVENKISHPGYEALITQLLNRERLPPDLGPVERYASDSAVEASAPEPVALKVNQQALKLAWDCSHLLNTSSRTEWISWIIGLGHEMMRESPSQAIRAARSLALSSVAFTKELFNVAFYSCWQELFESYQEDLWHNLDRAIKKDDVPGDVVNMILGATQFLEHDEKEVAIESRVLGSVAANYQALAVALHYKEQEFFLDPSKEVIEDLIDVNQKLQQSDAAWGTLEWAQTEMGMTTEVEWYEKLGRWEEALQVWNERDADASTTFSEWEITEGKVTCLHAMGEWEQLSDFVQARWANRTAEEKKLLSPLAAAASWSLKQWDLMDDYISAMKGDGADRAFFKAILAVHRNQIPAALKQISKARERLDPELTTLTGDSYGRAYDTVVRIQMLAELEEIIAYKDHADEPARQEMQRQTWKKRLAGCQRDVEVWQRILQVRSLVLKPNEDMDTWIEFADLCRTSDRLNLAEKTLTSLVGFQYPSMEDTRGRAPPPIIFAYLRMAWAKNLQIDSREERYETLQHLRDFTDQLTDDVGIGARGPNGRLMLPDQKLYGSYTKLLAQCHVELGQWQATLRESQGSADPSGILHDYSLATELDPEWYQAWHTWALANFEVITQLEVSQQGLSPIHFTTYIIPAVEGFLKSISLSPGNSLQDTLRLLTLWFTYGYSSGVTAAVSQGLPTVNIDVWLEVIPQIIARIQTPRQSIQQLIVQLLHDIGKAHPQALIYPLTVASKSTVAARRTVAQNITHKMREHSPKIVDQAELVSTELIRAAILWHEMWYDGLEEASKHYFGDHDIPGMLGVLEPLHEIVENGPQTLRETSFIQSFGHDLRIAREHLKRYRITQDGTEIQQAWDVYYSVFQRLGKQLKLLNVIELQYVSPKLMAVRDLDIAVPGTYQSGKPIIGIKNVIPTFKVIASKQKPRQCSMRGMDGKEYAYCLKGHEDLRQDERVMQLFGLVNTLLNNDHESAKRHLSIQRFSVTPLSPSAGLLGWVTHSDTIHVLIKQYRDQRKILVDIEHKLMQQMSDESYDSLPLLHKVEIFQYALDNTTGQDLYRILWLKSRNSDIWLERRTTYTRSLGLNSMVGYILGLGDRHPSNLLLDQITGKMVHIDFGDCFEVAQQRDKYPEKVPFRLTRMLIHAMEVCGITGNFSRSCEVSMEVLRDNRESLMAVLEAFVYDPLIAWRLTATDKRPGGVGEVKDLDDPAVYGKQRKNKANETEILNDVENTEVKNDKGLQVIERVRRKLTGRDFKPDVVLDVKSQVEKLVVEATKTENLCVAFLGWCSFW

SEQ ID NO: 2544 - DNA, 7203 bp, Tribolium castaneum
  CDS (1)..(7203)
atgtccactttggccatgcaacaattcgttgcggggttgaaatcccgcaaccccgacgttcgtcaaaaaaccgcacgagaattaagcttgtacgtaaaaagcgagcttcgcgaagccacccccgacgaaataacaaacttccttgacgaattcaaccaccacatcttcgaaatggtctcgagcaacgaccccaacgagaaaaaaggcggaattttggcgattgtatgtttgattggagtcgatttcgggaacatgaccacacgtatatcacgcttcgccaattatttacgcaacttgttgccctcgagcgacgtgagcgtcatggagtcggtggcgaagacaatggggcgcttggcgctggtttcaggctcgaaagcctccgaatacgtcgagtttgaagttaagagggcctttgagtggctcagtggcgaccggattgaagggaagcgacaagctgccgttttagtcttgaaagagttggcactaactatgccgacgtatttctaccaacatgtgtcgcaatttttcgatctgatttttttcgcgatacaggaccccaaacctgccattagggagagcgctgtggaggctttgagggccgctttggtcgtcacagcgcaacgagagaccgccaaacagaaccaaaagccacaatggtacaaacaatgttacgacgaatccgtgaaaatgctctcggtggaaagaggcgaacgcatgaaagaggagcgcgtccacggctttctcctcattctcaacgaactggtgcgttgctcaaacgccgaatgggaacgcaaatgcaaaagtttgctcgaacgcactgacaccaaacaaccggtcgagaccagcttcaattttactaaatctcgcttcgttttttcggtctctcgacgcatcccccaataccaagctgtgtctttggcaccctctcaaatcgcaatcatagaatcccaaagttgccgaggcctcgtttccgagaaattcgactacatttgtttagacgtcctggctcagagactctcccgttcgtctcacatccaacaaagttttctcacgattttaccccgattggctgcttttgaccgcgaaaactacgtcaagcagcacttaagccccgtcatgaaccacatcttcaacattttgaagagtcgggaaaaggagagagctaaggcttttgtgactattggcttaattgcgatcgctgtcgagagcgacattgagccgtacattgaacgtattatggaaataattcgcatgtatttgccccgagccgatattttggggcgcaagcggagccccatcgactcctcaattttcaactgtgtcactttcctagcccacgccctcaaaaaccactcaaaaatggacatcccgaacctcctggaaccaatgctagcaacgggattaaccgcatccctcacgatatgtttccgggaattatcccgaaaagtcccggaacataaagaacgaatcagtctcgggttattaaaaatgctgagttatattctcctgaataaaccactagttcatcccgggatgccccgccacttgaccggaaccgtaatgagtcttgcaataccagaagtcaacgatgtgcaaatcatagttttggccctcaaaacactcggaacgtttgactttgagggccagagactcctcccttttgtccaccgctgcgccaatcatttcctcatccatgacaataacgaaatccgattggaggctgtcagaaccacgtgtcggctcctccgacatgctattcactccacagcgaaaaactcgtcggatacggtcaccaaaaccgtagctgctgttttacatcgtttgttaagtgttggtttgaccgataccgacccaaatgtccggtacggagtcttgatttcgctcgatcgtacgtttgataatcatttagcacaagctgagtcgctcagtgcgctgtttctggcgttgcaagacgaaatgtttgaaatacgcgaagttgcactgtttacaatcgggcgcttgagtgcgatgaatccggcatatgtcatgccctcgttgaggaaaactttagtgcagtttttatccgaattggaacattcgggcagtgggaggaataaggaacaaggggcgaggatgttagatcatttggttgtgagcgccccgaggatgataaggccctacatggagcccattttgaaggtcctggtgcccaaactgcgcgaccccgagccaaaccccggcgtcgtgctttccgtcctgctcacaatcggcgatttggccgaggtgagcagcggaggcaccgaactgcaagaatggatgcaagaactgatgggtattttactcgaaatgttgggcgacgcttccgcccccgaaaaacggggcgccgccttatgcaccttgggccagttggttggagtgaccggtcacgtaatccaaccctacaccgaatatccaatactgctcgacgtcctcctcaatttcctcaaaaccgaacaacagtcctacattcggcgagaaacaatccgcgttttggggctgttgggggctttggatccgtacaaacataaaataaatcggggggagattgattattatcccgaagcgcccgttttgataccgatgacggataaaggggaggatttgaacgcggatttgacgtcgagcgaaatgctggttaatatgagttcgagcactttggaggagtactatttggcgatagctatagccactttgatgcggattattaaggatccgacgctggcacaacaccatacaatggtggtgcaagcagttactttcatttttaaaagtttggggattaagtgtgtgccgtatatatcgcaagttttgcccagtcttttgcacgtagtacggacagccgacgttaactttaaggaattcctcttccaacagttggcacaactaatctacatcgtcaagcaacacattcgtaactacttggacgacatttgcctactaatcaaagaattttggaccccgaacagtacgattcaagggactttgatccttttagttgaacacatcgcagtggcgttgggggcgcaatttaaggtttatttaccgaaaatgttgccccatatcttacgcgtgttgaaccacgacacgtccaaggaacgactctacactatcaaattattggaagcgttacacaatttcggtaacaatttggacgaatatatgcacttgattttgccccccattgtccggttattcgacgctcaggagtgtccaatagtcgtgtcgaaaaaagccctcgagactatcgaccaattggccgaaattatcgacttttcggactttatctcacgcattgtccaccccttggttcgaacaattgataactgtcccgaattgagacccacagccatggaaactttatgttcactcatgcaacaattggggcgaaaattctcaattttcgtacctttggtacagaaagtgatgaccaaacataagatacaacacagtaaattcgatactttagtttcgaaaatccaatacgagacaacactggccgaagacgttgatttcccaatgccgagatccaaaacaaccgggaaaaatcgagacccagcgatgcctgccgatagtggaatgattcaaagactcaaagtttcggaatccaacctacaacaggcctggacccctgtccgaagagtctcgaaagacgattggttggaatggctaagacgcctcagtatcgaactattaaaacagtcaccaattccagcattacgttcgtgccttactttagcacagacgtattcgcaactgccacgtgatttattcaacgcagcgttcgtaagttgttggtccgaattgagcgaaaacatgcagaatgaactgatcagttgtctcgagcaagctttgactgtgccggacgttccggaaataactcaaactattttgaatttggccgaatttatggaacattgcgacaaggggcctttgcccctcgatagccacattctggggcaccatgcgatgcattgccgggcgtacgccaaagccttgcattataaggaagaggagtttcaaaggggggcgagcagtcaggttgtcgaagcactcatttcgatcaataataagttgcaacaaaaggaggcggctgaagggttgttacaatacgtcatgcagagggaaatgcaagtgcaggtcaggtggtacgagaagttgcacaattgggagaaggccctgaggttgtatactgagaaactggaaggggacgaggcggaccaagaggcttgtttgggcaaaatgagatgtctcgaagcgttgggcgaatggggcgaactgcaccaagtcgtcgagaaaagtttcagtttactaaatgacgacagcaaacaaaaggcgagtcggctagcggctgcggcctccttcggtttgcacgattacaggtcaatggaaacttacgttaatgtaattccaagggatacgcaagagggtgcgttctaccgtgcaattttggcaatacataaagaggattacgaagtggcccaaagattcatcgattcagctcgcgatttactcgataatgaattaactgcgatggctggtgagtcctaccaaagggcctacggggccatggtcatggtacaaatgttatccgagttggaagaagtaatgcagtatcggttagtaccagaacggaggcccactttaaaagccatgtggtggcaaaggctccaatcgggccaaaaactggtcgaagactggcaaagaatcatccaagtccattccttggtcttgaccccacaagaagacaaacgaacgtgggtgaaatacgcgtcattgtgtcgcaagagcggttcattaatgctatcgcaaaaaaccctagtcatgttactcggttacgacccaagcgaacgtcccgacgcccccttgcccaaaaaccagcctcacatcacactagcctacgccaaacatttatgggtggcacaggaaaaacaaaaagcgttccaaaaactatcacaattcgtcgctgactattcgcaaaacgagccaaacgacgacgtgacagttgaagagaaaaaaagactcctggctaggtgttacctcaaactgggggcctggcatgaggcacttgaaggcatcaacgaaacctccatacctttcattttgaagtgttacaaacaagcgactgaacacgaccctcaatggtacaaggcatggcacgcttgggcctatatgaatttcgaaacggtcttgtattacacgagacaggaggacaagacgcactatacagtcttagccgttcagggatttttcaaatcgattaatttatctaaaggaagttcattgcaagacactttacgtttattaacactgtggttcgattacggcgattggcccgaagtttacgatgccatagtcgaaggcattcgtttagtcgagaaaaacacgtggcttcaagtaattccgcaattaatcgcgcgaattgacacaacggcgttagtatcgaaattaatcaatcatctattggttgatattggaaaaacgcatccacaagccctagtctatccgttaaccgtcgcaacaaaaagtaattcaatcagacgtagaaatgcagctaatagtattttaaaatcgatgagtgaacattcccctacgttggtaagtcaggccatgatggcctcagaagaattgatccgagtggcaattttgtggcacgaaatctggcacgagggactagaagaagcctcaagattgtatttcggcgaacgtaacgttaaaggaatgttgcgaattctcgaaccgttgcatgcgatgatggaaagggggccccagacgttgaaagagacgagttttaatcagacgtacggcagggatctgaacgaggcgcaagactggtgccaaagatacaagctttcgagcaacattagagacctgaaccaggcgtgggacctctactaccacgttttccgccgcatttcgcgtcaattaccgcaactcacctccctcgaattacaatacgtatcgccaaatttgctagtttgtcaagacttagagttggcagtgcctggtagctactgtccaggacagccaatcgtacgcattgccaattttaaccgatctctcgaagtaattacctcaaaacagcggccccgaaaactagtaattcgtggaagcaacggcaaagactacatgtttttacttaaaggtcacgaggatctgagacaagacgagcgtgttatgcaactgttcggtttagttaatactttactaatgaaagacccggatacgttcaggcggaatttgacgatacagcggtatgcggtgattcccctgagtacgaattcgggtctgattgggtggttaccgcactgtgatacgctgcacactttaatacgggattatagagacaagaagaagattttgttgaatattgagcataggattatgttacggatggcgccggattatgatcatttaaccgtgatgcagaaaatggaagtttttgagcacgcacttgagcacacacatggtgacgatttagcgcggttgttgtggctgaaaagcccctcgtctgaggtttggtttgaccggagaacgaactacacgcggtctttagctgtgatgtcaatggttgggtatattttggggttgggggatcgccacccctccaatttaatgttggacagactgagcggcaaaatcctgcatatagatttcggcgattgcttcgaagtggcaatgactagggaaaaattcccggaaaagatccccttccgtttgactaggatgctaataaacgccatggaagtgacagggattgaaggcacgtacagacggacttgtgagtcggtcatgtccatgttacaccgaaataaagacagtctgatggcggtgcttgaagcctttgtttatgaccccctgcttaattggcgattgatggatattgaggtgcggaacttgccgatgaacagcgattcaatgtcgacgagttgttcccaaaaacagggctcatccgaatcgctcaatgttccgaaacgcgagatgataatggaagataacgaaccgcaacacgaagttaatgccagggcggttattatcatcaatcgagttagagataaactgaccgggaacgatttcgctacggaggaacctttgactattcctaagcaagtcgatctgttaatacaacaagcgacaagtaacgagaacttgtcacagtgttacataggctggtgccccttttggtaa

SEQ ID NO: 2545 - protein, 2400 aa, Tribolium castaneum
MSTLAMQQFVAGLKSRNPDVRQKTARELSLYVKSELREATPDEITNFLDEFNHHIFEMVSSNDPNEKKGGILAIVCLIGVDFGNMTTRISRFANYLRNLLPSSDVSVMESVAKTMGRLALVSGSKASEYVEFEVKRAFEWLSGDRIEGKRQAAVLVLKELALTMPTYFYQHVSQFFDLIFFAIQDPKPAIRESAVEALRAALVVTAQRETAKQNQKPQWYKQCYDESVKMLSVERGERMKEERVHGFLLILNELVRCSNAEWERKCKSLLERTDTKQPVETSFNFTKSRFVFSVSRRIPQYQAVSLAPSQIAIIESQSCRGLVSEKFDYICLDVLAQRLSRSSHIQQSFLTILPRLAAFDRENYVKQHLSPVMNHIFNILKSREKERAKAFVTIGLIAIAVESDIEPYIERIMEIIRMYLPRADILGRKRSPIDSSIFNCVTFLAHALKNHSKMDIPNLLEPMLATGLTASLTICFRELSRKVPEHKERISLGLLKMLSYILLNKPLVHPGMPRHLTGTVMSLAIPEVNDVQIIVLALKTLGTFDFEGQRLLPFVHRCANHFLIHDNNEIRLEAVRTTCRLLRHAIHSTAKNSSDTVTKTVAAVLHRLLSVGLTDTDPNVRYGVLISLDRTFDNHLAQAESLSALFLALQDEMFEIREVALFTIGRLSAMNPAYVMPSLRKTLVQFLSELEHSGSGRNKEQGARMLDHLVVSAPRMIRPYMEPILKVLVPKLRDPEPNPGVVLSVLLTIGDLAEVSSGGTELQEWMQELMGILLEMLGDASAPEKRGAALCTLGQLVGVTGHVIQPYTEYPILLDVLLNFLKTEQQSYIRRETIRVLGLLGALDPYKHKINRGEIDYYPEAPVLIPMTDKGEDLNADLTSSEMLVNMSSSTLEEYYLAIAIATLMRIIKDPTLAQHHTMVVQAVTFIFKSLGIKCVPYISQVLPSLLHVVRTADVNFKEFLFQQLAQLIYIVKQHIRNYLDDICLLIKEFWTPNSTIQGTLILLVEHIAVALGAQFKVYLPKMLPHILRVLNHDTSKERLYTIKLLEALHNFGNNLDEYMHLILPPIVRLFDAQECPIVVSKKALETIDQLAEIIDFSDFISRIVHPLVRTIDNCPELRPTAMETLCSLMQQLGRKFSIFVPLVQKVMTKHKIQHSKFDTLVSKIQYETTLAEDVDFPMPRSKTTGKNRDPAMPADSGMIQRLKVSESNLQQAWTPVRRVSKDDWLEWLRRLSIELLKQSPIPALRSCLTLAQTYSQLPRDLFNAAFVSCWSELSENMQNELISCLEQALTVPDVPEITQTILNLAEFMEHCDKGPLPLDSHILGHHAMHCRAYAKALHYKEEEFQRGASSQVVEALISINNKLQQKEAAEGLLQYVMQREMQVQVRWYEKLHNWEKALRLYTEKLEGDEADQEACLGKMRCLEALGEWGELHQVVEKSFSLLNDDSKQKASRLAAAASFGLHDYRSMETYVNVIPRDTQEGAFYRAILAIHKEDYEVAQRFIDSARDLLDNELTAMAGESYQRAYGAMVMVQMLSELEEVMQYRLVPERRPTLKAMWWQRLQSGQKLVEDWQRIIQVHSLVLTPQEDKRTWVKYASLCRKSGSLMLSQKTLVMLLGYDPSERPDAPLPKNQPHITLAYAKHLWVAQEKQKAFQKLSQFVADYSQNEPNDDVTVEEKKRLLARCYLKLGAWHEALEGINETSIPFILKCYKQATEHDPQWYKAWHAWAYMNFETVLYYTRQEDKTHYTVLAVQGFFKSINLSKGSSLQDTLRLLTLWFDYGDWPEVYDAIVEGIRLVEKNTWLQVIPQLIARIDTTALVSKLINHLLVDIGKTHPQALVYPLTVATKSNSIRRRNAANSILKSMSEHSPTLVSQAMMASEELIRVAILWHEIWHEGLEEASRLYFGERNVKGMLRILEPLHAMMERGPQTLKETSFNQTYGRDLNEAQDWCQRYKLSSNIRDLNQAWDLYYHVFRRISRQLPQLTSLELQYVSPNLLVCQDLELAVPGSYCPGQPIVRIANFNRSLEVITSKQRPRKLVIRGSNGKDYMFLLKGHEDLRQDERVMQLFGLVNTLLMKDPDTFRRNLTIQRYAVIPLSTNSGLIGWLPHCDTLHTLIRDYRDKKKILLNIEHRIMLRMAPDYDHLTVMQKMEVFEHALEHTHGDDLARLLWLKSPSSEVWFDRRTNYTRSLAVMSMVGYILGLGDRHPSNLMLDRLSGKILHIDFGDCFEVAMTREKFPEKIPFRLTRMLINAMEVTGIEGTYRRTCESVMSMLHRNKDSLMAVLEAFVYDPLLNWRLMDIEVRNLPMNSDSMSTSCSQKQGSSESLNVPKREMIMEDNEPQHEVNARAVIIINRVRDKLTGNDFATEEPLTIPKQVDLLIQQATSNENLSQCYIGWCPFW

SEQ ID NO: 2546 - DNA, 7494 bp, Oryza sativa subsp
  CDS (1)..(7494)
atgaagccctcgccgcacttcccggagatcgggaagaagcccaaagatttgatagccaaggaacacgggttcaacatcgcggcgtacatctcgtcgggagcggatgttattgctgccgccctaagaaaacatgttgaggaagaagctcgagatctgagtggcgaggcttttctgagatttatggaacagctctatgaacagatatgtagtctcttgcaaagcaacgatgttgctgaaaatttacttgctcttcgtgctattgatgctttgatcgatatgcctttcggagaaggtgcttcaaaggtttctaagttcgcaaatttcttgcgaactgtttttgaagtcaagcgtgatcctgaagttctagttccagcaagcgcagtgcttggccatttagcaaaagctggcggtgcaatgactgcagatgaggtggagcgtcagattaaaacggctttaggatggcttggtggggatcgagtggagtatcgccgctttgcttctgtccttattctcaaagagatggctgaaaatgcatcaacagttttcaatgttcatgttcctgaatttgttgatgctatatgggtagcactgagagatcccaaacaggctgttcgtgagcgagcagtggaagcattgcgtgcctgtctccatgttattgaaaaacgtgagacacgttggcgtgtgcaatggtattaccgcatgtgtgaagcagcacaggttggtcttggaaaaaatgcctctgttcatagcattcatggctcgctattggctgttggagaattattgaggaatactggggagtttatgatgtctaggtacagagaagtggctgatatagtcctcaattacctaagacaccgggatcagcttgttcgtcgtagtataacttcgcttcttcctcgaattgctcacttcctgcgtgacagatttgtgaccaactacttaaagatttgcatggatcatatcttgtttgttttacgtacaccggatgagcgtgctagtggctttgttgctcttggagagatggctggcgctcttggtgctgaacttgtgccctatttgcctttaattacctcacacttgcatgatgcgattgctcctcgtaggggacgcccatctcttgaggcaatttcttgtgtgggaagtttcgcaaaagctatgggtcctgcaatggaacctcatatacgtggtggactactagatgcgatgttttctgctggtctttctgataaacttgtagaggcacttgagtctataagtaccagcatcccatctctactgccaacaatacaggaacgattgttggattgtatatctcaagcactgccaaagtcatccgtgaggcctggtgctgctgttggccgaggaagcagatcaagcagtttgcagcagtttgtggattctggtggtccagttcttgtgcagcttgcattggggactctagcaaatttcaactttaagggtcatgagcttctggaatttgctagagagagtgtcatcctttatctggaagatgaggattgcagtacccgtaaagctgctgcaacatgctgctgcaaactagttgcgcattccctttcagcttcgtctagctcacagtttagctcaaaccggccaaatcgtatgggaggagctaagcgtcgccgccttgtagaagagattgtggagaaacttcttatggctgcagttgctgatgctgatgttggtgttagaagttctgtattcaaggctctatatcggaatccatcttttgatgattttttggcccaagctgacatcatgacttcaatttttgttgccttaaatgatgaggagtaccatgtcagagaattggcaatatcagttgcaggtagattgtctgaaaaaaatcctgcttatgtactgcctgcccttcgccgttatcttatacagttgctcacatatcttgaccaaagtatggatagcaagtgtagagaggaaagtgctagattgttgggttgcttaattaggagttgtgcacgactcattcttccttatattgctccaattcacaaggcactagtggctaggttacgtgaaggaacaggaccgaatgctaataatgcgcttgcagcaggagtgcttgctactgttggagagttggccaaagtgggtggttttgcaatgaggcaatatcttcctgagctaatgcctctagttgtggatgctcttttggatggaggtgctgttagtaaaagggaagtggcagtagcaacccttggacaagttatccaaagcacaggctatgttatctctccttataatgagtatcctccattgcttggtttactcttgaaattgctgaatggcgaattggaatggtctactagactggaagtgctgaaggttttaggtattatgggtgcattggacccgcacgcacataagcgtaatcaacataagctacctggtcaacatagggaggtcttgcggccaacgatggaaacagcacaacatattgtttccatggaagaactgccaactgatttctggccatccttttcagcatctgaggactattattcaacagttgcaattagttctctcatgcggattcttcatgatccttccctttcaagttatcatcagatggtggttggctctcttatatttatttttaagtcgatgggacttggctgtgttccatatttaccaaaggttctccctgagctattccgcgctgttcgcatgtgtgaggatggtggtttgaaagagttcattacctggaagcttgggacattggtatctattgttcgacaggttcttcaccttgttgaacaactatgcttggcactgaatgacgaattcagaatgtatatacttcacatattgccaagttgtattcaagtcctgggtgatgctgaacgctgcaatgactattactatgttcctgacatattgcacaccctagaggtgtttggaggaaatttggatgagcacatgcacttggttgctccagtacttgttcggttatttaaagtggagctagttgatatcagacgccgtgccattgtcactttgactaaactcatacctacggtgcagttgtgcatcaccagattgttaatttgtctttctgtggctagaaacaatgatgatctacggaaagatgcagcagaggcgctttgttgtcttgcacatgctcttggagaagattttacaatattcgtgtcatcaatacacaagcttcttgtgaagcaccatatgcggtatagaaaatgggatgagattgaaaatcgattactaaggcgagagccactcatctctgagaacttatcagtacaaaagtacacacaatgcccgcctgaagtcattagtgaccctcttgatgattttggtggtgttccttctgaggaggctgatgaaacacagcggcaaccaagaagtcatcaagtcaatgatgttcgactgagaagtgccggtgaggcttctcaaaggagcactagagaagattgggctgaatggatgaggcacttcagtattgcgcttctcaaagaatcaccatctcctgctttacgcacttgcgcaagactagcacaacttcagccttctgttggtcgtgagttgtttgctgcgggctttgcaagttgctgggcccaaatgaatgaaacatcccaggagcaacttgtgagaagtctcaagactgcattctcatctcagaacatacctccagaaattcttgccacactgctgaacttggcagagtttatggaacatgatgagaagccgcttccaattgatacaagactgctcggtgcacttgctgaaaagtgtcgagcatttgcaaaagcactgcattataaagaaatggagtttgaagctgtatgttccaagaagatgggtgcaaatcctgttactgttgttgaatctcttattcatattaacaaccaattacaccagcatgaggcagctattgggatattgacttactcacaacaacatttagaagttcaattgaaggagtcctggtacgaaaaattgcaccgttgggatgaggccttgaaggcatacaaagcaaagtcatctcaagcatctgggccattacaaaacttggatgctacattagatctactcttagggacaagattataccacacgctgtttcttggttcactagagaggctgttcaagacgaggattatggggcttcttgggtggatgatgaagaagaggatgacgacgacgatgaatatagtgatgaagaagcataaggcattcaagtgtcgtttgttctactgggctgttagagaaacattgatcccaattgttaacaatttccaagacaagctcatccctgaatcaaaacttacactgacactcatggctgccaatgctgcttggcatatgggtgagtgggaccacatggctgaatatgtttctcgtctggatgatggggatgaaaacaagctccggatattgggtaacacaacagctagtggtgacggaagcagcaatggtgctttctttagggctgttctttcagttcgttgcaaaaagtatgaagaagctcgtgtatatgttgagagagctcggcggtgtttggctacagaacttgcagcattggtacttgagagttatgagcgtgcttataataatatggtgcgggttcaacagctttctgagctggaagaggtgattgattactgcactcttccaatggaaagtccaatagctgacagccggagggaacttatccgtaatatgtggaatgagcgtattaaaggaacaaaacggaatgttgaggtgtggcaagccttacttgctgttagagagttggttctccctcctaatgaagacagagacacctggataaaatttgccaaactttgctggaagagtggccgcattagtcaggctaaatctaccttagtcaaactcttacagtttgatccagaatcttcccctgaattgacgctgtatcatggacatcctcaagtagtcctggcatacctgaagtaccagtatgctgttggagatgagcttaaacgaagggacgcgttttgcaggctacaggatttgtctgtgcagcttgctaccgcaacaaatagttattctggaacattagcaagccaggttgccacatcaaatgctggagtaccacttattgctcgcgtctatttgacacttgctagctggaagagagcattatcacctgggttagacgatgattctattcaagaaatattggtctcttacaaaaatgccacacttaatgccaaggactggggcaaggcatggcacttatgggccttgttcaacactgaagtcatgtcccgctatactttgcgtggtcgaccagatattgcaggaaaatatgttgttgcagcagtaactgggtatttctactctattgcttgcgcatccacgacaaaaggtgttgatgatagcttacaggatatccttcgtctcttgactctttggtttaatcatggggctacctcagaggttcaaatggcactgcagaaaggcttttcacttgtcaatatagaaatgtggttggttgtccttccccagataattgcaaggatccattcaaataataaaatagtgagagaactgatacagtcattgctggttcgaattggaaaggatcatccacaggacatgtcatctattaaaaggaataacctagagaaaatattaaaaattgaaggaactgaatttatagcacaggcattgatgtatcctctgttggttgcttgcaaatcaataagcatattaagacaacgagcggcgcaagaggtcgtcgataagatccgccaacatagtggaggtcttgttgatcaggcacagcttgtttcaaaggaactgatacgagttgccattctgtggcatgagatgtggcatgaggctcttgaggaagctagcaggatgtattttggtgagcacaatattgagggaatgcttgcagtgcttgaaccattgcatgcaatgctcgagaggggtcctgagacaataaaagaaaatactttcattcaggcttatggtcatgaattactggaagcccacgaatgctgtttaaaatatcgggctacaggagaggatgctgagttaactaaggcatgggatttgtattaccatgttttcagaagaatagacaaacagcttccaagtcttacaactttggatttgcactctgtgtcacccgagcttcttgagtgtcgaaagttggagcttgctgtaccaggaacttattctgcagatgcaccacttgtgacaattgagtattttgttcctcaattgattgttataacatctaaacaaagaccaagaaaactgacaattcatggaagtgatggcaacgattatgcattcttgctgaaaggccatgaagatttacggcaggatgagcgtgtaatgcagctttttggcctggtgaatactctgctggagaactctaggaaaacttcagagaaagatctgtcaatccaaagatatgctgtcatacctttgtctcctaacagtggtttaattggatgggttccaaattgtgacacacttcatgccctgatccgtgaatatagagatgccaggaagattttcttaaatcaggagcaccgatgtatgttgagttttgcacctgattatgaccacttacccctcatcgccaaagtagaagtatttcagcatgccctagaaaacagtgaaggaaatgaccttgcaaaggttctctggcttaaaagccgaacctctgaagtatggcttgagcggcgcacaaattatacgagaagtctggctgttatgagcatggttggctatttgcttggtttaggagatcggcatccaagtaatcttatgttagatcgttatagtggaaaaatattacatattgactttggcgattgctttgaggcttcaatgaatcgtgaaaagtttcccgaaaaggttccatttcgcttgactagaatgcttgtgaaagccatggaagttagtggtattgagggtaccttcagaaccacttgcgaaaatgtgatgcaagtacttcgaacaaacaaggatagcgttatggctatgatggaggcatttgtgcatgacccattaatcaattggcgtctgttcaatttcaatgaagtccctcaagttacaaactatggaaatgctcacagtcacacagttgtcaatagcgaagaagctgctaatcgggagctcatgcaaccaccccggggagctcgggagagagaactgctacaggcggtcaatcaactcggtgatgctaacgaggttttgaatgagcgtgccgtagctgtgatggcacgaatgagtcataagctcacagggcgcgatttctcttccggatcatcgttgtcgggggcgggaagctccacccaacatggtaacgagcatctggcttcaggagacactcgagaggtggaacctggtttatccgtgaaggttcaggttcagaggcttatacttcaagcgacttcgcatgaaaacttgtgccaaaactacgtcgggtggtgcccgttttggtga

SEQ ID NO: 2547 - protein, 2497 aa, Oryza sativa subsp
MKPSPHFPEIGKKPKDLIAKEHGFNIAAYISSGADVIAAALRKHVEEEARDLSGEAFLRFMEQLYEQICSLLQSNDVAENLLALRAIDALIDMPFGEGASKVSKFANFLRTVFEVKRDPEVLVPASAVLGHLAKAGGAMTADEVERQIKTALGWLGGDRVEYRRFASVLILKEMAENASTVFNVHVPEFVDAIWVALRDPKQAVRERAVEALRACLHVIEKRETRWRVQWYYRMCEAAQVGLGKNASVHSIHGSLLAVGELLRNTGEFMMSRYREVADIVLNYLRHRDQLVRRSITSLLPRIAHFLRDRFVTNYLKICMDHILFVLRTPDERASGFVALGEMAGALGAELVPYLPLITSHLHDAIAPRRGRPSLEAISCVGSFAKAMGPAMEPHIRGGLLDAMFSAGLSDKLVEALESISTSIPSLLPTIQERLLDCISQALPKSSVRPGAAVGRGSRSSSLQQFVDSGGPVLVQLALGTLANFNFKGHELLEFARESVILYLEDEDCSTRKAAATCCCKLVAHSLSASSSSQFSSNRPNRMGGAKRRRLVEEIVEKLLMAAVADADVGVRSSVFKALYRNPSFDDFLAQADIMTSIFVALNDEEYHVRELAISVAGRLSEKNPAYVLPALRRYLIQLLTYLDQSMDSKCREESARLLGCLIRSCARLILPYIAPIHKALVARLREGTGPNANNALAAGVLATVGELAKVGGFAMRQYLPELMPLVVDALLDGGAVSKREVAVATLGQVIQSTGYVISPYNEYPPLLGLLLKLLNGELEWSTRLEVLKVLGIMGALDPHAHKRNQHKLPGQHREVLRPTMETAQHIVSMEELPTDFWPSFSASEDYYSTVAISSLMRILHDPSLSSYHQMVVGSLIFIFKSMGLGCVPYLPKVLPELFRAVRMCEDGGLKEFITWKLGTLVSIVRQVLHLVEQLCLALNDEFRMYILHILPSCIQVLGDAERCNDYYYVPDILHTLEVFGGNLDEHMHLVAPVLVRLFKVELVDIRRRAIVTLTKLIPTVQLCITRLLICLSVARNNDDLRKDAAEALCCLAHALGEDFTIFVSSIHKLLVKHHMRYRKWDEIENRLLRREPLISENLSVQKYTQCPPEVISDPLDDFGGVPSEEADETQRQPRSHQVNDVRLRSAGEASQRSTREDWAEWMRHFSIALLKESPSPALRTCARLAQLQPSVGRELFAAGFASCWAQMNETSQEQLVRSLKTAFSSQNIPPEILATLLNLAEFMEHDEKPLPIDTRLLGALAEKCRAFAKALHYKEMEFEAVCSKKMGANPVTVVESLIHINNQLHQHEAAIGILTYSQQHLEVQLKESWYEKLHRWDEALKAYKAKSSQASGPLQNLDATLDLLLGTRLYHTLFLGSLERLFKTRIMGLLGWMMKKRMTTTMNIVMKKHKAFKCRLFYWAVRETLIPIVNNFQDKLIPESKLTLTLMAANAAWHMGEWDHMAEYVSRLDDGDENKLRILGNTTASGDGSSNGAFFRAVLSVRCKKYEEARVYVERARRCLATELAALVLESYERAYNNMVRVQQLSELEEVIDYCTLPMESPIADSRRELIRNMWNERIKGTKRNVEVWQALLAVRELVLPPNEDRDTWIKFAKLCWKSGRISQAKSTLVKLLQFDPESSPELTLYHGHPQVVLAYLKYQYAVGDELKRRDAFCRLQDLSVQLATATNSYSGTLASQVATSNAGVPLIARVYLTLASWKRALSPGLDDDSIQEILVSYKNATLNAKDWGKAWHLWALFNTEVMSRYTLRGRPDIAGKYVVAAVTGYFYSIACASTTKGVDDSLQDILRLLTLWFNHGATSEVQMALQKGFSLVNIEMWLVVLPQIIARIHSNNKIVRELIQSLLVRIGKDHPQDMSSIKRNNLEKILKIEGTEFIAQALMYPLLVACKSISILRQRAAQEVVDKIRQHSGGLVDQAQLVSKELIRVAILWHEMWHEALEEASRMYFGEHNIEGMLAVLEPLHAMLERGPETIKENTFIQAYGHELLEAHECCLKYRATGEDAELTKAWDLYYHVFRRIDKQLPSLTTLDLHSVSPELLECRKLELAVPGTYSADAPLVTIEYFVPQLIVITSKQRPRKLTIHGSDGNDYAFLLKGHEDLRQDERVMQLFGLVNTLLENSRKTSEKDLSIQRYAVIPLSPNSGLIGWVPNCDTLHALIREYRDARKIFLNQEHRCMLSFAPDYDHLPLIAKVEVFQHALENSEGNDLAKVLWLKSRTSEVWLERRTNYTRSLAVMSMVGYLLGLGDRHPSNLMLDRYSGKILHIDFGDCFEASMNREKFPEKVPFRLTRMLVKAMEVSGIEGTFRTTCENVMQVLRTNKDSVMAMMEAFVHDPLINWRLFNFNEVPQVTNYGNAHSHTVVNSEEAANRELMQPPRGARERELLQAVNQLGDANEVLNERAVAVMARMSHKLTGRDFSSGSSLSGAGSSTQHGNEHLASGDTREVEPGLSVKVQVQRLILQATSHENLCQNYVGWCPFW

SEQ ID NO: 2548 - DNA, 7350 bp, Oryza sativa subsp
  CDS (1)..(7350)
atggtaaaggggattgaagaggggataaacccaattactagctttgatgatttgatagccaaggaacacgggttcaacatcgcggcgtacatctcgtcgggagcggatgttattgctgccgccctaagaaaacatgttgaggaagaagctcgagatctgagtggcgaggcttttctgagatttatggaacagctctatgaacagatatgtagtctcttgcaaagcaacgatgttgctgaaaatttacttgctcttcgtgctattgatgctttgatcgatatgcctttcggagaaggtgcttcaaaggtttctaagttcgcaaatttcttgcgaactgtttttgaagtcaagcgtgatcctgaagttctagttccagcaagcgcagtgcttggccatttagcaaaagctggcggtgcaatgactgcagatgaggtggagcgtcagattaaaacggctttaggatggcttggtggggatcgagtggagtatcgccgctttgcttctgtccttattctcaaagagatggctgaaaatgcatcaacagttttcaatgttcatgttcctgaatttgttgatgctatatgggtagcactgagagatcccaaacaggctgttcgtgagcgagcagtggaagcattgcgtgcctgtctccatgttattgaaaaacgtgagacacgttggcgtgtgcaatggtattaccgcatgtgtgaagcagcacaggttggtcttggaaaaaatgcctctgttcatagcattcatggctcgctattggctgttggagaattattgaggaatactggggagtttatgatgtctaggtacagagaagtggctgatatagtcctcaattacctaagacaccgggatcagcttgttcgtcgtagtataacttcgcttcttcctcgaattgctcacttcctgcgtgacagatttgtgaccaactacttaaagatttgcatggatcatatcttgtttgttttacgtacaccggatgagcgtgctagtggctttgttgctcttggagagatggctggcgctcttggtgctgaacttgtgccctatttgcctttaattacctcacacttgcatgatgcgattgctcctcgtaggggacgcccatctcttgaggcaatttcttgtgtgggaagtttcgcaaaagctatgggtcctgcaatggaacctcatatacgtggtggactactagatgcgatgttttctgctggtctttctgataaacttgtagaggcacttgagtctataagtaccagcatcccatctctactgccaacaatacaggaacgattgttggattgtatatctcaagcactgccaaagtcatccgtgaggcctggtgctgctgttggccgaggaagcagatcaagcagtttgcagcagtttgtggattctggtggtccagttcttgtgcagcttgcattggggactctagcaaatttcaactttaagggtcatgagcttctggaatttgctagagagagtgtcatcctttatctggaagatgaggattgcagtacccgtaaagctgctgcaacatgctgctgcaaactagttgcgcattccctttcagcttcgtctagctcacagtttagctcaaaccggccaaatcgtatgggaggagctaagcgtcgccgccttgtagaagagattgtggagaaacttcttatggctgcagttgctgatgctgatgttggtgttagaagttctgtattcaaggctctatatcggaatccatcttttgatgattttttggcccaagctgacatcatgacttcaatttttgttgccttaaatgatgaggagtaccatgtcagagaattggcaatatcagttgcaggtagattgtctgaaaaaaatcctgcttatgtactgcctgcccttcgccgttatcttatacagttgctcacatatcttgaccaaagtatggatagcaagtgtagagaggaaagtgctagattgttgggttgcttaattaggagttgtgcacgactcattcttccttatattgctccaattcacaaggcactagtggctaggttacgtgaaggaacaggaccgaatgctaataatgcgcttgcagcaggagtgcttgctactgttggagagttggccaaagtgggtggttttgcaatgaggcaatatcttcctgagctaatgcctctagttgtggatgctcttttggatggaggtgctgttagtaaaagggaagtggcagtagcaacccttggacaagttatccaaagcacaggctatgttatctctccttataatgagtatcctccattgcttggtttactcttgaaattgctgaatggcgaattggaatggtctactagactggaagtgctgaaggttttaggtattatgggtgcattggacccgcacgcacataagcgtaatcaacataagctacctggtcaacatagggaggtcttgcggccaacgatggaaacagcacaacatattgtttccatggaagaactgccaactgatttctggccatccttttcagcatctgaggactattattcaacagttgcaattagttctctcatgcggattcttcatgatccttccctttcaagttatcatcagatggtggttggctctcttatatttatttttaagtcgatgggacttggctgtgttccatatttaccaaaggttctccctgagctattccgcgctgttcgcatgtgtgaggatggtggtttgaaagagttcattacctggaagcttgggacattggtatctattgttcgacaggttcttcaccttgttgaacaactatgcttggcactgaatgacgaattcagaatgtatatacttcacatattgccaagttgtattcaagtcctgggtgatgctgaacgctgcaatgactattactatgttcctgacatattgcacaccctagaggtgtttggaggaaatttggatgagcacatgcacttggttgctccagtacttgttcggttatttaaagtggagctagttgatatcagacgccgtgccattgtcactttgactaaactcatacctacggtgcagttgtgcatcaccagattgttaatttgtctttctgtggctagaaacaatgatgatctacggaaagatgcagcagaggcgctttgttgtcttgcacatgctcttggagaagattttacaatattcgtgtcatcaatacacaagcttcttgtgaagcaccatatgcggtatagaaaatgggatgagattgaaaatcgattactaaggcgagagccactcatctctgagaacttatcagtacaaaagtacacacaatgcccgcctgaagtcattagtgaccctcttgatgattttggtggtgttccttctgaggaggctgatgaaacacagcggcaaccaagaagtcatcaagtcaatgatgttcgactgagaagtgccggtgaggcttctcaaaggagcactagagaagattgggctgaatggatgaggcacttcagtattgcgcttctcaaagaatcaccatctcctgctttacgcacttgcgcaagactagcacaacttcagccttctgttggtcgtgagttgtttgctgcgggctttgcaagttgctgggcccaaatgaatgaaacatcccaggagcaacttgtgagaagtctcaagactgcattctcatctcagaacatacctccagaaattcttgccacactgctgaacttggcagagtttatggaacatgatgagaagccgcttccaattgatacaagactgctcggtgcacttgctgaaaagtgtcgagcatttgcaaaagcactgcattataaagaaatggagtttgaagctgtatgttccaagaagatgggtgcaaatcctgttactgttgttgaatctcttattcatattaacaaccaattacaccagcatgaggcagctattgggatattgacttactcacaacaacatttagaagttcaattgaaggagtcctggtacgaaaaattgcaccgttgggatgaggccttgaaggcatacaaagcaaagtcatctcaagcatctgggccattacaaaacttggatgctacattaggtcgaatgaggtgtctagcagccttggcccgttgggaagatttaagtgcattatgcagggagcaatggactggctcagaaccatctgcccgactagaaatggctccgatggctgccaatgctgcttggcatatgggtgagtgggaccacatggctgaatatgtttctcgtctggatgatggggatgaaaacaagctccggatattgggtaacacaacagctagtggtgacggaagcagcaatggtgctttctttagggctgttctttcagttcgttgcaaaaagtatgaagaagctcgtgtatatgttgagagagctcggcggtgtttggctacagaacttgcagcattggtacttgagagttatgagcgtgcttataataatatggtgcgggttcaacagctttctgagctggaagaggtgattgattactgcactcttccaatggaaagtccaatagctgacagccggagggaacttatccgtaatatgtggaatgagcgtattaaaggaacaaaacggaatgttgaggtgtggcaagccttacttgctgttagagagttggttctccctcctaatgaagacagagacacctggataaaatttgccaaactttgctggaagagtggccgcattagtcaggctaaatctaccttagtcaaactcttacagtttgatccagaatcttcccctgaattgacgctgtatcatggacatcctcaagtagtcctggcatacctgaagtaccagtatgctgttggagatgagcttaaacgaagggacgcgttttgcaggctacaggatttgtctgtgcagcttgctaccgcaacaaatagttattctggaacattagcaagccaggttgccacatcaaatgctggagtaccacttattgctcgcgtctatttgacacttgctagctggaagagagcattatcacctgggttagacgatgattctattcaagaaatattggtctcttacaaaaatgccacacttaatgccaaggactggggcaaggcatggcacttatgggccttgttcaacactgaagtcatgtcccgctatactttgcgtggtcgaccagatattgcaggaaaatatgttgttgcagcagtaactgggtatttctactctattgcttgcgcatccacgacaaaaggtgttgatgatagcttacaggatatccttcgtctcttgactctttggtttaatcatggggctacctcagaggttcaaatggcactgcagaaaggcttttcacttgtcaatatagaaatgtggttggttgtccttccccagataattgcaaggatccattcaaataataaaatagtgagagaactgatacagtcattgctggttcgaattggaaaggatcatccacaggacatgtcatctattaaaaggaataacctagagaaaatattaaaaattgaaggaactgaatttatagcacaggcattgatgtatcctctgttggttgcttgcaaatcaataagcatattaagacaacgagcggcgcaagaggtcgtcgataagatccgccaacatagtggaggtcttgttgatcaggcacagcttgtttcaaaggaactgatacgagttgccattctgtggcatgagatgtggcatgaggctcttgaggaagctagcaggatgtattttggtgagcacaatattgagggaatgcttgcagtgcttgaaccattgcatgcaatgctcgagaggggtcctgagacaataaaagaaaatactttcattcaggcttatggtcatgaattactggaagcccacgaatgctgtttaaaatatcgggctacaggagaggatgctgagttaactaaggcatgggatttgtattaccatgttttcagaagaatagacaaacagcttccaagtcttacaactttggatttgcactctgtgtcacccgagcttcttgagtgtcgaaagttggagcttgctgtaccaggaacttattctgcagatgcaccacttgtgacaattgagtattttgttcctcaattgattgttataacatctaaacaaagaccaagaaaactgacaattcatggaagtgatggcaacgattatgcattcttgctgaaaggccatgaagatttacggcaggatgagcgtgtaatgcagctttttggcctggtgaatactctgctggagaactctaggaaaacttcagagaaagatctgtcaatccaaagatatgctgtcatacctttgtctcctaacagtggtttaattggatgggttccaaattgtgacacacttcatgccctgatccgtgaatatagagatgccaggaagattttcttaaatcaggagcaccgatgtatgttgagttttgcacctgattatgaccacttacccctcatcgccaaagtagaagtatttcagcatgccctagaaaacagtgaaggaaatgaccttgcaaaggttctctggcttaaaagccgaacctctgaagtatggcttgagcggcgcacaaattatacgagaagtctggctgttatgagcatggttggctatttgcttggtttaggagatcggcatccaagtaatcttatgttagatcgttatagtggaaaaatattacatattgactttggcgattgctttgaggcttcaatgaatcgtgaaaagtttcccgaaaaggttccatttcgcttgactagaatgcttgtgaaagccatggaagttagtggtattgagggtaccttcagaaccacttgcgaaaatgtgatgcaagtacttcgaacaaacaaggatagcgttatggctatgatggaggcatttgtgcatgacccattaatcaattggcgtctgttcaatttcaatgaagtccctcaagttacaaactatggaaatgctcacagtcacacagttgtcaatagcgaagaagctgctaatcgggagctcatgcaaccaccccggggagctcgggagagagaactgctacaggcggtcaatcaactcggtgatgctaacgaggttttgaatgagcgtgccgtagctgtgatggcacgaatgagtcataagctcacagggcgcgatttctcttccggatcatcgttgtcgggggcgggaagctccacccaacatggtaacgagcatctggcttcaggagacactcgagaggtggaacctggtttatccgtgaaggttcaggttcagaggcttatacttcaagcgacttcgcatgaaaacttgtgccaaaactacgtcgggtggtgcccgttttggtga

SEQ ID NO: 2549 - protein, 2449 aa, Oryza sativa subsp
MVKGIEEGINPITSFDDLIAKEHGFNIAAYISSGADVIAAALRKHVEEEARDLSGEAFLRFMEQLYEQICSLLQSNDVAENLLALRAIDALIDMPFGEGASKVSKFANFLRTVFEVKRDPEVLVPASAVLGHLAKAGGAMTADEVERQIKTALGWLGGDRVEYRRFASVLILKEMAENASTVFNVHVPEFVDAIWVALRDPKQAVRERAVEALRACLHVIEKRETRWRVQWYYRMCEAAQVGLGKNASVHSIHGSLLAVGELLRNTGEFMMSRYREVADIVLNYLRHRDQLVRRSITSLLPRIAHFLRDRFVTNYLKICMDHILFVLRTPDERASGFVALGEMAGALGAELVPYLPLITSHLHDAIAPRRGRPSLEAISCVGSFAKAMGPAMEPHIRGGLLDAMFSAGLSDKLVEALESISTSIPSLLPTIQERLLDCISQALPKSSVRPGAAVGRGSRSSSLQQFVDSGGPVLVQLALGTLANFNFKGHELLEFARESVILYLEDEDCSTRKAAATCCCKLVAHSLSASSSSQFSSNRPNRMGGAKRRRLVEEIVEKLLMAAVADADVGVRSSVFKALYRNPSFDDFLAQADIMTSIFVALNDEEYHVRELAISVAGRLSEKNPAYVLPALRRYLIQLLTYLDQSMDSKCREESARLLGCLIRSCARLILPYIAPIHKALVARLREGTGPNANNALAAGVLATVGELAKVGGFAMRQYLPELMPLVVDALLDGGAVSKREVAVATLGQVIQSTGYVISPYNEYPPLLGLLLKLLNGELEWSTRLEVLKVLGIMGALDPHAHKRNQHKLPGQHREVLRPTMETAQHIVSMEELPTDFWPSFSASEDYYSTVAISSLMRILHDPSLSSYHQMVVGSLIFIFKSMGLGCVPYLPKVLPELFRAVRMCEDGGLKEFITWKLGTLVSIVRQVLHLVEQLCLALNDEFRMYILHILPSCIQVLGDAERCNDYYYVPDILHTLEVFGGNLDEHMHLVAPVLVRLFKVELVDIRRRAIVTLTKLIPTVQLCITRLLICLSVARNNDDLRKDAAEALCCLAHALGEDFTIFVSSIHKLLVKHHMRYRKWDEIENRLLRREPLISENLSVQKYTQCPPEVISDPLDDFGGVPSEEADETQRQPRSHQVNDVRLRSAGEASQRSTREDWAEWMRHFSIALLKESPSPALRTCARLAQLQPSVGRELFAAGFASCWAQMNETSQEQLVRSLKTAFSSQNIPPEILATLLNLAEFMEHDEKPLPIDTRLLGALAEKCRAFAKALHYKEMEFEAVCSKKMGANPVTVVESLIHINNQLHQHEAAIGILTYSQQHLEVQLKESWYEKLHRWDEALKAYKAKSSQASGPLQNLDATLGRMRCLAALARWEDLSALCREQWTGSEPSARLEMAPMAANAAWHMGEWDHMAEYVSRLDDGDENKLRILGNTTASGDGSSNGAFFRAVLSVRCKKYEEARVYVERARRCLATELAALVLESYERAYNNMVRVQQLSELEEVIDYCTLPMESPIADSRRELIRNMWNERIKGTKRNVEVWQALLAVRELVLPPNEDRDTWIKFAKLCWKSGRISQAKSTLVKLLQFDPESSPELTLYHGHPQVVLAYLKYQYAVGDELKRRDAFCRLQDLSVQLATATNSYSGTLASQVATSNAGVPLIARVYLTLASWKRALSPGLDDDSIQEILVSYKNATLNAKDWGKAWHLWALFNTEVMSRYTLRGRPDIAGKYVVAAVTGYFYSIACASTTKGVDDSLQDILRLLTLWFNHGATSEVQMALQKGFSLVNIEMWLVVLPQIIARIHSNNKIVRELIQSLLVRIGKDHPQDMSSIKRNNLEKILKIEGTEFIAQALMYPLLVACKSISILRQRAAQEVVDKIRQHSGGLVDQAQLVSKELIRVAILWHEMWHEALEEASRMYFGEHNIEGMLAVLEPLHAMLERGPETIKENTFIQAYGHELLEAHECCLKYRATGEDAELTKAWDLYYHVFRRIDKQLPSLTTLDLHSVSPELLECRKLELAVPGTYSADAPLVTIEYFVPQLIVITSKQRPRKLTIHGSDGNDYAFLLKGHEDLRQDERVMQLFGLVNTLLENSRKTSEKDLSIQRYAVIPLSPNSGLIGWVPNCDTLHALIREYRDARKIFLNQEHRCMLSFAPDYDHLPLIAKVEVFQHALENSEGNDLAKVLWLKSRTSEVWLERRTNYTRSLAVMSMVGYLLGLGDRHPSNLMLDRYSGKILHIDFGDCFEASMNREKFPEKVPFRLTRMLVKAMEVSGIEGTFRTTCENVMQVLRTNKDSVMAMMEAFVHDPLINWRLFNFNEVPQVTNYGNAHSHTVVNSEEAANRELMQPPRGARERELLQAVNQLGDANEVLNERAVAVMARMSHKLTGRDFSSGSSLSGAGSSTQHGNEHLASGDTREVEPGLSVKVQVQRLILQATSHENLCQNYVGWCPFW

SEQ ID NO: 2550 - DNA, 7215 bp, Pichia angusta
  CDS (1)..(7215)
atgtcgactcccctggataattggcatgtggacgaaatattcaccgagctcggctcgaaagacgccggccggcagaagcgcgctgctagcaggctacgcgaccagtttgttgccgtgtcgcgtgaagccatcacagccgaacaattaagtgtctataacaactacatcaacaaacgcatattcgatcttatcaacagttcgagcgtctcgcagcagctaggcggcattgaggcgatcaacgcgcttgtggagttgatcagcagctcgatgccgcgtattggagcctcttcaaccacggaagagaactccaatatgatcgcccggtacgctaactacctccgtcggctgatcacgtcgaacgacctcgccgtcatgagacgggccaccacgacgcttggcaagctggccattccggggggttcactcacaggcgattttgtggagtttgaggtcaagcggtcgatcgagtggctcgtggcggagaaagtggaaaacaaaaaacacgcagccatcctgatcattagctctctggcagaaaatgcctccgcaatgctctatccgtacatcaaggaggtgctgtcgaatatttggattggcttgcgcgactcaaaaagcttgctcagagaagattccgccatctgtctccgtcactgtctgaatatagtgtacgagcgagacctggaacttagaagctattggttttcaaaactgtacacggaggcgacgctgatattccgcaactcgcctgcgacttccaacggaagtggtcccgtggtgaataataatccgtcggaattcattcatgggtccttgttgtgctacagagagctggttctccagggctcgtcgctgctgcactcgaaaatagacgatatttatgagaacctcatgggcatcaaggaccaccggtctgtcgatgtgagaagagaggtcaccaaaatcatgcctatccttgcgagattcgacagggtcaagtttgtggacaaatacatgcatcgcgtgctgctctactacatctcgcagctgaaaattggcaaagaccgctcattcatcctgctgagtattggagatctctctgtggaggccaaaaataacatcatcaactatcttgacggtgtcgtgctcgaaagcatcaaggacgcgttggcgtcaaaagtgcccaaaacgaaaaaagagcttgttccgtactgtttctactgtctggcaaaattggcgatttctctcggaccgccattgacaaagttcatcaacaattacgagctcatgacactgattctcaaatctccaatcaatgacaatatgcttagtctgcttaaaatattcatcgacaacctcccgtctttagagcccatgatcaacgaaaaactgatcaacgcagtcagcttctgtctgtcgggattcgagttcaaacatcctggagctcccgacttcaaacgacaaatgaacgccactcttgcacacaactaccgtcacagcatgtacatcagagacggcggccagttcggtacgccgccagtagatatcacctcgctcacagggctgccaaaaagccactaccaggaagagcccgacgttgtgattattctacaggccctcaagaccttgagctattttgacttcagaaactactctctgacagaatttgtccgctattctgtcatccactacatcgaccacgacagtcctgaggtgcgactacgggcagctttgacctcgtccaaaatatatctctcggacccaatctgtctccaaaaaagcctgaactctttgaaagctgtgagtgaggttcttgacaaactgcttacagtctgcattaccgatccgcacgaggaaatccgcctgcaagtgctcaacagtctgggtgagagatttgatccccagctgtctcaggccgagaacgtgaggctgcttttcatggctctgaacgacgagtcgtttgagattcgcaaggcggccatcaaattggttggaagactctcagcaatcaacccggcttacatcgtgccctcgctgcgcaagctgctcatccagctgctcaccacgctggagtatggtggccacaactccagagaaaaggaagacacggcgctgttgcttgctgtgctgatttcgcacacaggcgacctaacaaagccgtatttcaagcccatcatggacgtgttgctgcctgccagcaccgaacccggtgcttctgttgcggcagcggcaattgcagcgattggcgagctggccgtagtggttggtgacgaaatggtgcagtacattccgcaagtgatgccaatttttatcgaaacgttccaggaccaaagcatgagcttcaagcgggacgcagcactgaaaacgctcggccagatcgccgggtcctcgggctacgttatccagccgctgctcgattacccgcagctgctgggtctgctggttaatattctgaagtctgagacatcactggcagtgagacgcgaaactgtgcgtctggtcggtatcctcggagctctcgatccgtacaaacacagagaagtggaacgacacggccaggattcgcagactgtggcagagcagaatgcaccgcccgtggacatggagctgctgatgaaaggtaagtcgccgtcaaacgaggactatttcccaacagtggtgatcaagaccctgttgcgcatactcaaggatgcgtccttgagcacccatcacccggccgtcatccaggcgatcatgcacatcttcaagacgctgggaatcaagtgcgttccgttcctggacaaagttattcctggtttcgcgactgtgattcacacgtgtccgccctcgttgctggaaacatacttccaacagctggccgacttgatcaagatcgtcaagttgcacatccgccctcatttaccagagattttcgcgctcattgaggaattcttccaccaggtcaatctccaggtcaccattattggcatgatagagcaggtctcgaaggccctggacgacgagttcaaaatctacatgtttcaggtgattaccatttttctggacgtgctggacaaggacgactcaccgcgcaaggtgtcgacgttgcgcgtactcaaggctttcacagttttcggcagcaacattgagccgtacatgcatctcgtgattccacagatagtcaagctttttgagtcaccggacgaagttgtcagtaaggaggccatcgaaactattgggaaattgtctagacatgtcagtctaaacgactactcgtcccgaattgtgcagccactagttagaattctggtctcgcattcttccgaagacatcaagaattctgtcgtgaacaccatctgtctgctcttgctgcaaatgggcaccgagttttctgtgttcatcccaggaatcactagcatcatgacgaaacataagctgcaatatcccgtctacgaccaactggttgacaaactgattcacggcgagccgttgccaaccactctcctgaatgataaaacgcaggaaactccgtccaacgacaacttcgacattgaagcaacgccgcggaaactcccagtcaacgcccaggcgctgcgttatgtctgggactgcaatagcatgcgcacaaaagaggactggcaggaatggatccgccgactgagcattgagctgctcaaggagtcgccgtcgccggctttgcgtgcctgctcctcgctcgctaccgtttatccacctctggctagagatcttttcaactgtgcctttgcaagctgctggaacgagctgcacatccagtaccagggagaactggcccaggctctgtgcattgcgctgtcctcgccgaacaatctaccggagatccaccagacgcttctcaatcttgctgagttcctcgaacacgacgacaagtcgctgccgataagaatccagaccctgtcgcagtacgcgcagcggagccatgtgtacgccaaagcactgcactacaaggagctggaattcattcaggagccgtctacgccgacaatcgaatccctgatcagcatcaacaaccagctgcagcagtcggacgccgctattggaattttgaagtacgctcaggaccaccacggcctgcaactcaaggagacctggtacgaaaagctccagcgctgggacgatgcattgcgtgcttacaacgaacgtgagaaggaggagccgaactccaccgatatcactatgggaaaaatgagatgtctacatgctctgggcgaatgggagctgttgagcgagctagcgcaggataaatggaacaattcgtctggtgacatcaaaagggccattgcgccactggctgctgcggccgcctggggaatcggccagtgggagcgtatgggtaactacattagcgtcatgaaggtggagtcgccagataaggcgtttttcaatgctattttgtgtcttcacagaaacaattttgaggaggccgcagaacaaatttcgaaggccagggatcttctggtcacggagattactgcattggtgagcgaatcgtacaacagggcgtacggggtggttgtgagagtgcagatgctggccgagctcgaggaaatcatcaagtacaagtgtttgccccaaggctctgaaaaacgcatccagatccgcgagacgtggaacaaacggcttctgggctgccagcggaacgtggatatttggcaaaggatgcttaaagtgcgtgctctggtcgtgaagccgaagcaggacatggaaatgtggattaagtttgccaatctgtgccggaaatcgggccggctggggcttgcggaaaagtcgctcaacgcacttctggacgagggtgactccggccaccagacgtcccgggcgccaccccacgtggtgtacgcacagctgaaatacatgtgggccagaggccagcagcgagaggcgctcaaccacctgatcgactttgcgtcgaaactatcacgtgacctaggcgtgaacgagaacgaggccatcacgcagcctctgccaacggccattcctggcgcctccgacaatatcgagaagtacaccatgctgctggcgagatgctatctcaaacagggcgaatggaagattgctttgaatagcaactggacagagatggactctacaggtatcttaggctcgttcctgcttgctacgcatttcgaccccaagtggtacaaagcctggcacaactgggctctcgcaaactttgaggtgatttccccgcaggcaaagcagttgcaccaggaaagtgcggacgtggacgagaagagtctgggaggcattttgcactacgtggtgccagcggttaagggatttttccactcgatctcgctctcgcagtctaatccactccaggacacgctgagactgctgacgctgtggatcaagtacggaggcattgaggaagtggccaatgcgatgcaggaagggttccagctggtgaaggtcgacacgtggctggacgtgattccgcagttaatctcgaggatccaccagccggaccctgtggtgagcaagtcgcttttgggtttgctgtcggatctgggccgggcgcatccgcaagcgctgatttatccgctgacagtggccatcaaatccgacagcgtttcgcggcagagggcagctctgacaatcatcgacaagatgcgtgcacattcggcgcggctggtggatcaggcggaccttgtgagcaatgagctgatccgtgtggcggtgctatggcacgagatgtggtatgaggggcttgaggacgcgtcgcggtcgtactttggcgaccagaacatcgagaagatgttccagatcctgacacctctgcaccagatgctcgaaaaagggccagagacgatccgagaggcctcgtttgtcaatgctttcggcaaggagctgaacgacgcgcatcagtggctgatgaatttccggcgcacaaaggacgtggcgtaccttaaccaggcatgggatctgtactacggcgtcttccgccggatttccagacagttgccgcagctgcaaaacctcgatctgcagcatgtttctcccaagctgctggccgcaaagaatctcgagctcgctgttccgggaacatacgtgccaggaaaagaggtgattcacattgtgcgtttcgagccggtgttttctgtgatcacatcgaagcagaggccgcggaagttcaacgttctgggcagcgacggcaaaaagtaccagtacttgcttaaggggcacgaggatattagacaggacaacttagtgatgcagctatttggattagtgaacacgctacttgcgaacgacccggagtgtttcaagcggcatatggacatccagcagtacgcggcgatcccgctgtctcctagctcgggcatgcttggatgggttcctaattccgacacgttccacgttctcatcaaggagtacagagaaccgcgcaagatcttgctagacgtggaacatcgtatcatgctgcagatgtctccggactacgacaatttgacattgctggagaaggtggaagtgttcacctatgccctggatattacgcgaggccaggatctatacaaggtgctgtggttcaaatcgaagtcgtcagaggcctggctcgacagacgaaccacgtacacgcgctccttggcggtgatgtcgatggtgggatatattttgggtcttggcgacagacacccttcgaacctgatgatggacagaatcactggaaaagtgatccacatcgattttggcgactgtttcgaggcggccattttgagagaaaagtacccggaaaaagtgccgtttagactgacacggatgctgagttacgcgatggaggtgagcggtattgagggctctttccggatcaccagcgaaaatgtcatgagagtccttcgcgacaacaaagagtcgttgatggccattctggatgcctttgcgtacgacccgctgatcaactggggttttgactttccgctgaagcagatagtcgacaatccgaaccagcacttcccaaacgcaaactacaacgagctgttgcgcagcggccaaatcaccgaggaggaggcctcccggatggaggcgcagaacaaggcagatatcttgaacgcgcgggctgcgtacgtgctcaagcgtatcacagacaaactgacgggaaacgacttcaagcggttccgggagctggacgttccgagccaggtcgacaagctgatccagcaggctacctctgtggagaacctttgccagcactacataggatggtgctctttttggtaa

SEQ ID NO: 2551 - protein, 2404 aa, Pichia angusta
MSTPLDNWHVDEIFTELGSKDAGRQKRAASRLRDQFVAVSREAITAEQLSVYNNYINKRIFDLINSSSVSQQLGGIEAINALVELISSSMPRIGASSTTEENSNMIARYANYLRRLITSNDLAVMRRATTTLGKLAIPGGSLTGDFVEFEVKRSIEWLVAEKVENKKHAAILIISSLAENASAMLYPYIKEVLSNIWIGLRDSKSLLREDSAICLRHCLNIVYERDLELRSYWFSKLYTEATLIFRNSPATSNGSGPVVNNNPSEFIHGSLLCYRELVLQGSSLLHSKIDDIYENLMGIKDHRSVDVRREVTKIMPILARFDRVKFVDKYMHRVLLYYISQLKIGKDRSFILLSIGDLSVEAKNNIINYLDGVVLESIKDALASKVPKTKKELVPYCFYCLAKLAISLGPPLTKFINNYELMTLILKSPINDNMLSLLKIFIDNLPSLEPMINEKLINAVSFCLSGFEFKHPGAPDFKRQMNATLAHNYRHSMYIRDGGQFGTPPVDITSLTGLPKSHYQEEPDVVIILQALKTLSYFDFRNYSLTEFVRYSVIHYIDHDSPEVRLRAALTSSKIYLSDPICLQKSLNSLKAVSEVLDKLLTVCITDPHEEIRLQVLNSLGERFDPQLSQAENVRLLFMALNDESFEIRKAAIKLVGRLSAINPAYIVPSLRKLLIQLLTTLEYGGHNSREKEDTALLLAVLISHTGDLTKPYFKPIMDVLLPASTEPGASVAAAAIAAIGELAVVVGDEMVQYIPQVMPIFIETFQDQSMSFKRDAALKTLGQIAGSSGYVIQPLLDYPQLLGLLVNILKSETSLAVRRETVRLVGILGALDPYKHREVERHGQDSQTVAEQNAPPVDMELLMKGKSPSNEDYFPTVVIKTLLRILKDASLSTHHPAVIQAIMHIFKTLGIKCVPFLDKVIPGFATVIHTCPPSLLETYFQQLADLIKIVKLHIRPHLPEIFALIEEFFHQVNLQVTIIGMIEQVSKALDDEFKIYMFQVITIFLDVLDKDDSPRKVSTLRVLKAFTVFGSNIEPYMHLVIPQIVKLFESPDEVVSKEAIETIGKLSRHVSLNDYSSRIVQPLVRILVSHSSEDIKNSVVNTICLLLLQMGTEFSVFIPGITSIMTKHKLQYPVYDQLVDKLIHGEPLPTTLLNDKTQETPSNDNFDIEATPRKLPVNAQALRYVWDCNSMRTKEDWQEWIRRLSIELLKESPSPALRACSSLATVYPPLARDLFNCAFASCWNELHIQYQGELAQALCIALSSPNNLPEIHQTLLNLAEFLEHDDKSLPIRIQTLSQYAQRSHVYAKALHYKELEFIQEPSTPTIESLISINNQLQQSDAAIGILKYAQDHHGLQLKETWYEKLQRWDDALRAYNEREKEEPNSTDITMGKMRCLHALGEWELLSELAQDKWNNSSGDIKRAIAPLAAAAAWGIGQWERMGNYISVMKVESPDKAFFNAILCLHRNNFEEAAEQISKARDLLVTEITALVSESYNRAYGVVVRVQMLAELEEIIKYKCLPQGSEKRIQIRETWNKRLLGCQRNVDIWQRMLKVRALVVKPKQDMEMWIKFANLCRKSGRLGLAEKSLNALLDEGDSGHQTSRAPPHVVYAQLKYMWARGQQREALNHLIDFASKLSRDLGVNENEAITQPLPTAIPGASDNIEKYTMLLARCYLKQGEWKIALNSNWTEMDSTGILGSFLLATHFDPKWYKAWHNWALANFEVISPQAKQLHQESADVDEKSLGGILHYVVPAVKGFFHSISLSQSNPLQDTLRLLTLWIKYGGIEEVANAMQEGFQLVKVDTWLDVIPQLISRIHQPDPVVSKSLLGLLSDLGRAHPQALIYPLTVAIKSDSVSRQRAALTIIDKMRAHSARLVDQADLVSNELIRVAVLWHEMWYEGLEDASRSYFGDQNIEKMFQILTPLHQMLEKGPETIREASFVNAFGKELNDAHQWLMNFRRTKDVAYLNQAWDLYYGVFRRISRQLPQLQNLDLQHVSPKLLAAKNLELAVPGTYVPGKEVIHIVRFEPVFSVITSKQRPRKFNVLGSDGKKYQYLLKGHEDIRQDNLVMQLFGLVNTLLANDPECFKRHMDIQQYAAIPLSPSSGMLGWVPNSDTFHVLIKEYREPRKILLDVEHRIMLQMSPDYDNLTLLEKVEVFTYALDITRGQDLYKVLWFKSKSSEAWLDRRTTYTRSLAVMSMVGYILGLGDRHPSNLMMDRITGKVIHIDFGDCFEAAILREKYPEKVPFRLTRMLSYAMEVSGIEGSFRITSENVMRVLRDNKESLMAILDAFAYDPLINWGFDFPLKQIVDNPNQHFPNANYNELLRSGQITEEEASRMEAQNKADILNARAAYVLKRITDKLTGNDFKRFRELDVPSQVDKLIQQATSVENLCQHYIGWCSFW

SEQ ID NO: 2552 - DNA, 7155 bp, Penicillium chrysogenum
  CDS (1)..(7155)
atggcccaagcaggtgcaatcacagacgtgacccaaagattgttcgtggagctcaagtcaaagaatgaggaggccagggccagagctgcctacgagctctacgataatgtcctatctgtgtccagagattggccctcggagaagttcgtggaattttacaacgccgttagccaacgcatcgcccaactcgtggtcaacggtagcgatgcaaacgaaagaatcggtggattgttagcactcgaccgactcattgactttgacggagttgatgccgcccagaaaacgacgagattcgccagttacttgcgcagcgcccttcgcagtaatgataatgtggtcctggtgtatgcggcccgatcgctgggccgactcgcgaagcccggcggggctctaaccgcggaactggtggaaagcgaaatacaatctgcattggaatggctacaatcggagcgacaggaaagtcggcggtttgcagcagtgcttgtgatccgggaactggccaagggctcaccaacactcctctacggcttcgttccgcaggtatttgagcttgtctgggttgcccttcgagatccgaaagtcctcatccgtgagactgccgccgaggccgtcggggaatgctttgagataattgtggctcgtgattctcaagtccgtcaatcatggtttgcacggatacacgatgaagcacttctgggcttgaagtcccataacattgattggatccacggctccattttgatcatcaaagagttgatcttgaagggcacgatgtttatgaaggaacattatcggaatgcttgcgaaatcatcctccgtctcaaggaccatcgtgacccaaagattcgcactgaagtcgtcctcaccatccccattctcgcctcatatgccccaaccgatttcactgagatctatctacacaaattcatggtctacctccaagcgcaactcaagagggacaaagagaggaactccgctttcattgccattggaaagattgccaatgcagtgggcaccgctatcggccaatacctcgatgggatcattatctacattcgagagggacttgcaatgaaggcgaggaatcgatcaggagttaacgaggccccaatgtttgaatgcatcagcatgctgtccctcgcagtgggacaagcgctcagcaaatacatggaagcgcttctggatcccatttttgcctgcgggctgagcaaatcactgacacaggctctggtcgacatggcccactacatccctcccatcaaacccatgatccaggaaaagcttcttgatatgctgagtatcatcctttgtggaacgccattccggccccttgggtgtcctgaaaaccgactacctcctatgccatcattcgcaaaagactttgctccccacgagcttcactccgattctgatatcgcattagcacttcatacgttaggaagctttgacttctctgggcacatactgaacgagttcgtgcgtgatgttgctatcaactacgtggaaaatgacaatcctgaaattcgaaaagcatcggctcttacatgctgccagctgttcgttcacgatccgatcatcaaccaaacaagcggacactccattcaggttgtcagcgaggttattgacaagctcttaaccgtgggtatcggagaccctgaccctgaaatccgacgcaccgttttgtggtcgttggaccgcaaatttgatcgtcacttggcacgaccagagaatattcgatgcctgttcttagccgtcaatgatgaggttttcgacgtcaaagaagccgcgatctgcatcatcggtcgactttctagcgttaaccctgcttatgtcttcccgccactacgaaaactgttggtcaatcttctcactggtcttggcttcgcgaataccgcccgccagaaggaggaaacagctcaactaatcagcttgtttgtctctaatgcgacgaaattgatcaggtcatacgttgatcccatggtgactgccttgttgcccaaatcaacagacattaatcccggcgttgctgccactactttgaaggctgtcggtgagctcgcaagtgtgggcgggcatgagatgagacaatatctgcctcaaatcatgccaattattctggactcgctccaggacctttcgtcgcataacaagcgtgaagctgcgcttcggacattgggacaattggccagcaattcaggctacgtcatcgagccatacatggaataccctcatcttctcgccgttctcatcaatatcatcaaaacggaacagacaggctctttacgcaaggagaccatcaaacttgtcggagtgctcggtgcgcttgatccctacaagtaccagcagatcagcgagattgaacctgatgttcaccatatcaacgaaatacagaatgtttccgatgttgccctcattatgcagggtctcacgccctccaatgaagagtattatcccactgtggtcatccatactttgatgcagaacattctacgtgagaactccctggctcaatatcactcagctgtcattgatgccatcgtcacaattttcaagactctgggcttgaagtgtgtcccgttccttggacaaattattccagggttcattctggttatcagaagcgctcctgctagccgccttgagtcctatttcaatcagatggcaatcttggtgaatatcgtgcgacaacatattcgcactttcctgccagagataatcgaggtcattaaagatttctgggatgcttcataccagatccaaggtaccattttatccttggtcgaggccattgctaggtcattggaaggagaattcaggaagtatcttgctggcctgattcctttgatgctcgatacacttgataaagacacctcacctcgtcgacagccctctgagaagattctccatgctcttttgattttcggctcaagcggagaggaatacatgcatctcatcattccttccattgttcgtctgtttgatcggccacagaatcctcagagcatccgtaaatccgctatcgatagcttgacaaaactatcgcgacaagttaacgtctctgactttgcatccctaatggttcattcattgtcccgagtcgtggctggcggtgatcgtgtgttgcgtcaagctgcgatggactgcatttgtgccctcattttccagctcggacaagacttcacgcattacattcatcttctaaacaaggtcctaaaaaccaaccagatcgcgcataccaactaccaaatcctggtgaccaaactccaaaagggcgacccgctcccgcaggacctcaatccggaagaggtctattctttccccaccgacgacaccaacttttccgaaattggacaaaagaagattgttgtgaaccagcaacatctcaagaacgcatgggatgcttcgcaaaagtccactcgtgacgattggcaggaatggatacgccgtttcagcattgagctgttgaaggaatcaccatctccggcattgcgtgcatgtgctagcttagctggtatctaccagcccctctcaagggatcttttcaatgctgctttcgtctcgtgctggactgagttgtatgatcaataccaagaagagctcgtccgctcaattgaaaaggcgcttacttctcctaacatctccccagagattttgcaaattctcctcaatctggccgaattcatggagcatgatgacaaggctcttcccatcgacatccgcacacttggaaaatatgctgcaaagtgtcatgcttttgctaaagctcttcactacaaagaactggagttcgaacaagaccagaactcgggtgcagttgaagccttgattaccattaacaaccagcttcagcagtccgatgccgccatcggtatccttcgcaaagcgcaggcgtatcgtgatgtggagctcaaggaaacttggttcgagaagctccaacggtgggacgaagcccttgctgcttacaagcgacgtgagaagacggacccagactcatttggtatcaccatgggtaagatgcgctgtttgcacgctcttggcgagtggaaggttctctcggatctcgctcaagaaaagtggaaccaagcgtcactggagcaccgccgcgctattgcacctcttgccgctgccgctgcctggggtcggggccaatgggagttgatggactcttaccttggtgtcatgaaagagcagtctccggaccgttctttcttcggtgccattctggcaatccatcggaaccaattcgatgaggccaacatgtacattgagaaggctcgcaatggtctcgatactgaattgtctgctcttctgggagagtcatacaaccgtgcctacaatgttgttgtccgggtccagatgctcgccgagctagaagagatcatcacatacaagcaaaacatcggcgaccctgaaaagcaggatgccatgcgtaaaacttggaatcaaagactgcttggatgtcagcaaaacgtggaagtgtggcagcgtatgctcaaggtcagagctcttgtcacagccccgcgtgagaatcttgatatgtccatcaagttcgccaatctttgtcgcaagtccaatcgcatgggtcttgcggaacggtcccttgcatctctagagacagtggtgtccgatgccaatggcacgcgcactatcgcaccacccgaagtcacatacgccaggctgaaattcagttgggcaaatggtcaccaactagagtcacttgaaatgatgaaggagtttacctctggtctgacagatgatttctccagatacaacacactcatggtatcaaatggtgaacatcatggcgcgaatggagtcaacggggtcgttgaccagaaccacccagatgccatcagcctgaatgaacggatcggcgacgtcaacaaatttagaaaacttctctccaagagctatcttagacagggagagtggcagaccgctttgcagaggggtgactggagaccggaacatgttcgagaggttctcaacgcctactcggccgcgacccaatacaaccgcgattcatacaaggcgtggcactcctgggcacttgcaaacttcgaggttgttacaacgattgccaaccaggctagtcgtgagggcatacctgcgccggttcctgctcatatcgtgacagaacatgtgattcctgccattcgcggattcattcgctccatcgctttgtccttgacatcttcgttgcaagataccttgagattactcactctgtggtttaatcatggcggagatcatgaggtaaacactgtcgttacggaaggatttacggctgtcaatatcgacacttggctcgctgtcactcctcaactgatcgctcgaatcaaccaacccaatatcagggtccgcggtgcggttcataggttgcttgccgaggttggcaaagcgcatcctcaagcccttgtgtatccactgacggtggcaatgaaatcgaatgtgactcgacgctctcaatctgctagcaacatcatggaaagtatgcggcaacatagcgccaaacttgttgagcaagcagatcttgtgagtcatgagcttatccgagttgcggtcttgtggcatgaactttggcatgaaggtctcgaagaagcgtctcgtctctatttcggcgatcacaatgttgaaggcatgttctcaacacttgcgcccttccatgatatgctagacaagggcgccgagacccttcgtgaggtgtcatttgcgcaagctttcggtcgtgaccttgctgaagccaagcattactgcatgatgtatcgcgaatcggaggaaatcggtgatctcaaccaagcttgggacttgtattacactgtgttccggaagatcagccgacagctaccacagctatcgactctcgatcttaaatacgtgtctcctcgactcaaggattgcgcagaccttgaccttgccgttccaggaacataccagagtggcaagccagttattcgaatcatgagcttcgacccgatcttgcatgttttgcagacaaagaaacgaccgcgtcgcatgacgcttaaaggcagcaacggtagctcttacatgtaccttgtcaagggccatgaagatatccgacaagatgagcgagtcatgcaacttttcggcttgtgtaataccttgctggataacgatggcgagagtttcaagcggcacttgtcggtccagcgtttccctgccattccattgtctcagagctctggtctcctgggatgggtgtccaacagtgatacattgcatgccttgatcaaggaataccgtgaaagccggagaatcctactcaacatcgagcatcggatcatgcttcaaatggcacccgactacgatagccttactctcatgcagaaggtcgaagtattcggttacgctatggacaacacgaccggcaaagatctgtaccgcgtgctatggcttaagagcaagagctctgaggcatggcttgaacgtcgtacgaactacactcgatcgctcggtgttatgtctatggtcggctacatccttggtctgggagacaggcatccatcgaacttgctgctggatcgtggtaatggccgtgtggttcatatcgactttggtgattgtttcgagatcgcaatgcaccgagagaaatacccagagcgagttccgttccgacttactcgcatgttgacgttcgccatggaagtcagcaacattgagggtagctaccgtatcacttgcgaggctgtcatgcgtgttctacgagagcacaaggattccctgatggcagttttggaggctttcatccacgaccctctaatcaactggcgtctgggtacacaagagtctcccgaccgagtgtctctcactgcggatcgccgccagtccatcatggacggtgtcaatttcgaacccggcgcccagccgcccggcgattattcgcgtcgccgccgcccatccatgcttgaaggtggtatcctcgacgccccggaaggcgttccacaagaagcccgcgaggcacagaatgcccgtgctctccaggttctcgcccgagtcaaggagaagctcactggacgagacttcagaaataacgaagagctgagtgtcagcgaccaggtggacaagctcattgcgcaggcaaccaatgttgagaatatctgtcaacactggattggatggtgtagtttctggtaa

SEQ ID NO: 2553 - protein, 2384 aa, Penicillium chrysogenum
MAQAGAITDVTQRLFVELKSKNEEARARAAYELYDNVLSVSRDWPSEKFVEFYNAVSQRIAQLVVNGSDANERIGGLLALDRLIDFDGVDAAQKTTRFASYLRSALRSNDNVVLVYAARSLGRLAKPGGALTAELVESEIQSALEWLQSERQESRRFAAVLVIRELAKGSPTLLYGFVPQVFELVWVALRDPKVLIRETAAEAVGECFEIIVARDSQVRQSWFARIHDEALLGLKSHNIDWIHGSILIIKELILKGTMFMKEHYRNACEIILRLKDHRDPKIRTEVVLTIPILASYAPTDFTEIYLHKFMVYLQAQLKRDKERNSAFIAIGKIANAVGTAIGQYLDGIIIYIREGLAMKARNRSGVNEAPMFECISMLSLAVGQALSKYMEALLDPIFACGLSKSLTQALVDMAHYIPPIKPMIQEKLLDMLSIILCGTPFRPLGCPENRLPPMPSFAKDFAPHELHSDSDIALALHTLGSFDFSGHILNEFVRDVAINYVENDNPEIRKASALTCCQLFVHDPIINQTSGHSIQVVSEVIDKLLTVGIGDPDPEIRRTVLWSLDRKFDRHLARPENIRCLFLAVNDEVFDVKEAAICIIGRLSSVNPAYVFPPLRKLLVNLLTGLGFANTARQKEETAQLISLFVSNATKLIRSYVDPMVTALLPKSTDINPGVAATTLKAVGELASVGGHEMRQYLPQIMPIILDSLQDLSSHNKREAALRTLGQLASNSGYVIEPYMEYPHLLAVLINIIKTEQTGSLRKETIKLVGVLGALDPYKYQQISEIEPDVHHINEIQNVSDVALIMQGLTPSNEEYYPTVVIHTLMQNILRENSLAQYHSAVIDAIVTIFKTLGLKCVPFLGQIIPGFILVIRSAPASRLESYFNQMAILVNIVRQHIRTFLPEIIEVIKDFWDASYQIQGTILSLVEAIARSLEGEFRKYLAGLIPLMLDTLDKDTSPRRQPSEKILHALLIFGSSGEEYMHLIIPSIVRLFDRPQNPQSIRKSAIDSLTKLSRQVNVSDFASLMVHSLSRVVAGGDRVLRQAAMDCICALIFQLGQDFTHYIHLLNKVLKTNQIAHTNYQILVTKLQKGDPLPQDLNPEEVYSFPTDDTNFSEIGQKKIVVNQQHLKNAWDASQKSTRDDWQEWIRRFSIELLKESPSPALRACASLAGIYQPLSRDLFNAAFVSCWTELYDQYQEELVRSIEKALTSPNISPEILQILLNLAEFMEHDDKALPIDIRTLGKYAAKCHAFAKALHYKELEFEQDQNSGAVEALITINNQLQQSDAAIGILRKAQAYRDVELKETWFEKLQRWDEALAAYKRREKTDPDSFGITMGKMRCLHALGEWKVLSDLAQEKWNQASLEHRRAIAPLAAAAAWGRGQWELMDSYLGVMKEQSPDRSFFGAILAIHRNQFDEANMYIEKARNGLDTELSALLGESYNRAYNVVVRVQMLAELEEIITYKQNIGDPEKQDAMRKTWNQRLLGCQQNVEVWQRMLKVRALVTAPRENLDMSIKFANLCRKSNRMGLAERSLASLETVVSDANGTRTIAPPEVTYARLKFSWANGHQLESLEMMKEFTSGLTDDFSRYNTLMVSNGEHHGANGVNGVVDQNHPDAISLNERIGDVNKFRKLLSKSYLRQGEWQTALQRGDWRPEHVREVLNAYSAATQYNRDSYKAWHSWALANFEVVTTIANQASREGIPAPVPAHIVTEHVIPAIRGFIRSIALSLTSSLQDTLRLLTLWFNHGGDHEVNTVVTEGFTAVNIDTWLAVTPQLIARINQPNIRVRGAVHRLLAEVGKAHPQALVYPLTVAMKSNVTRRSQSASNIMESMRQHSAKLVEQADLVSHELIRVAVLWHELWHEGLEEASRLYFGDHNVEGMFSTLAPFHDMLDKGAETLREVSFAQAFGRDLAEAKHYCMMYRESEEIGDLNQAWDLYYTVFRKISRQLPQLSTLDLKYVSPRLKDCADLDLAVPGTYQSGKPVIRIMSFDPILHVLQTKKRPRRMTLKGSNGSSYMYLVKGHEDIRQDERVMQLFGLCNTLLDNDGESFKRHLSVQRFPAIPLSQSSGLLGWVSNSDTLHALIKEYRESRRILLNIEHRIMLQMAPDYDSLTLMQKVEVFGYAMDNTTGKDLYRVLWLKSKSSEAWLERRTNYTRSLGVMSMVGYILGLGDRHPSNLLLDRGNGRVVHIDFGDCFEIAMHREKYPERVPFRLTRMLTFAMEVSNIEGSYRITCEAVMRVLREHKDSLMAVLEAFIHDPLINWRLGTQESPDRVSLTADRRQSIMDGVNFEPGAQPPGDYSRRRRPSMLEGGILDAPEGVPQEAREAQNARALQVLARVKEKLTGRDFRNNEELSVSDQVDKLIAQATNVENICQHWIGWCSFW

SEQ ID NO: 2554 - DNA, 7185 bp, Vitis vinifera
  CDS (1)..(7185)
atggcttccactgctcaatctatccggttcggcgcccccgccgccggctccagcctcgacgcccttaaccgcattctcgccgacctttgcgctcgcggccctcccaaggatggggctgcattagctttgaagatacatttggaggaagaagctcgtgatcttagtggagaagctttctcccgtttcatggatcagttgtatgatcgcatatctaatcttttagacagtaatgatgttgctgaaaatatgggagctttaagagctattgatgagttgatagatgtggcactaggcgagagtgcttccaaagtttcaaaattctctggttatgtgcggactgtgtttgaggcaaaacgtgaccgtgatgttttaatccttgctagtacagttcttggccacctggctagggctggtggagcaatgactgcagatgaagtggagtgccaggtgcaaaatgcattggagtggcttcgtggagaaaggatagagtatcgtcgtttcgctgctgtgttaatcttgaaagaaatggcagaaaatgcttcaactgtcttcaatgttcatgtacctgagtttgtggatgctatctgggttgctttgagggatccgacattgcccattcgggaacgggctgtagaagcattgcgtgcttgtcttcgtgttattgaaaagcgtgaaacacgttggcgtgtgcaatggtattatcgtatgtttgaggctacacaagatggattgggtagaaatgctccagtacacagtatacatggctctctgcttgcagttggagagcttctgaggttggttaagatgttcatgatgtcaaggtacagagaagttgcagacattgttatcacgtacctagagcacaaggaccgacttgttcgccttagtattacctcactgttacctcgcattgctcatttcctgcgagatcggtttgttactaactatttgaatatatgcatgaatcatattcttgcagttttaagacagccagctgaacgtgatagtgggtttattgctctaggggagatggctggtgctttggatggggaacttgttcactatatgccgacaattatatctcatttacgtgatgcgatcgctcctcgaagaggcagaccctctcttgacgctttgacttgtgttgggagcattgcaaaggctatgggatctgttatggaaccttatgttcgcagccttttagatgttatgttctttcctggtctttcccacgcacttatagaagcccttgaacaaataactgccagtattccatctttgctacctactattcaagatcgcttgcttgactgcatctcaatagctctttcaagatctcattatcctttagcaaggccggcggttgccatggctcgaggaagcactgtgaatactgctcagcaagtcttagactttagcagtcctgccctagtgcaactttctttgcagactcttgctcattttaatttcaaggtttgtgtacttacattgtctaatatgaagctctcaaattccttttctggcactacttgtccacaatttagttctagtaggtccaatcgaactggaggaaaacgccggcgtcttgttgaggagattgtggaaaaacttcttattgcagctattgcagatgctgatgttactgttcggcgttcaatctttttgtctctgcatgaaaatggaggttttgatgaatttttagcacaagctgatagcttgagtgcggtctttgctgctttaaatgatgaggattttgatgttcgagaatatgcaatctcagtttctgggagattatcagaaaagaatcctgcatatgttcttccagcacttcgtcgccatctcatacagttgttgacatatctagagcagagtgcagatagcaaatgtagagaagaaagtgcaaaattactcggttgcttaattcgcaactgtgaacgactaatacttccatacattgctccgatacacaaggctcttgttgcaaaacttgctgagggctctggggtcaatgctaataatggcatcatcagtggagttcttgtaactgttggggatcttgcaagagtgggtggttctgcaatgagagataatgtaactgatcttatgccattaattgttgaagctctaatggatggagctgctgtcaccaaacgtgaagtggctgttgcaactcttggtcaagttgtgcaaagcactgggtatgttatagctccatacaatgcatacccacagttgcttggcttactcttgaagctgcttaatggtgagttggcctggactaccaggcgagaagtactaaaggttcttggtattatgggagctttggatccacatgtgcataagcgaaatcagcagtgcttgccagggttacatggagaagttgctcgtccagctagtgatacaggtcaacacattcgttccatggatgaactgcctatggacctttggccatcttttgcaacatctgaagattattattcaacggttgctatcaattcccttatgcgaattcttagggatgcttcactttctagttaccaccaaaaggttgtgggatctcttatgtttatatttaagtctatgggtcttggttgtgttccatacttaccaaaggttttgcctgatctttttctcactgttcgtacttgtgaagatggcctaaaagaatttatcacctggaagcttggaactctagtgtctattgttcgccagcatattcgtaaatatctgccagagttgctgttgcttatttctgaattatggccatccttcagtttgccatctagcaatcgccctattctgcacctagtggaacaactttgcttggctctcaatgatgaattcagaacatatcttcctctcattcttccatcgtgtattcaagttctgagtgatgcagagaggtgtaatgattacacttatgttcttgatattcttcacacccttgaagtgtttggtgggacattggatgaacatatgcatctactacttcctgcgctcattcgattgttcaaagtggatgcgtcagtggctataagacgtgctgccttcaaaaccctgacgagattaattcctcgtgtgcaggtcactggccacatctctgctctcgtgcatcatttgaagctagtcttggatgggtcaaatgacgagcttcgaaaggatgctgttgatgcactatgttgtcttgctcatgcccttggaggagacttcaccatttttattccatcgattcataagcttttgatgaagcatcgcttgcggcacaaagaatttgaagaaattgaagggcgtttacagaggcgtgagccactaatattgggaagcactgctgctcaacgattaatcagtcggtttccagtggaggttactagtgaccctttaaatgatgttaatgatggtcgattgcgcactgctggagaggcttctcagcgtagtaccaaggaagattgggcagaatggatgaggcattttagcattgaacttctaaaggaatcaccctctcctgctttacgaacctgtgctaggcttgcacagttgcagccttttgtggggcgggagttgtttgcagctggttttgttagctgttgggcacagctaaatgatactagtcaaaagcaattagttcggagtttagagatggcattttcatctccaaatattcctcctgagattcttgcaacacttcttaatttggctgagttcatggaacatgacgagaaacccctccctatagacattcggctccttggagcccttgcggaaaagtgccgtgcatttgcaaaggctttgcattataaagaaatggaatttgaaggtgcacgttccaagaagatggatgcaaacccagttgctgtagttgaagctcttatacatataaataatcaattgcaccaacatgaggctgcagttggaatattgacctatgcccaacaaaatttggatgtccaattaaaggagtcatggtatgagaaactacagcgctgggatgatgctctcaaggcatacacagctaaagcttctcaggcatcaactccacatcttgttgcatcttatatagggcggatgcggtgccttgctgcattggctcgatgggaagagcttaacaacctgtgcaaggagtactggaccccagctgaaccagctgcacgactggagatggcaccaatggctgctaatgctgcatggaacatgggagagtgggatcaaatggcagactatgtttctcggctggatgatggtgatgaaacaaaactgagggttttggggaatactactgctagtggtgatggaagtagtaacggtacattcttcagggcagttttactagttcgtcgaggaaagtatgatgaagcgcgggagtttgttgagagagcaaggaaatgtttggcaacagaacttgctgctttggttctagagagctatgatcgtgcctacagcaacatggttcgtgttcagcagctctcagaattagaggaggtcattgattattgtactcttcctgtgggaaaccccgttgctgaagggcgacgggcccttattcgcaatatgtggactgagcgcatacaaggggcaaagcgaaatgttgaggtctggcaagtacttctagcagttagagcacttgtgctgcctcctatcgaggacatcgaaaattggctcaagttttcttatctttgccgaaagaacgggcggattagccaggctaggtctaccttaattaaacttctacagtatgatcccgaaacatctcctgaaaatgtgcgataccatggccctcctcaagtaatggtggcatatttgaagtaccaatggtcccttggggaggatcttaagcggaaggaagcatttggcaggctgcagaatttagcgatagaactatcaagtgcaaatattcaatctgctacatcaactggtctgatgagcacttcaagtgtgagtgtcccacttctggcccgtgtatatcgtagacttggaacctggcagtgggcactttctcctgcattagatgaagattctatacaggaaattctttccgcatttaggaatgcgactcaatgtgcaacaaaatgggctaaagcatggcattcatgggcactctttaacactgcagtcatgtctcattatactttaagaggttttcctaatattgcagcacagtttgttgttgcagccgttactggatattttcattcaatagcgtttgcagcaaatgccaaaggagtggatgatagtttgcaggatatacttcgactcctcactttgtggttcaaccatggagctactgctgaggttcaaatggcattacataaaggattttcttatgttaatattgacacatggctggttgttttacctcaaataattgccaggatacattcaaataaccatgctgtgagagaattgatacaatctcttttggtgcgaattggagaaagccatccacaggctctcatgtacccccttcttgtagcatgtaaatcaattagcaatttacgcagagcagcagctcaagaagtggttgacaaagtccggcagcatagtggcacacttgtagatcaggcacaacttgtatcgacggagctaatcagagtggcgatactctggcatgaaatgtggcatgaggcattggaagaagctagtcgtttatattttggtgagcataatactgaggggatgctaaaagcattggagcccttacatgaaatgctcgaggaaggggctatgcgggacgatattaccgccaaagaaagtgccttcattcaggcatatcgccatgaattgttggaggcctatgaatgctgcatgaaatttaagaggaccggaaaagatgctgaacttactcaggcatgggatctatactatcatgtgttcagacggatagataagcagctccaagctcttactaccctggacctgcaggcaagatgcaactttgaatttattctgtttcaccgcaagcttgctgttcctgggcaatatcgcgcaggatcaccgttggtcacaattgaatattttgcacatcaacttgttgtcatcacatctaaacagcgtccccggaaattaaccatacgtggcagtgatggagaagattatgccttcttgctaaagggacatgaagatttacgccaagatgaacgtgtgatgcagcttttcggtctggtgaatactctactggagaatgaaagaaaaacggcagaaaaggatctgtctattcaacgatatgctgttattccattatctcccaacagtgggttaattggatgggtcccacattgtgacaccttgcaccatctcattcgggagtacagggatgccaggaagattaccctcaaccaagagcacaaatacatgcttggttttgctcctgattatgatcatttaccactcattgctaaagtggaagtatttgagtatgcattgcaaaatactgaaggaaatgacctggcaagggttctttggttgaaaagtcgcacttctgaggtatggcttgacaggaggacaaattatactagaagtttggctgtcatgagtatggtgggctaccttcttggtttaggtgatcgacacccaagcaatcttatgcttcatcgctatagtgggaagatcttacacattgattttggtgactgctttgaagcttcaatgaaccgagagaagttccctgaaaaggttcccttccgcctgacaaggatgcttgttaaagctatggaggttagtggtatcgagggcaatttccgttcaacttgtgaaaatgtaatgcaagtgctccgaacacatagggatagtgtcatggctatgatggaggccttcgttcatgatcctctcatcaattggcgtcttttcaacttcaatgaagtccctcaaatgtctacatttgcaagcactcatgtagctcctgttgcaaatagtgaagaatccgctccaaacagagagcttgctcaacctcaacgtggtgctcgggagaaggagcttcttcaggctgtcaatcaacttggtgatgctaatgaagttctaaatgagcgtgctgtggtggtcatggctcggatgagtaataaacttactggacgtgatttttctacttttgatcatggtttaaatgttaaagtgcaagtccaaaagttgattacccaagctagatcacacgagaatttgtgccaaaactatgtcgggtggtgtcctttttggtga

SEQ ID NO: 2555 - protein, 2394 aa, Vitis vinifera
MASTAQSIRFGAPAAGSSLDALNRILADLCARGPPKDGAALALKIHLEEEARDLSGEAFSRFMDQLYDRISNLLDSNDVAENMGALRAIDELIDVALGESASKVSKFSGYVRTVFEAKRDRDVLILASTVLGHLARAGGAMTADEVECQVQNALEWLRGERIEYRRFAAVLILKEMAENASTVFNVHVPEFVDAIWVALRDPTLPIRERAVEALRACLRVIEKRETRWRVQWYYRMFEATQDGLGRNAPVHSIHGSLLAVGELLRLVKMFMMSRYREVADIVITYLEHKDRLVRLSITSLLPRIAHFLRDRFVTNYLNICMNHILAVLRQPAERDSGFIALGEMAGALDGELVHYMPTIISHLRDAIAPRRGRPSLDALTCVGSIAKAMGSVMEPYVRSLLDVMFFPGLSHALIEALEQITASIPSLLPTIQDRLLDCISIALSRSHYPLARPAVAMARGSTVNTAQQVLDFSSPALVQLSLQTLAHFNFKVCVLTLSNMKLSNSFSGTTCPQFSSSRSNRTGGKRRRLVEEIVEKLLIAAIADADVTVRRSIFLSLHENGGFDEFLAQADSLSAVFAALNDEDFDVREYAISVSGRLSEKNPAYVLPALRRHLIQLLTYLEQSADSKCREESAKLLGCLIRNCERLILPYIAPIHKALVAKLAEGSGVNANNGIISGVLVTVGDLARVGGSAMRDNVTDLMPLIVEALMDGAAVTKREVAVATLGQVVQSTGYVIAPYNAYPQLLGLLLKLLNGELAWTTRREVLKVLGIMGALDPHVHKRNQQCLPGLHGEVARPASDTGQHIRSMDELPMDLWPSFATSEDYYSTVAINSLMRILRDASLSSYHQKVVGSLMFIFKSMGLGCVPYLPKVLPDLFLTVRTCEDGLKEFITWKLGTLVSIVRQHIRKYLPELLLLISELWPSFSLPSSNRPILHLVEQLCLALNDEFRTYLPLILPSCIQVLSDAERCNDYTYVLDILHTLEVFGGTLDEHMHLLLPALIRLFKVDASVAIRRAAFKTLTRLIPRVQVTGHISALVHHLKLVLDGSNDELRKDAVDALCCLAHALGGDFTIFIPSIHKLLMKHRLRHKEFEEIEGRLQRREPLILGSTAAQRLISRFPVEVTSDPLNDVNDGRLRTAGEASQRSTKEDWAEWMRHFSIELLKESPSPALRTCARLAQLQPFVGRELFAAGFVSCWAQLNDTSQKQLVRSLEMAFSSPNIPPEILATLLNLAEFMEHDEKPLPIDIRLLGALAEKCRAFAKALHYKEMEFEGARSKKMDANPVAVVEALIHINNQLHQHEAAVGILTYAQQNLDVQLKESWYEKLQRWDDALKAYTAKASQASTPHLVASYIGRMRCLAALARWEELNNLCKEYWTPAEPAARLEMAPMAANAAWNMGEWDQMADYVSRLDDGDETKLRVLGNTTASGDGSSNGTFFRAVLLVRRGKYDEAREFVERARKCLATELAALVLESYDRAYSNMVRVQQLSELEEVIDYCTLPVGNPVAEGRRALIRNMWTERIQGAKRNVEVWQVLLAVRALVLPPIEDIENWLKFSYLCRKNGRISQARSTLIKLLQYDPETSPENVRYHGPPQVMVAYLKYQWSLGEDLKRKEAFGRLQNLAIELSSANIQSATSTGLMSTSSVSVPLLARVYRRLGTWQWALSPALDEDSIQEILSAFRNATQCATKWAKAWHSWALFNTAVMSHYTLRGFPNIAAQFVVAAVTGYFHSIAFAANAKGVDDSLQDILRLLTLWFNHGATAEVQMALHKGFSYVNIDTWLVVLPQIIARIHSNNHAVRELIQSLLVRIGESHPQALMYPLLVACKSISNLRRAAAQEVVDKVRQHSGTLVDQAQLVSTELIRVAILWHEMWHEALEEASRLYFGEHNTEGMLKALEPLHEMLEEGAMRDDITAKESAFIQAYRHELLEAYECCMKFKRTGKDAELTQAWDLYYHVFRRIDKQLQALTTLDLQARCNFEFILFHRKLAVPGQYRAGSPLVTIEYFAHQLVVITSKQRPRKLTIRGSDGEDYAFLLKGHEDLRQDERVMQLFGLVNTLLENERKTAEKDLSIQRYAVIPLSPNSGLIGWVPHCDTLHHLIREYRDARKITLNQEHKYMLGFAPDYDHLPLIAKVEVFEYALQNTEGNDLARVLWLKSRTSEVWLDRRTNYTRSLAVMSMVGYLLGLGDRHPSNLMLHRYSGKILHIDFGDCFEASMNREKFPEKVPFRLTRMLVKAMEVSGIEGNFRSTCENVMQVLRTHRDSVMAMMEAFVHDPLINWRLFNFNEVPQMSTFASTHVAPVANSEESAPNRELAQPQRGAREKELLQAVNQLGDANEVLNERAVVVMARMSNKLTGRDFSTFDHGLNVKVQVQKLITQARSHENLCQNYVGWCPFW

SEQ ID NO: 2556 - DNA, 7083 bp, Cryptococcus neoformans var
  CDS (1)..(7083)
atgtcttcacaatcagacgttctcgacaacatctttcagcgtctgtccgccaggtcggaagatgtccgcgcccaggccggccaagatcttgcagagcacgtcgtagcttacacccaagaatacccgggacatgatgcttcgaagggtgtatgggcacaggtctttcacaagacattcgagtttactaggagcaacaatcagctagagagattaggtgctattattgccatatcgcaattgttacaattaaccaaggatgacacaccggatcgtgctcagcagaaggttctacgcctctatgaatatcttcgacctctcacaacatgcggcgattcgaccgtcatgcttcccgcctctcttgtcgtggaagatatggtccgcaattcccccacgcttcacaccgatactttccttggcaaagaagttggacaagcgctggtaatgattgatgactcacgtcaagaagtcggccgtttcagtggtgccctccttctatatgctttcgctcgtgctgccccaggagtattccatcagtacatctccaaggtcttggaaaagatttggatcccccttcgtgactctagatctgtcgttcgagagcgcgcgagcatgctcttatctacctgccttgacactctcaaaacccgaggagaccgaccatccaccgatacctaccgcaagatctttgaagaggcccgtcttggtctcctcaaagccagctcgacagagtctatcttgggttctctccttgcgttcaattccatgctccaaaatcaacagctttcgatggcggaatattaccgctccatttgcgaactaaccttcaaataccgtgattcgaaggaagtctccatcaggaaggctgtcattgcccttataccatctatggcgacatatgacagcgacgacttcgaggcacattatttgcataggggtatggcgtatctgctacaagctttgaacagaccggcagacagggacatttcgtatgtggcgttgggtcatatggctgtacatcttggatcgaaaatgaagccttttattgacgacattatgcgaatcattcgggatcatctacgcatgcgaggcaaaaaaaatgccccatacgaagcccccatcttccagtgtcttgcgatgcttgctacgtctgtcgggcctatgcttacccgccagatgcacgaaatcctcgacctcatgttcccctggggcctttccgaacccttatgcacagctcttcaggccaccgcctcacatatccctcctctattgagaactatccaagataggttgttggagatgctttcgcagaccttgaccggacaaagctatagaccgttaggtgcgcctgccccaagaggtggagctcagatggatcttaaccttttgcaatctacaaccaacgcccagtcaacagacactctcaaacttgctcttcgtctccttgcgcgcttcgacttcgtcggtcatacccttagcgagtttgtccgtgatgctgctcttccgtacctcgaacacgacagcgtcgaggtccgacgtgaagctgtgttggcaaccacaaccctgtttatgacggacccaatctgtcagcagacgagcagtaactcggtcgagattgtaaatgatgtgttgagtaaattgttaactgtagccattaccgatcctaatgctggaatccgccggacggtacttgatcaccttgaagacaagtttgatcgccatctcgctcaggctgccgatatccgatgtctctttatcgctctcaacgatgaagtgtttggtaatcgtgaaaggaccatctcgatcattgggagattggcacaccataacccggcttatgtgatgcctcatttgagaaagagtttgatcaatattgtcactgagttggagtattctaccaatgcgcgacaaaaggaagagagtgccaaactgctctgtcttatgatcggcgctgccgctggtctcgttaagtcttatgcccctaccatcttgtccgttctcctccgcactgcttccagccccgaatcttctatcggtgttcaagccgaatgcctcaaatgtattggcgagctcgcaagagttgcgggcgaagaactcgtcccttccgtccgagccattctcgacctcgtcattgaaatgctcaacgaccagtcttcccccgccaagagagatactgccctcaagaccttggggcagattgcgagtaacacaggagaggttatcaagccctatacggattaccctcagttaatgggggtgctgtttaagtttttgagaatggaggcgaattcgagtgtcaggcaagagactatcaagaccattggtatgctgggtgccttggatcccttcaagcacaagactttgttgggtgatgtggacgaccctatcgacgaagggacaacctcgcgagtcaatgacattgtgttgctcaaccaacacaactcttcagtcaacgacgagttcttccagactgttgtcatccattctttagttaacgtcttgcatgactctacttacaaggatcattatcaagccgtggaagccattatgatgatttttaggactcaacgattgagatgtgtcaacttccttcctcagattgtccctgcattcctcaatgtcattcgcattgcacattcctctcgtaccgagctttacctcaaacaacttgcgcagtttattacaatcgttaagctgcatatccgcaactacctcaatgatgtctttgatctcatccacgagttttggaaccccaactctacccttcagatcaccatcatctccctcgttgaggccattgcgaaggccgtggaaggagaattcaaggcatacttgcccaagcttttgcagcaaattttgagatcgtttgatggagacttgtcagccaagcaccttccggagctgaaactcaacactttgcttcagatcctgaaagcgttctacgtctttggcgaatctattgaagactatcttcaccttgtgttgcccgtcattgttcgatcttttgagaacccggccgcccccgactctctccgcattgctgctttgcgcactacaggacaactttgtcgtaaagtcaacttttcggaccacgcaagtcagatcatccacccgttagtaagaactttgggtaacagctcagaggagttgaggcagaccgcaatggaaacactttgtgttttggtgttgcagttcggtccagattatgctatcttcattcctatggtaaacaaagccttggtggaaaacaaaatatcacaccctggttacgaagccctcataaccaagttgctcaaccgcgagcgccttcctcctgaccttggtcctgttgaaagatacgccagcgactctgccgccgaagcctctgccccagagcctgttgctcttaaggtcaaccagcaggctcttaaactggcttgggactgttcccatttgcttaacaccagcagcaggaccgagtggatctcttggattattggcttgggtcatgagatgatgagagaaagccctagtcaagccataagagctgcgaggagtttggcgttgagtagtgtggccttcaccaaagaactgtttaatgttgctttctactcatgctggcaggagctgtttgagagctaccaggaggatttatggcacaatcttgaccgagcaatcaaaaaagatgatgtccccggcgatgttgtcaacatgattctcggggctacccagttcttggaacacgatgaaaaggaggtagcgatcgaaagccgtgttttgggcagcgtcgctgccaattatcaagctctcgcagtcgctttacactacaaagaacaggaattcttcctagatcccagcaaagaagtcattgaagacctcattgacgtcaaccagaaactccagcaaagcgatgctgcctggggtacccttgaatgggcccagacagagatgggaatgaccactgaagtcgagtggtacgaaaagcttggaaggtgggaggaagcgttacaagtgtggaacgagcgagatgccgatgcgtcgaccactttctcagagtgggagatcactgaaggcaaggtcacttgtctgcacgctatgggcgaatgggaacaactctctgattttgtccaggctcgatgggccaacaggacggctgaggagaagaagttgctttcaccattggcggcagcggctagttggtcgctgaaacagtgggatctgatggatgactacatctctgccatgaagggcgatggagcagatcgcgcgttcttcaaggctatcctagctgtgcacagaaaccaaattcctgccgctttgaagcagatctccaaggcacgagaaaggttggatccagagttgactaccttaactggtgacagctatggccgagcgtacgacactgtcgtgaggattcaaatgcttgctgagctggaggaaatcattgcctacaaggaccacgccgacgagcctgcccgacaggagatgcaacgacagacttggaagaagcggctggccggatgtcagcgtgatgttgaagtttggcagcgcattcttcaggtcagatcccttgtgctcaagcctaatgaggatatggacacttggattgagtttgcggatctctgtcgaacatctgacaggctgaacttggccgagaaaacgctgacatctcttgttggcttccaatacccatcaatggaagacactcgaggacgagcgccacctcccatcatcttcgcttacctccgtatggcttgggcgaagaacctacaaatcgactctcgagaagaacgttacgagactctccaacacctgcgcgacttcaccgaccagcttaccgacgacgttggtattggagcgaggggacccaacggcagactcatgttacctgaccagaagttgtatggatcttacaccaagctgctggcgcagtgccacgttgagttgggtcagtggcaagcgaccttgagggaaagccaaggatctgctgatccctcgggcattctccacgactactgtctcgccactgagcttgaccctgagtggtaccaagcttggcacacttgggccttggccaatttcgaggtcattacccagcttgaagtgtcgcagcaaggtctctcacctgttcactttacgacctatatcattcctgctgtcgaaggtttcctcaagtctatctcgctttctcccggcaactccttgcaagatactttgaggctgttgactctctggtttacatatggatattctagcggagtcactgcggctgttagccaaggtcttcccactgtcaacattgatgtctggctcgaggttattcctcagatcattgcccgtatccagacgcctcgccagtctatacagcagctcattgtacaattgttgcatgatattggcaaagcccatccccaagcccttatttaccctcttaccgtcgcctccaaatctacagtcgctgcccgacgcactgttgcccaaaatattacgcataaaatgcgagagcactctcccaagattgttgaccaggccgagcttgtcagtacagagctcatccgagcagctatcttatggcatgagatgtggtatgatggtttggaagaagcgtcaaagcactactttggtgaccacgatatccctggcatgttaggagtccttgagcctttgcatgagattgtcgaaaacggacctcaaaccttgcgtgagacatcctttatccaatcgttcggccatgatttgcgtatcgctcgggagcatctcaagcgttaccgtataactcaggatggtactgaaatccaacaagcatgggatgtctattattccgtcttccagcgtctgggcaaacagctcaagctcctcaacgtcattgagctgcaatatgtctcgcccaagttaatggccgttcgagacttggatattgcagttccaggtacctaccagagtggcaagcctatcatcggtattaagaacgttatcccaaccttcaaggtcattgcttccaagcaaaagccaagacagtgcagcatgcgcggtatggatggcaaggaatatgcatattgcctcaagggtcacgaggacttgcgacaagacgagcgtgtcatgcaactctttggtttggtcaacactcttcttaataatgaccacgagtctgccaaacgacatctcagtatccagcgattttctgttactcctctttcccctagtgccggtttactcggttgggttacccacagtgatacaattcatgttctcatcaaacaataccgagaccaaaggaaaatcttggtggatattgagcacaaacttatgcagcagatgtctgatgagagctacgattctctaccgctcttgcacaaggtcgagatcttccagtatgctttggataacacgactggtcaagatttgtaccgcatcctgtggctcaagtctcgtaactcagatatctggcttgaaagaaggaccacctacaccagaagtctgggtctcaattccatggtcgggtatatccttggtctgggtgacagacatccttcaaacctgttgctcgatcagattacgggtaaaatggtgcacattgactttggtgattgtttcgaggttgctcaacagagagacaaataccctgagaaagtacctttccgacttacccgaatgctcattcatgccatggaggtctgcggtatcactggtaacttttcgcgaagttgtgaagtgtccatggaagtccttcgtgacaacagggaatcacttatggccgtccttgaagcatttgtgtacgaccctcttattgcttggcgtcttacagcgacggacaaacgacctggtggtgttggcgaagtcaaggacctggatgacccggctgtgtacggaaagcagaggaaaaacaaggcgaacgagacggagattctcaatgatgtggaaaataccgaggtgaagaacgacaagggtctgcaggtcattgaacgagtacgacgaaaattgaccggtcgagactttaagcccgatgttgtactcgatgtcaagtcccaggtggagaagttggtggttgaggcgacaaagacagagaatctttgtgtagcattcttgggatggtgttcgttctggtaa

SEQ ID NO: 2557 - protein, 2360 aa, Cryptococcus neoformans var
MSSQSDVLDNIFQRLSARSEDVRAQAGQDLAEHVVAYTQEYPGHDASKGVWAQVFHKTFEFTRSNNQLERLGAIIAISQLLQLTKDDTPDRAQQKVLRLYEYLRPLTTCGDSTVMLPASLVVEDMVRNSPTLHTDTFLGKEVGQALVMIDDSRQEVGRFSGALLLYAFARAAPGVFHQYISKVLEKIWIPLRDSRSVVRERASMLLSTCLDTLKTRGDRPSTDTYRKIFEEARLGLLKASSTESILGSLLAFNSMLQNQQLSMAEYYRSICELTFKYRDSKEVSIRKAVIALIPSMATYDSDDFEAHYLHRGMAYLLQALNRPADRDISYVALGHMAVHLGSKMKPFIDDIMRIIRDHLRMRGKKNAPYEAPIFQCLAMLATSVGPMLTRQMHEILDLMFPWGLSEPLCTALQATASHIPPLLRTIQDRLLEMLSQTLTGQSYRPLGAPAPRGGAQMDLNLLQSTTNAQSTDTLKLALRLLARFDFVGHTLSEFVRDAALPYLEHDSVEVRREAVLATTTLFMTDPICQQTSSNSVEIVNDVLSKLLTVAITDPNAGIRRTVLDHLEDKFDRHLAQAADIRCLFIALNDEVFGNRERTISIIGRLAHHNPAYVMPHLRKSLINIVTELEYSTNARQKEESAKLLCLMIGAAAGLVKSYAPTILSVLLRTASSPESSIGVQAECLKCIGELARVAGEELVPSVRAILDLVIEMLNDQSSPAKRDTALKTLGQIASNTGEVIKPYTDYPQLMGVLFKFLRMEANSSVRQETIKTIGMLGALDPFKHKTLLGDVDDPIDEGTTSRVNDIVLLNQHNSSVNDEFFQTVVIHSLVNVLHDSTYKDHYQAVEAIMMIFRTQRLRCVNFLPQIVPAFLNVIRIAHSSRTELYLKQLAQFITIVKLHIRNYLNDVFDLIHEFWNPNSTLQITIISLVEAIAKAVEGEFKAYLPKLLQQILRSFDGDLSAKHLPELKLNTLLQILKAFYVFGESIEDYLHLVLPVIVRSFENPAAPDSLRIAALRTTGQLCRKVNFSDHASQIIHPLVRTLGNSSEELRQTAMETLCVLVLQFGPDYAIFIPMVNKALVENKISHPGYEALITKLLNRERLPPDLGPVERYASDSAAEASAPEPVALKVNQQALKLAWDCSHLLNTSSRTEWISWIIGLGHEMMRESPSQAIRAARSLALSSVAFTKELFNVAFYSCWQELFESYQEDLWHNLDRAIKKDDVPGDVVNMILGATQFLEHDEKEVAIESRVLGSVAANYQALAVALHYKEQEFFLDPSKEVIEDLIDVNQKLQQSDAAWGTLEWAQTEMGMTTEVEWYEKLGRWEEALQVWNERDADASTTFSEWEITEGKVTCLHAMGEWEQLSDFVQARWANRTAEEKKLLSPLAAAASWSLKQWDLMDDYISAMKGDGADRAFFKAILAVHRNQIPAALKQISKARERLDPELTTLTGDSYGRAYDTVVRIQMLAELEEIIAYKDHADEPARQEMQRQTWKKRLAGCQRDVEVWQRILQVRSLVLKPNEDMDTWIEFADLCRTSDRLNLAEKTLTSLVGFQYPSMEDTRGRAPPPIIFAYLRMAWAKNLQIDSREERYETLQHLRDFTDQLTDDVGIGARGPNGRLMLPDQKLYGSYTKLLAQCHVELGQWQATLRESQGSADPSGILHDYCLATELDPEWYQAWHTWALANFEVITQLEVSQQGLSPVHFTTYIIPAVEGFLKSISLSPGNSLQDTLRLLTLWFTYGYSSGVTAAVSQGLPTVNIDVWLEVIPQIIARIQTPRQSIQQLIVQLLHDIGKAHPQALIYPLTVASKSTVAARRTVAQNITHKMREHSPKIVDQAELVSTELIRAAILWHEMWYDGLEEASKHYFGDHDIPGMLGVLEPLHEIVENGPQTLRETSFIQSFGHDLRIAREHLKRYRITQDGTEIQQAWDVYYSVFQRLGKQLKLLNVIELQYVSPKLMAVRDLDIAVPGTYQSGKPIIGIKNVIPTFKVIASKQKPRQCSMRGMDGKEYAYCLKGHEDLRQDERVMQLFGLVNTLLNNDHESAKRHLSIQRFSVTPLSPSAGLLGWVTHSDTIHVLIKQYRDQRKILVDIEHKLMQQMSDESYDSLPLLHKVEIFQYALDNTTGQDLYRILWLKSRNSDIWLERRTTYTRSLGLNSMVGYILGLGDRHPSNLLLDQITGKMVHIDFGDCFEVAQQRDKYPEKVPFRLTRMLIHAMEVCGITGNFSRSCEVSMEVLRDNRESLMAVLEAFVYDPLIAWRLTATDKRPGGVGEVKDLDDPAVYGKQRKNKANETEILNDVENTEVKNDKGLQVIERVRRKLTGRDFKPDVVLDVKSQVEKLVVEATKTENLCVAFLGWCSFW

SEQ ID NO: 2558 - DNA, 7278 bp, Gibberella fujikuroi
  CDS (1)..(7278)
  misc_feature (1591)..(1591): y is t or c
  misc_feature (5009)..(5009): r is g or a
atggcgcaagcacagcaggtcgccctggaccggctggacaacatctcccgcgctctaaaatcaagaacgagcgatgatttgcgaaaacgatccgccgtgcagcttcgcgagcttgtggctgtctgccatcgagacctaagccccgagcaattccaggttttctacaactcagtcaacaacaggatcacacagctcatcacacatggaaacgactcgtccgagcgactcggaggcatctatgccctcgatgcgctcatcgatttcgatggcgtcgacgtcggcgtcaaatacacgcgtttcacacagaacctcaagaccattcttcgaggcaaagacatcaaccctatgcaaccagcagcgatcgcgctggggaaattatgtcgcccgggcggcgcgatgatatcagaagtggtggactcagaggttaataccgctctcgagtggctacagaacgaccgcatcgaggaacgaagatatagcgctgtcctcgttctccgcgaactggcccgtagtgccccaacgcttatgtaccaatatataccgacaatcttcgactggatctgggtaggactccgagatcctcgacagcttattcgggcaacatcagcggaaacagttagcgcctgtttccgtatccttcgtgaacgagaccaggacatgaagcaactatggatggataagatctataacgaagcgagatccggtctcaaggtgaacactgtcgagtcgattcacggctcgttgctggtcttgaaggaactgctcgagcagggagctatgtacatgcaggagcattaccaagaggcatgcgaaattgtcttcaaacacaaggaccatagagacccgactattcgaaagaccgtggttcttttaatcccagaccttgccagctactcgccagctgactttgcacacacttggctgcacaagttcatggtatacctatccggcatgctgaagaaggacaaagagcgtaacgatgctttccttgccattggtaacatagccaattcggtgaaaagcgctattgccccgtacctcgatggtgtccttatttacgtgcgcgaaggtctcagcctccagtcccgcaagagaggttcagtcgaccctgtctttgactgcattagtcgtcttgccgtcgcggttggtcagactctcagcaaatacatggaggcactcttggatcctatttttgcgtgcgatctcacccccaagctcacacaggctctcgtcgatatggccttctacatcccccccgtcaagccgaccatccaggagagactacttgatatgctcagcgtagttctctgcggcgaaccgtttaaaccgcttggcgctccacaaccgaatactctcagctcagtcccgattattcccaaagacgcaaaagacccccacgcttacgagcaccgaagggctgaggtaaaattggcgctcaacactctcgggagcttcgatttctcggggcatgttctgaacgagttcgtccgagatgtcgcgatcaagtatgttgaagacgaggatccagaaatccgcgaggcagcggccttgacatgctgccaactatacgttcgcgatccaattgtcaacyagacgagttaccatgcgcttcaggttgtgggtgatgtgatcgagaaactactcacagtcggagtctccgatcctgaaccgaatatcaggcggacagttctggcggctctcgacgaacgatttgacagacacttggccaaggccgaaaacattcgcatcctattctttgcgctcaacgacgaggttttctcgatcagagaagtcgccatctctatcatcggccgcttggctagatacaacccagcatatgtcattccttcgctacgaaagactctcattcagatgcttactgagctcgagttttccgatgtcgccaggaacaaggaggaaagcgcaaagctgttgagcctcttggttcaaaatgcgcaatctctcatcaagccctatgttgagcccatgatctcagtacttctccccaaagccaaggacggcaatccttctgttgctgctaccattcttaaggccattggtgagcttgcgaccgtgggcggtgaggatatgatgccgtacaaggaccgactgatgccaattattcttgatgcgctacaggatcagagctctaacgcaaaacgaggtgccgctctacatgctctgggacagcttgcgagcaattcaggatacgttattctgccatacatcgaatacccacagctgctcgagatcctgcagagcatcatccgaaccgaagggcaacaagtacccctgcgacaggagacgatcaaactgatgggtattcttggcgctctggatccttacaaacatcaggccgaggaacgaacccccgattctcgacgcggcgaggccaaccaactaacagacatttctctcatgatgaccggattaacaccttctaacaaagagtacttcccgactgttgtgattaatgctcttctcgcgatcctgaaggactcttcgttggtccagcaccacgccgctgtgattgaagcgatcatgaacatctttcgcacccttggcttggagtgtgtgtccttccttgatagaatcataccggcattcctacaggtgatacgatctgcgacctcgacaagactcgagtcttacttcaatcaactggccaccctcgtcagcatcgtgcgacaacacataaggaattacctaccgtcaattgttgagatcctgcaggagtactggcatacctcaccttcactacagactacgattttgtccctggtcgaggccatctcgagatcgcttgagggcgaattcaaaatttacctggctggactgctaccactgatgctcggtgttcttgacaaggatacttccgccaagcgcactccatcggagagagtgatgcacgccttcttggtgtttggtgccagtgctgaggagtacatgcatctcatcattcccgtcatcgtcaggacattcgagaagcagggtcagcctacgttcatcagaaagcaggccatcgacacgatcggcaagatctctcgccaagtgaaccttaacgacttcgctgcgaagatcatccacccacttacacgcgtcttggacatgggtgagcctgtcctccgtaccgctgcgctagatacgctctgcgcgctcatccaacagctgggcaaagactatctacactttatgggtacagtcaacaagaccatcaatcagcaccagatccagcactccaattacgagctacttgtgagcaagcttcaaaaaggggaggtactgccacaggacttgagctctggcgttggctttgctgatggcgcagacgagactccttttgcggaccagggcactaagaagctggagatgaatgccattcatttgaaggctgcttgggatactaaaggcaaatccacaaaggaggattggcaagagtggctgcgacgcttcagtacaacattgcttaccgaatcaccgaaccatgctctccgagcttgtgccagcctcgccagcgtgtatctacctctggctcgagagctctttaactcagcgttcgtgtcttgctggagcgagctctatgaacaattccaagacgaactcatccagaacatcgagagcgctataaaatccgagaacgtaccacccgatctgcttggcctcctactcaacctcgccgagtttatggagcatgacgacaaggctttgccgatcgacattcgagttctcggtagggaggcagctcgctgtcacgcgtacgcgaaggccctgcattacaaggagctcgagttcctgcaagaccagagcagtggtgcggtcgaggccctgatcgttatcaacaatcagctccaacagtctgatgcagctatcggtattctccgcaaagctcaactgtataaggaaggcatccagctgcgggagacctggttcgagaagttggagcgttgggaagaggcgctggcgttttatgaaaagcgtgaggaggaggtgcctgaggatcaggcgatacccgttgacatcgtcatgggtaagatgcgttgtttgcatgctttgggagagtgggaggctttggcttcattgactgggagcacctgggccaactctacgcccgaggttcagagaatgattgctcctcttgccacggctgctgcatggggtctgaataagtgggattccatggacaactatctttcgtcgctcaagagatactcacccgaccgatcattcttcggtgcgattttggcgctccaccgcaatcagttccgcgaggcgattgcatgcgttcagcaagctcgtgaaggcctggataccgagttgagtgcgttggttagtgagtcgtacaaccgggcataccaggtcgtcgttcgcgtgcagatgcttgctgagcttgaggagctcatcgtctacaagcagtgcgacgagaagaagcaggccataatgcgacgaacttgggagacccgactgaagggttgtcagaggaacgtcgaggtttggcagcgcatgctcagactacgggccatagtgattgcaccgacggagaatatgcacatgtggatcaagtttgccaacctttgccgcaagtctggacgaatgggactggccgagaagtctctcaaacaactcattggaaccgacgctcctctcatatcagcaattccttattggaacgagcagcgacagccagcatccaaccccagagctgcaccagccgcacaggtcatctatgccgtgctcaagtaccagtgggagcttggacagcagctgcccgtcaacaagggtagcataccagagaagacgctgtattgcctgcgcaagttcaccaaacgatgtgcgcaccgtctcgaggttgccagggcccaccttgctgcacaagctggtaacgatgccagtatcactggcgactacggattccagaacccgatggaacctgccataataagccaacatacaaaacgagcgctgtatgaccaaacagtcctccttgccaagtgctatctgcgccagggagrgtggctgattgcgctcaacaaggatgattggcagtacactcaggttcaagacattcttttgtcttactctcaggcgaccaagtacaatcctcgatggtacaaaggcactggcatggcttgggcgctggccaattttgagattgtgcagacactgacagctggaaatgaaggacacttgtcgaggacagaccagagtatggtgattgatcacgtggttcccgctgtcaagggcttcttcaaatccatcgcactttcacagggaagctcccttcaggatactcttcgactgttgacactctggtttactcatggtggaagttcagatgtcaacgtagccgttaccgaaggtttcgctaatgtcagcgtggacacatggctcgaggtcattcctcagttgatcgcccgcatcaaccagcctaacaagcgagttcagcaatcggtgcacaaccttcttgcagatgtcggacgagctcatcctcaggctctggtctaccctctcactgtcgccatgaaatcttggcagaacacgcgtagatctcgttctgcagctcaaattatggatagcatgagacagcacagcgcaaacctggtcgctcaggccgacacggtcagtcatgaactgattcgtgtcgccgtcctgtggcatgagctttggcatgagggattggaggaagcttcgcgattgtactttggtgatagcaacattgaaggcatgtttgcaacactggcgcctctccacgaactcctggagcgtggacccgagaccctccgcgagatctcctttgcacaggctttcggtcgcgatcttaaggaggcgcaagactggtgccgacagtacgagacaagccaagacgtcaatgacctgaaccaggcgtgggatctgtattatcaggtattccgcagaataagtaggcagctaccgcaggtgaccacgctggagttgacgtactgctcgcctaagcttcttaacgcgaagaacttggacctggcagttccgggaacatacaagagcggacagcccatcgtgaggataatgtcctttgacacaacgtttagtgttatcaactctaagcaacgtccacgaaagctcaacgtcaacggcagtgacggcaagtcgtacgcgttcctgctcaagggccacgaggatatccgccaggacgaacgagttatgcagctgttcggcctgtgcaacacgctcctctcccacgactcggagtgcttcaagcgccacctcaacatccagcgctaccctgccatcccgctctcgcagaatagcggtctgctcgggtgggttcccaacagcgacaccctgcacgttcttattagggagtatcgtgagagtcgcaagatcctgctcaacattgaacaccgcatcatgctccagatggcccccgactacgataacctcaccttgatgcagaaagtcgaggtgtttggctatgcgctcgacaacaccacgggacaggacctgtaccgtgttctttggctcaagtcaaagtcttctgaggcttggcttgagagacgaaccaactacactcgttctcttggtgtcatgtcgatggtgggatacattctgggactgggcgatcgtcatccttccaacttgatgcttgaccgcgtcactggaaagattattcacatcgatttcggtgattgtttcgaggtggcgatgaagagagagaaatacccggagagggttcccttccgactcactcgcatgctgacctatgctatggaagttagcaacattgagggtagctttagaatcaccttcgagaacgtgatgagggttctacgagacaacaaagagagcgtcatggctgttctcgaagcattcatccacgatcctctccttacgtggcgtctcacaagcgccgcatccccaacaggccccaacttcaactcagaccacgacacagccatgcccgtccccggcggagtccgcgcacgtcgccaatccatcctggacagcgacgtcgcgccctccgaactcctcaacgcacccgagccatcaatccagacacgtgctcgcgcccgcacaaacagctcagcgggtgaagccttgaccaacggcggcgcaccagaggtggagagccagaacgcgagggcggtggaggtgctggaccgcgtgcagcagaagcttacgggtcgggacttcaagaccaacgaggagctggatgtcattgcgcaggtcaataagttgatcatggaggctacgaagctggagaatctgtgccagcactacataggatggtgcagcttctggtga

SEQ ID NO: 2559 - protein, 2425 aa, Gibberella fujikuroi
  misc_feature (531)..(531): The Xaa at location 531 stands for Stop, or Gln.
  misc_feature (1670)..(1670): The Xaa at location 1670 stands for Glu, or Gly.
MAQAQQVALDRLDNISRALKSRTSDDLRKRSAVQLRELVAVCHRDLSPEQFQVFYNSVNNRITQLITHGNDSSERLGGIYALDALIDFDGVDVGVKYTRFTQNLKTILRGKDINPMQPAAIALGKLCRPGGAMISEVVDSEVNTALEWLQNDRIEERRYSAVLVLRELARSAPTLMYQYIPTIFDWIWVGLRDPRQLIRATSAETVSACFRILRERDQDMKQLWMDKIYNEARSGLKVNTVESIHGSLLVLKELLEQGAMYMQEHYQEACEIVFKHKDHRDPTIRKTVVLLIPDLASYSPADFAHTWLHKFMVYLSGMLKKDKERNDAFLAIGNIANSVKSAIAPYLDGVLIYVREGLSLQSRKRGSVDPVFDCISRLAVAVGQTLSKYMEALLDPIFACDLTPKLTQALVDMAFYIPPVKPTIQERLLDMLSVVLCGEPFKPLGAPQPNTLSSVPIIPKDAKDPHAYEHRRAEVKLALNTLGSFDFSGHVLNEFVRDVAIKYVEDEDPEIREAAALTCCQLYVRDPIVNXTSYHALQVVGDVIEKLLTVGVSDPEPNIRRTVLAALDERFDRHLAKAENIRILFFALNDEVFSIREVAISIIGRLARYNPAYVIPSLRKTLIQMLTELEFSDVARNKEESAKLLSLLVQNAQSLIKPYVEPMISVLLPKAKDGNPSVAATILKAIGELATVGGEDMMPYKDRLMPIILDALQDQSSNAKRGAALHALGQLASNSGYVILPYIEYPQLLEILQSIIRTEGQQVPLRQETIKLMGILGALDPYKHQAEERTPDSRRGEANQLTDISLMMTGLTPSNKEYFPTVVINALLAILKDSSLVQHHAAVIEAIMNIFRTLGLECVSFLDRIIPAFLQVIRSATSTRLESYFNQLATLVSIVRQHIRNYLPSIVEILQEYWHTSPSLQTTILSLVEAISRSLEGEFKIYLAGLLPLMLGVLDKDTSAKRTPSERVMHAFLVFGASAEEYMHLIIPVIVRTFEKQGQPTFIRKQAIDTIGKISRQVNLNDFAAKIIHPLTRVLDMGEPVLRTAALDTLCALIQQLGKDYLHFMGTVNKTINQHQIQHSNYELLVSKLQKGEVLPQDLSSGVGFADGADETPFADQGTKKLEMNAIHLKAAWDTKGKSTKEDWQEWLRRFSTTLLTESPNHALRACASLASVYLPLARELFNSAFVSCWSELYEQFQDELIQNIESAIKSENVPPDLLGLLLNLAEFMEHDDKALPIDIRVLGREAARCHAYAKALHYKELEFLQDQSSGAVEALIVINNQLQQSDAAIGILRKAQLYKEGIQLRETWFEKLERWEEALAFYEKREEEVPEDQAIPVDIVMGKMRCLHALGEWEALASLTGSTWANSTPEVQRMIAPLATAAAWGLNKWDSMDNYLSSLKRYSPDRSFFGAILALHRNQFREAIACVQQAREGLDTELSALVSESYNRAYQVVVRVQMLAELEELIVYKQCDEKKQAIMRRTWETRLKGCQRNVEVWQRMLRLRAIVIAPTENMHMWIKFANLCRKSGRMGLAEKSLKQLIGTDAPLISAIPYWNEQRQPASNPRAAPAAQVIYAVLKYQWELGQQLPVNKGSIPEKTLYCLRKFTKRCAHRLEVARAHLAAQAGNDASITGDYGFQNPMEPAIISQHTKRALYDQTVLLAKCYLRQGXWLIALNKDDWQYTQVQDILLSYSQATKYNPRWYKGTGMAWALANFEIVQTLTAGNEGHLSRTDQSMVIDHVVPAVKGFFKSIALSQGSSLQDTLRLLTLWFTHGGSSDVNVAVTEGFANVSVDTWLEVIPQLIARINQPNKRVQQSVHNLLADVGRAHPQALVYPLTVAMKSWQNTRRSRSAAQIMDSMRQHSANLVAQADTVSHELIRVAVLWHELWHEGLEEASRLYFGDSNIEGMFATLAPLHELLERGPETLREISFAQAFGRDLKEAQDWCRQYETSQDVNDLNQAWDLYYQVFRRISRQLPQVTTLELTYCSPKLLNAKNLDLAVPGTYKSGQPIVRIMSFDTTFSVINSKQRPRKLNVNGSDGKSYAFLLKGHEDIRQDERVMQLFGLCNTLLSHDSECFKRHLNIQRYPAIPLSQNSGLLGWVPNSDTLHVLIREYRESRKILLNIEHRIMLQMAPDYDNLTLMQKVEVFGYALDNTTGQDLYRVLWLKSKSSEAWLERRTNYTRSLGVMSMVGYILGLGDRHPSNLMLDRVTGKIIHIDFGDCFEVAMKREKYPERVPFRLTRMLTYAMEVSNIEGSFRITFENVMRVLRDNKESVMAVLEAFIHDPLLTWRLTSAASPTGPNFNSDHDTAMPVPGGVRARRQSILDSDVAPSELLNAPEPSIQTRARARTNSSAGEALTNGGAPEVESQNARAVEVLDRVQQKLTGRDFKTNEELDVIAQVNKLIMEATKLENLCQHYIGWCSFW

SEQ ID NO: 2560 - DNA, 7302 bp, Podospora anserina
  CDS (1)..(7302)
atgtccgccgtcaaagatcagacagctacctcgctggaccagcacatcaaggagatcaggaatcgaaactatgatgaaaaccaaaggaaacgggccgcgcgccaaatcagagacctggtcaatgctgccaagcaggagatgggtgccgaacagttccagcgcttcttcgataatgtcaatcagcgtacgaatctattgatacaaggtcccgatacgtatgaccgtcttggtggaatttacatcctggatgcgttggtcgattttgacggcatagaaccagccttgaagtacacccgcttccagaactacattggcagcatcctgcgtggccgcgatatcaactctatgcagccggccgctgtcgtccttggaaaactatgcaagccaggcggttccttgatttccgaactggtcgattccgaagttcaaacagcgcttgagtggctacagtctgaccgaatcgaggaacggcggtactcggcagtcttggtgcttcgcgagctggccagaaacacgcctacgttgatgtataactatgtgggctacgtctttgaacagatttggattggccttcgtgactcccgtctcttgattcgcgagactgccagcgagaccgttagcgcctgtttcaaaatcattcgtgagcgagaccaggagctgaagaaggactggatggacaagatgctcaacgaggcgatcaaggggctcaagatcaacacggttgagtttatccatgcctcgcttcttgtgctcaaggagctgcttgaacagggtggcatgtacatgcaggctcactaccaagaggcctgtgagattgtcttccgccacaaagacgcgcgcgatcccgccatccgcaagacggttgtgcttttgatcccggacctggccaactatgcaccgacagagttctcggcgagctatttgcacatgtttatggtgtatcttgggggcatgctgaagaaggacaaggaccgcaacgacgcctttcttgccattggcaacatcgccaattcggtcaagagcgcaatcacaccctatttagacggcgttctcatccatattcgcgagggtctcagtgtacagtcccggaaacgaagctcggtcgatcctgtttttgactgcatcagtcgattggccgtcgccgtgggtcagacaatgagcaagtatatggaggcgcttcttgatcccatcttcgcctgcgagctcacgccaaaactgacacaggcccttgtcgatatggcgttctacatccccccagtcaaagccaccattcaagagcgcctgttggacatgctgagcaaagttctctgcggcgaacccttcagacctctgggtgcaccccatccaaactcgctcgcttccatacctcatattcccaaagacccaaaggacccccttgctcaccagcggacaaaggatgaagtcaagttggccctcaacacgctcggcagctttgattttcaaggccatgtcttgaacgaattcgtccgcgacgtcgctatcaaatacgtcgaagatgatgacccagaaacacgtgaggctgctgccctcacctgctgccagctctatgtgcgtgacccaatcgtcaaccagacaagctatcatgccctccaagtggtcgccgatgtcatcgagagactcctgactgtgggtgtttcggatcccgaacccaaaatacggcagacgttgctagcagcccttgacgagcgatttgaccagcatctcgccaaggctgagaatatacgcaccttgttcttcgcgctccacgatgaacagtttgccgtcagggaggtggccgtgtccatcataggccggttggctcgccacaatcccgcctatgttatcccccagctgcgaaaaaccatcattcagatgttgacagagcttgaatacacagatgtggctcggagcaaggaggaaagctcgagattactcagtcttctcacacggcacgctcaggagctggtcaaaccatacgtcaactccatcacccaagtgttgctgccaaaagctcgcgacccgatcccgtccgttgctgcgactgtcctccaagcactcggggaactgtgcaccgttggtggagaagagatgctaaactacaagaaggatctcatgcccatcatcattgacgcattgcaggatcaaagcgcaccagttaaacgggaggcagccctgcataccctcggtcagctggccagtaacacaggctatgtcatcaaaccctacctcgagtatccccaacttcttgagatcctgcagtccatcatccggggcgagcctcagcgcgggcttttacgacaggaaaccatcaaggtgatgggcatcctgggagcactcgatccctacaaatatcagcaggtcgaagatcgcgcgccgcgcacacagaagcaaaccgaagcaacccaactcactgatgtgtccctcatgatgggcggactaaccccttcacaggaggactactacccaaccgttgttattaatgcccttctccagatcctcaaagaccagtcgttggtgcagtggcacggaaacgtggtggatgccatcatgagcatcttcatcacgcttgggctcaagtgtgtccagttcctcgaccgtgtggtgcctgcctttatcgccgtgatccgcgcctcgagccaaacgcgactcgacttctatttcaaccaccttagtaggcttgttggaattgtccgtcagcatatcagggtctacctcccggacatcatcgaggttctccaggagtattgggacacgacatattcgctccagaccaccatcatgtcgttgatcgagtccattgcacgctccctagagggcgagttcaaggtctaccttgccagtctcctcccgatgatgctcggcttgctggaaaaggacaccaccaccaagcggcaaccgaccgaaaagatctttcatgctttcctagtgttcggctcaagcgccgaggagtatatgcacctcatcatccccgtgttggtacgtctcttcgacaactcggcccaacccatgtttctgcgcaagtctgccattgaaacgattggcaagctctcgagcatggtgaatctcaacgactatgcgtccaaaatcatccaccccctcacccgggtccttgccagccacgaaccaagtctaagagtggctgccctcgacacgctatgtgccctcatgttgcagctggggcgtgattatttgcactttgaacacaccgtccacaaaaccatctcaacatacggcctccaacactccaactatgacaaggccgtcgaaaagctcaagaaaggggaaacattaccgcctaacctcgcgccgcgcttcgaggacaatgcagtcgagcttcatgcctctgaaaacagcccgcccaagaagttggatctcaaccccatgcatttacggcaagcctgggaaaccaagggtaagtctactaaagacgactggcacgagtggttccgcaagtttagcacgacgttactttctgagtccccgaatcactcactccgagcttgcgccagtttggcaagcacttatcagccactggcaagggagctcttcaactctgccttcgtctcatgctggagcgagctgtacgaacaatttcaggaggaactgatcaccaacatcgaaaacacaatcaaatccgagaatgtgcctcctgatcttctgggccttttgctgaaccttgccgagttcatggaacatgatgacaaggccctaccaatcgacattcgaaccttgggacgtgaggcggcaagatgtcacgcctatgccaaagcgctgcattacaaagaactcgagtttcttcaggaccacaacagtcacgcggtcgaagccctgattgtgattaacaatcagttgcagcagtccgatgccgccattggtatcttgactaaggtgaaggcgtacaaggacgggatcacgctgcgggaaagctggttcgagaagctggaacgctgggatgaggcgcttaacttttactgccaacgcgaacgcgagcttccgcctgaccagcccacaccggtcgacattgtcatgggcaagatgcgttgctaccatgcgctgggtgagtgggattcgctagcctcgctggctggcaagacatggtcaaactcggcaccagaggttcaacgcatgatcgcaggccttgccaccacggctgcctgggggctcgggaaatgggactctatggataactacctgcagtctatgaaacgattctcaccagatcgcgccttcttcggcgccatcttagccctccaccgcaatcagttccgagaagccctgggctgcatcgaccaagctcgagaaggtctcgatacagagctgagcgccctcgtgagcgaatcctacaacagggcataccaagttgttgtgcgcgttcagatgcttgcagagttggaagaattgatcatctacaagcagtgcgatgctgaaaagcaagccagtttgcgggcaacatgggagactcgtctcaaggggtgccagcgaaacgttgaggtatggcagcgcatgctgcgactccggtcgctcgtgctcacgccaccagagaacatgcacatgtggactaagttcgccaacttgtgccgcaagtctggacggatgggtttggcggagaagtcactgagacagcttatcgggtcggatgtgccgctggacacagtgatccctcactggcacgaccgccccatggaccccgatgccgagagacttgcgtctccggttctgtatgcagtactcaagtaccagtgggaggtcggtttgcagccggcgatgcgaaacactgaccgaaccatcgccgagagaacgctgtactgccttcgcaagttcactgacgagacggcccacagggtagagagcgcaagacaccaaatagccgcttccacccaggccggtaacggtgcaattgacggcttacatcaggcctctaccttttccgagttcgacgaggcggcattactcagcccggatgtgcagcgtcactggacagaacaaacggtgctgcttgccaagtgctacctccgccagggcgattggatgattgccctgaacaaggacgattggcaatacacacggcgcaaagacatcctctcctgctactacaaggccacctattatcatcgccactggtacaaggcctggcatgcctgggccttggccaacttcgaagtggtgcaggcccttggatctcgcaaggacctagacagcggcgtcatcatccagtatgccgtgcctgctgtgcatggttttttcgagtctatttcgctctcttcgggaagctctctgcaagacacgctgcgtttgctcacactctggcttacatatggtggcaaccccgatgtcgccagtactgtgacagagggcttcagtcgtgtcagcgttgatacctggcttgaggtcattccacagttgatcgctcgcattacccaacctaacaagaaggttcaggcgtcgatccatgctctgttgtctgatgtcggtcgtgcgcacccccaggcgttagtctaccccttgacggttgccatgaagtcgcgacaaagcacgcgcaggtccaagaccgccagcctcattatggagacaatccgtcagcacagtaataagctggtcgagcaggcagagacggtgagccgcgagcttattaggaccgcggtcctctggcacgagctatggcatgagggtctggaggaggcttcccggctctactttggcgatcacaatatcaagggaatgtttgatgccctcgagccccttcacgacctgctcgaaaagggccctcaaaccctccgggaggtttcatttacacagacgttcggccgtgatctgggtgaggctcgcgagtggtgccggcaatatcgcgaaacagaggacgtcaatgacctgaaccaagcctgggacttgtactaccaggttttccgtcgtatcagccgacagcttccacagatgaccacactggagctgacctactgctctccggacctgctccaggccagggacctggagctcgcggtgccgggaacgtatcgcagtggccaagaggttgtccgaatcatgtcttttgacggcacctttacggtcatcagcagcaagcaacgtccgcgaaaacttgacattgttggaagtgacggtaagacgtacactttcttgctcaaaggtcatgaggacatcaggcaggatgagcgtgtcatgcagctcttcggcctctgcaacacgctcttggccaacgactcggaatgctacaagcgccatctcaacatccaacgttacccggctattccgctgtcgcagaattcgggtcttctcggctgggtcccagacagcgacacgatccaccagcttatccgtgattatcgggagtcaagaaagattctccttaacatcgagcatcggatcatgcttcagatggcgcccgactacgataacctcacactcatgcagaaggtggaagtgtttgggtatgcccttgataacacaacgggtcaggatctgtaccgggtcttatggctgaagagcaagagctccgaagcctggttagacaggcgaactaattacacgcgttccctcggcgtcatgtcgatggtcgggtacatcctgggcttgggcgaccgtcatccgagcaacctgatgctggaccgcatcacgggcaagatcattcacattgactttggcgactgctttgaggtggcgatgaagcgtgagaagtacccggagcgggtgccttttaggcttacccgcatgcttacttatgccatggaggttagcaacatcgagggcagcttccggattacatgcgaacacgtgatgagagtcttgcgtgacaataaggagagcgttatggccgttctcgaggctttcattcacgacccgctactcacgtggcgtcttaccaacccggccagtcccgctggaccacatttcaattcggagagagagcaagctattgccgggccccaggcagcacgggtgcgtcggccttccatactggaggctccgatggccccgactgagttcctggcagctcaagctggtcccgaaggcttgaccggggcgcgtagccgtgcgcgtacaaactcatccgccgcgccgctcccaagcataaccaatgacggtgtccatggccccatcgagattgcggaggtgcaaaatgcgcgggctgtcgaagtgcttgaccgggtctcccagaaactcacgggtcgtgatttcaagccgaacgaagagcttcttgttaaagatcaggttaataagctgatcattgaggctaccaagcttgagaatctctgccagcactatatagggtggtgcagcttttggtga

SEQ ID NO: 2561 - protein, 2433 aa, Podospora anserina
MSAVKDQTATSLDQHIKEIRNRNYDENQRKRAARQIRDLVNAAKQEMGAEQFQRFFDNVNQRTNLLIQGPDTYDRLGGIYILDALVDFDGIEPALKYTRFQNYIGSILRGRDINSMQPAAVVLGKLCKPGGSLISELVDSEVQTALEWLQSDRIEERRYSAVLVLRELARNTPTLMYNYVGYVFEQIWIGLRDSRLLIRETASETVSACFKIIRERDQELKKDWMDKMLNEAIKGLKINTVEFIHASLLVLKELLEQGGMYMQAHYQEACEIVFRHKDARDPAIRKTVVLLIPDLANYAPTEFSASYLHMFMVYLGGMLKKDKDRNDAFLAIGNIANSVKSAITPYLDGVLIHIREGLSVQSRKRSSVDPVFDCISRLAVAVGQTMSKYMEALLDPIFACELTPKLTQALVDMAFYIPPVKATIQERLLDMLSKVLCGEPFRPLGAPHPNSLASIPHIPKDPKDPLAHQRTKDEVKLALNTLGSFDFQGHVLNEFVRDVAIKYVEDDDPETREAAALTCCQLYVRDPIVNQTSYHALQVVADVIERLLTVGVSDPEPKIRQTLLAALDERFDQHLAKAENIRTLFFALHDEQFAVREVAVSIIGRLARHNPAYVIPQLRKTIIQMLTELEYTDVARSKEESSRLLSLLTRHAQELVKPYVNSITQVLLPKARDPIPSVAATVLQALGELCTVGGEEMLNYKKDLMPIIIDALQDQSAPVKREAALHTLGQLASNTGYVIKPYLEYPQLLEILQSIIRGEPQRGLLRQETIKVMGILGALDPYKYQQVEDRAPRTQKQTEATQLTDVSLMMGGLTPSQEDYYPTVVINALLQILKDQSLVQWHGNVVDAIMSIFITLGLKCVQFLDRVVPAFIAVIRASSQTRLDFYFNHLSRLVGIVRQHIRVYLPDIIEVLQEYWDTTYSLQTTIMSLIESIARSLEGEFKVYLASLLPMMLGLLEKDTTTKRQPTEKIFHAFLVFGSSAEEYMHLIIPVLVRLFDNSAQPMFLRKSAIETIGKLSSMVNLNDYASKIIHPLTRVLASHEPSLRVAALDTLCALMLQLGRDYLHFEHTVHKTISTYGLQHSNYDKAVEKLKKGETLPPNLAPRFEDNAVELHASENSPPKKLDLNPMHLRQAWETKGKSTKDDWHEWFRKFSTTLLSESPNHSLRACASLASTYQPLARELFNSAFVSCWSELYEQFQEELITNIENTIKSENVPPDLLGLLLNLAEFMEHDDKALPIDIRTLGREAARCHAYAKALHYKELEFLQDHNSHAVEALIVINNQLQQSDAAIGILTKVKAYKDGITLRESWFEKLERWDEALNFYCQRERELPPDQPTPVDIVMGKMRCYHALGEWDSLASLAGKTWSNSAPEVQRMIAGLATTAAWGLGKWDSMDNYLQSMKRFSPDRAFFGAILALHRNQFREALGCIDQAREGLDTELSALVSESYNRAYQVVVRVQMLAELEELIIYKQCDAEKQASLRATWETRLKGCQRNVEVWQRMLRLRSLVLTPPENMHMWTKFANLCRKSGRMGLAEKSLRQLIGSDVPLDTVIPHWHDRPMDPDAERLASPVLYAVLKYQWEVGLQPAMRNTDRTIAERTLYCLRKFTDETAHRVESARHQIAASTQAGNGAIDGLHQASTFSEFDEAALLSPDVQRHWTEQTVLLAKCYLRQGDWMIALNKDDWQYTRRKDILSCYYKATYYHRHWYKAWHAWALANFEVVQALGSRKDLDSGVIIQYAVPAVHGFFESISLSSGSSLQDTLRLLTLWLTYGGNPDVASTVTEGFSRVSVDTWLEVIPQLIARITQPNKKVQASIHALLSDVGRAHPQALVYPLTVAMKSRQSTRRSKTASLIMETIRQHSNKLVEQAETVSRELIRTAVLWHELWHEGLEEASRLYFGDHNIKGMFDALEPLHDLLEKGPQTLREVSFTQTFGRDLGEAREWCRQYRETEDVNDLNQAWDLYYQVFRRISRQLPQMTTLELTYCSPDLLQARDLELAVPGTYRSGQEVVRIMSFDGTFTVISSKQRPRKLDIVGSDGKTYTFLLKGHEDIRQDERVMQLFGLCNTLLANDSECYKRHLNIQRYPAIPLSQNSGLLGWVPDSDTIHQLIRDYRESRKILLNIEHRIMLQMAPDYDNLTLMQKVEVFGYALDNTTGQDLYRVLWLKSKSSEAWLDRRTNYTRSLGVMSMVGYILGLGDRHPSNLMLDRITGKIIHIDFGDCFEVAMKREKYPERVPFRLTRMLTYAMEVSNIEGSFRITCEHVMRVLRDNKESVMAVLEAFIHDPLLTWRLTNPASPAGPHFNSEREQAIAGPQAARVRRPSILEAPMAPTEFLAAQAGPEGLTGARSRARTNSSAAPLPSITNDGVHGPIEIAEVQNARAVEVLDRVSQKLTGRDFKPNEELLVKDQVNKLIIEATKLENLCQHYIGWCSFW

SEQ ID NO: 2562 - DNA, 7389 bp, Aspergillus oryzae
  CDS (1)..(7389)
atgcctctctctttaccttcgaaggtcaattatgcgactagtattgttcctaggcatcagagccctttcgagtcgtatgtggacaacacagatactagcaaaggcctcgaagagaccggtgccaaacaatttaggcactccgggccttggctggctggacagacggaagccgaattcagtgcctacctgaagaaagtgcggagcaataagccagagcttttgcaaaaactccgccaactcttctccgaaaagcgaactgctgaacggagaaagcaagctcaagataacggagaggatttggaggcgcttgagcctgtaaaggttacggaagaggagttccagacctacctcaagtccttacattggcctccggagaaatttcttgaattttacaatgccgtcagccagcgcattgcacaacttgttgtcacaggcagcgacgcacatgaacgaatcggtggcctactagcgctggatcgcctgatagatttcgatggagtagatgctgcccagaagactacccgatttgccagttatctgcgaagcgctctgcgcagcaacgataatggagtgttggaatacgctgccaaagctctgggccgtttggctaaaccgggcggagctcttactgcggagcttgttgagagtgaaatacaatcggctttagagtggcttcagtctgaaagacaagagagtcgacgcgttgctgccgtacttgttatccgcgaacttgccaaagggtcgccaacacttttgtacggctttgtcccccaaatcttcgagctcatctgggttgcactcagggatccgaaagttgttatccgagaaacagcctccgaggcagtcagggaatgcttcgagattatcgctgcaagagactctcaggttcgaaagtcgtggttcgcgcggatttatgaagaagcactccagggcttgaagtccaacaatgtagattggattcacgggtcactactagtcctcaaagagctccttctcaagggtgcaatgtttatgaatgaacattacaggaatgcttgtgagattgttcttcgtctcaaagatcatcgtgaccaaaagattcgcgcacaggtcgttttgacaatccctatccttgcttgctatgccccagttgacttcacagagacgtatcttcatagatttatggtctaccttcaagcacagctgaagagggacaaggagcgcaatgaggcattcattgctataggaaagattgcgaacgctgtcggcgtggccattgcgcaataccttgatgggatcatcgtttatatcagagaaggcctggccatgaaagcaagaaatcgcgccggtgttaatgaagcgccaatgttcgagtgcatcagcatgttgtcattagctgtaggaccggcgcttaacaactacatggaatcgttgctagatccaatctttgcgtgcgggctaagcgaatcattaactcaggcgctttttgatatggcacattttatcccacaaatcaagcctactatccaagaaaagcttttggatatgttgagtctgattcttaaaggagccccgttccggcctttgggttgcccagagagcagattgccccctattccatcatttgcgaaagacttcgccccccaagagttgcattcagatgcagagatagcactagcacttcacactctgggaagcttcgatttctctggtcacattcttaacgagtttgttcgcgatgtcgccatcaactatgttgagaatgacaactctgaaattcggaaagcttcagcacttacatgctgtcagctatttgtccacgatccaattatcaatcagactagtagtcactcaatacaggttgttagtgaagtcattgacaagcttctgacggttggtgtcggcgatcctgattcagagatccggcgcacagttttgtggtcattggatcgcaaattcgaccgccatcttgcacggccagagaatattcgttgtttgttccttgcggttaatgatgaagtattttctgtcagagaagctgccatctgcatcattgggcgcctctcaagtgtgaatccggcctacgtattcccgcctcttcgaaaactactggtcaatcttctgacggggcttggatttgccagcacggctcgccaaaaagaagagagtgctcagcttatcagcttgtttgtctcaaatgcgacaaaactcatcaggtcatatgtcgatcctatggtgaccaccttgctcccaaaagccactgacactaaccccggtgtcgcttcgaccactttaaaagctatcggtgaacttgcaaatgtcgggggaggcgagatgaagttgtacctgccacagctgatgcctgtcatattggattcgttgcaggacctctcttcccatgccaagcgggaggcagccttgcgtacgctgggtcagctagccagcaactctggatacgttattgacccgtatcttgagtaccctcatctccttgctgtgcttatcaatataatcaagacggaacaaacggggtctctgcggaaggagacaatcaaattgctaggtattcttggcgctttggatccgtacaagtaccagcaaataagtgaaactgcaccagatattcaccatatcaatgaagtccaaactgtctccgacgtcgctttgattatgcaagggctcactccttccaatgaagagtactacccgacagtggtcatcaacaccttgatgcagaatatacttcgcgaaaactccctcgcccaataccattcagcggttattgatgctatcgtcactatcttcaaaactttgggattgaagtgcgtgccatttttgggacaaataatccctggctttatagccgtaataagaggatcgccccctagccgtttggagtcgtactttaaccagatggcgatattggtcaatattgtgaggcagcacattcgggccttccttccggagattattgaagttgttcgcgatttctgggatgcatcatatcaagttcaagccacgatattattgcttgtggaggccattgccaagtctttagaaggtgaattcaagaaatacatggcgggcctcattcccatgatgttggataccctcgagaaggacaacacaccacgtcgacagccttcagaaaggatacttcacactttcctcatctttggcaccagtggggaggagtatatgcatttaattgttccctctattgtgcgccttttcgacagaactcaaaacccacagagcattcggaagaccgccatcgatagtctgacgaaactatcacggcaagtcaatgtatctgactttgcgtctttgatggtccattccttgtcccgtgttgttgcgggcaacgatcgaatgttgcgacaggccgctatggactgtatttgtgctctcattttccagttgggccaggatttcagtcactacatccatcttctgaacaaggttttgaaacgtcaccagatcactcatgtcaattatcatattctggtgacgaaattacagaaaggagactcacttccgcaggatcttaaccctgatgagaattatgcagccctggcggatgatactaactttgccgagatcggccagaagaagatggttgtcaaccagcagcacttgaagaatgcctgggatgcctctcaaaagtcgacacgtgaggactggcaggagtggatacgacgattcagtgtggaacttttgaaggagtctccttctccagccctgcgtgcatgcgccagtctagctggcatttaccagccattggccaaagatctgttcaatgctgccttcgtatcctgctggactgagttgtatgaccaataccaggaagagcttgttcggtcgatcgaaaaggcgctcacgtcacctaatatccctcctgaaatcttgcaggttttgctcaacctcgctgagtttatggagcacgacgacaaagctctccccatcgacatccgcacacttggcaaatacgctgccaagtgtcacgcatttgctaaagctctccactataaagaacttgagttcgaacaggatcaaaattcgggtgcagttgaggctctgattaccatcaacaaccagcttcaacaatctgatgctgccattggtattcttcggaaagcccaagcttatcgggatgtggaacttaaggaaacctggttcgaaaagcttcagcgctgggaggaggcccttgctgcctacaagagacgtgagaagatagacccggattcctttggcgtcacaatgggcaaaatgcgctgtctgcacgcccttggtgagtggaaaatattatctgatctcgcccaagagaagtggaatcaggcctcattagaacatcggagagccattgctcctctcgctgctgcggctgcatggggtcgtggtcaatgggaattgatggattcctacctgggtgttatgaaagaacagtcacccgacaggtcattctttggtgccattcttgccattcatcggaaccagttcgaggaggcaacgatgtatatcgagaaagcgcggaatggacttgacaccgaactttcagccttgcttggtgaatcatataaccgtgcttacaatgtcgtcgtccgcgttcagatgctcgctgaactcgaggaaatcattacttacaagcagaacatcggtgatccagagaagcaggattctatgcgccaaacatggaacaaacggttacttggctgccaacaaaatgttgaagtatggcagcgtatgctcaaggttagagcacttgtcacctcccctcgagaaaaccttgacatgtggattaaattcgccaatctttgtcgcaaatccaatcgaatgggacttgctgagcggtctctggcatctctggaaaccgttgtttctgacaacaatggtacccgggctgtagctcctccagaggtcacatatgctcgcctaaagttcagctgggctactgggcggcagcgtgaagctcttcagatgcttaaggagttcactacaagtctcaccgaagacttcacgagattcaatgctctcatgatctctcagtcagagcataatggcattaatggcgttaacggcatccaagatacaaaccatggagatataatgggtctacgagagcgtattggggatgtggccaagttcagaaggctccttgctaagagctaccttagacagggggagtggcagacttctctacaaaaaggagattggaaaccggagcacgtccgagaggtcctcaacgcatactctgccgctacgaaatacaaccgtgattcttacaaagcttggcattcgtgggcattggccaactttgaagtcgttacaacaatcgcaagccaagctagcaaagatggcgcgacattggccatggttcctgggcacattgtaacagagcatgtgataccagctattcgtggtttcctcaggtccatatccttgtcgtcaacctcatctttgcaagataccctgaggttacttaccctctggtttactcacggtggcgatcaggaagtaaatgccgttgttacagaaggtttcacggcggtgaatatcgacacctggctcgcggtaacaccgcaactcatagcacgaattaatcaaccgaatattcgggtccgaagcgctgtccatcgactacttgctgaggtcggtaaggttcatcctcaggcgctggtgtatccattgactgttgcgatgaaatcaaacgttgcccgacggtcgcagtctgcaagtagcatcatggacagtatgcggcaacatagtgcaaaactggtcgaacaagctgatcttgtaagtcatgaattgattcgggttgccgttctatggcacgagctctggcacgaaggattggaagaagcttcccgcctctatttcggtgaccacaatgtcgaaggaatgtttgcaactctagcaccactccatgaaatgcttgataagggggccgaaacgttacgcgaagtatccttcgcacaggcgtttggtcgtgaccttgcagaggcaaagcattactgcatgctataccgtgagaccgaagagattggtgacctgaaccaagcttgggatctctactacaccgtgttccggaagataagcagacagcttccgcaattgtctacacttgacttgaaatatgtctctcctaaacttaaagactgtgtcgaccttgatcttgctgttccgggcacctaccagagtggccgaccgatcatccgtatcatgagcttcgatcctatacttcatgtccttcaaaccaagaaacgaccacgcagaatgaccctgaaaggtagcgatggtaattcatacatgtacgcacttaagggacatgaagatattagacaagatgagcgagtcatgcagctctttggcctcgtgaatacgctccttgacaatgacagtgagagctttaaacgccatctttcagtgcaacgattcccagccattccattgtctcagagctctggtatcctaggctgggtctcgaacagtgacactctacacgcattgatcaaagaataccgtgagagccgccgaattctcctgaacattgaacaccgcatcatgttgcagatggcgccagattatgacaaccttactctcatgcagaaagtggaagtctttggatatgctatggataacaccacaggaaaagatctgtaccgggtcttgtggctcaagagtaaaagctcagaagcgtggctggagcgacgaacaaactacactcggtcccttggtgttatgtcaatggtgggttacattcttggtctgggtgatcgtcatccgtccaatcttcttttggaccgaattactggaagagtggttcacattgattttggtgactgcttcgaagttgcaatgcatcgggagaaatatcccgaaagagttccgttccggttgactcgtatgttgacctttgccatggaagtcagcaacattgaaggaagctaccggatcacgtgtgaggctgtcatgcgtgtcttgagagagaacaaagactctctgatggctgttctggaagcttttattcatgatcctttgatcaactggcgcctaggaatccgtgagtcgccagacaggatgccattctcatcagagcgccggcaatcgattattggtaatatcaactctgaacagggtgtccaacccagcaacttctcccgtcaccgacggccatctattcttgaaggtggcattcttgatgctcaggaaggcatacctaatgaagcccgtgaagcacagaacgcacgcgccctacaagtgctggcgagggtcaaggagaagctaacgggccgagatttcaagcccagtgaggagctcaatgtcagtgatcaggttgacaaactccttgcgcaggcaactagcgttgaaaatatttgtcagcactggattggatggtgcagtttctggtga

SEQ ID NO: 2563 - protein, 2462 aa, Aspergillus oryzae
MPLSLPSKVNYATSIVPRHQSPFESYVDNTDTSKGLEETGAKQFRHSGPWLAGQTEAEFSAYLKKVRSNKPELLQKLRQLFSEKRTAERRKQAQDNGEDLEALEPVKVTEEEFQTYLKSLHWPPEKFLEFYNAVSQRIAQLVVTGSDAHERIGGLLALDRLIDFDGVDAAQKTTRFASYLRSALRSNDNGVLEYAAKALGRLAKPGGALTAELVESEIQSALEWLQSERQESRRVAAVLVIRELAKGSPTLLYGFVPQIFELIWVALRDPKVVIRETASEAVRECFEIIAARDSQVRKSWFARIYEEALQGLKSNNVDWIHGSLLVLKELLLKGAMFMNEHYRNACEIVLRLKDHRDQKIRAQVVLTIPILACYAPVDFTETYLHRFMVYLQAQLKRDKERNEAFIAIGKIANAVGVAIAQYLDGIIVYIREGLAMKARNRAGVNEAPMFECISMLSLAVGPALNNYMESLLDPIFACGLSESLTQALFDMAHFIPQIKPTIQEKLLDMLSLILKGAPFRPLGCPESRLPPIPSFAKDFAPQELHSDAEIALALHTLGSFDFSGHILNEFVRDVAINYVENDNSEIRKASALTCCQLFVHDPIINQTSSHSIQVVSEVIDKLLTVGVGDPDSEIRRTVLWSLDRKFDRHLARPENIRCLFLAVNDEVFSVREAAICIIGRLSSVNPAYVFPPLRKLLVNLLTGLGFASTARQKEESAQLISLFVSNATKLIRSYVDPMVTTLLPKATDTNPGVASTTLKAIGELANVGGGEMKLYLPQLMPVILDSLQDLSSHAKREAALRTLGQLASNSGYVIDPYLEYPHLLAVLINIIKTEQTGSLRKETIKLLGILGALDPYKYQQISETAPDIHHINEVQTVSDVALIMQGLTPSNEEYYPTVVINTLMQNILRENSLAQYHSAVIDAIVTIFKTLGLKCVPFLGQIIPGFIAVIRGSPPSRLESYFNQMAILVNIVRQHIRAFLPEIIEVVRDFWDASYQVQATILLLVEAIAKSLEGEFKKYMAGLIPMMLDTLEKDNTPRRQPSERILHTFLIFGTSGEEYMHLIVPSIVRLFDRTQNPQSIRKTAIDSLTKLSRQVNVSDFASLMVHSLSRVVAGNDRMLRQAAMDCICALIFQLGQDFSHYIHLLNKVLKRHQITHVNYHILVTKLQKGDSLPQDLNPDENYAALADDTNFAEIGQKKMVVNQQHLKNAWDASQKSTREDWQEWIRRFSVELLKESPSPALRACASLAGIYQPLAKDLFNAAFVSCWTELYDQYQEELVRSIEKALTSPNIPPEILQVLLNLAEFMEHDDKALPIDIRTLGKYAAKCHAFAKALHYKELEFEQDQNSGAVEALITINNQLQQSDAAIGILRKAQAYRDVELKETWFEKLQRWEEALAAYKRREKIDPDSFGVTMGKMRCLHALGEWKILSDLAQEKWNQASLEHRRAIAPLAAAAAWGRGQWELMDSYLGVMKEQSPDRSFFGAILAIHRNQFEEATMYIEKARNGLDTELSALLGESYNRAYNVVVRVQMLAELEEIITYKQNIGDPEKQDSMRQTWNKRLLGCQQNVEVWQRMLKVRALVTSPRENLDMWIKFANLCRKSNRMGLAERSLASLETVVSDNNGTRAVAPPEVTYARLKFSWATGRQREALQMLKEFTTSLTEDFTRFNALMISQSEHNGINGVNGIQDTNHGDIMGLRERIGDVAKFRRLLAKSYLRQGEWQTSLQKGDWKPEHVREVLNAYSAATKYNRDSYKAWHSWALANFEVVTTIASQASKDGATLAMVPGHIVTEHVIPAIRGFLRSISLSSTSSLQDTLRLLTLWFTHGGDQEVNAVVTEGFTAVNIDTWLAVTPQLIARINQPNIRVRSAVHRLLAEVGKVHPQALVYPLTVAMKSNVARRSQSASSIMDSMRQHSAKLVEQADLVSHELIRVAVLWHELWHEGLEEASRLYFGDHNVEGMFATLAPLHEMLDKGAETLREVSFAQAFGRDLAEAKHYCMLYRETEEIGDLNQAWDLYYTVFRKISRQLPQLSTLDLKYVSPKLKDCVDLDLAVPGTYQSGRPIIRIMSFDPILHVLQTKKRPRRMTLKGSDGNSYMYALKGHEDIRQDERVMQLFGLVNTLLDNDSESFKRHLSVQRFPAIPLSQSSGILGWVSNSDTLHALIKEYRESRRILLNIEHRIMLQMAPDYDNLTLMQKVEVFGYAMDNTTGKDLYRVLWLKSKSSEAWLERRTNYTRSLGVMSMVGYILGLGDRHPSNLLLDRITGRVVHIDFGDCFEVAMHREKYPERVPFRLTRMLTFAMEVSNIEGSYRITCEAVMRVLRENKDSLMAVLEAFIHDPLINWRLGIRESPDRMPFSSERRQSIIGNINSEQGVQPSNFSRHRRPSILEGGILDAQEGIPNEAREAQNARALQVLARVKEKLTGRDFKPSEELNVSDQVDKLLAQATSVENICQHWIGWCSFW

SEQ ID NO: 2564 - DNA, 7572 bp, Chlamydomonas reinhardtii
  CDS (1)..(7572)
atgatgctgtcgggagtgggtccggtgcccaccaaaccggctttcaaggccggtggcgacacgctctcgcggcacctggaggagctgtgccgttctggcgcatgggagcggcgccacaaggatggtgacaaagcattattggagtacatcgaggcggaggctcgggacctgtcggtggaggcttttgggcggctaatgaccgacgtgtatcagcgcatcggcaacatgctgctcaaagggaacgacatcacgcggcgcatgggtggcgtgctggcgattgacgagcttatcgatgtcaagctctctggagacgacgctgccaagacggcgcggctgtcggggctgctgtcgcgggtgctggaggagagcgaggacccggtgctcagcgagtcggcctcgcacacgctgggacacctggtgcgcagcggcggcgccatgacgtcggacatcgtggagaaggagatccgccgctcgcttgcctggtgcgacccccgcaatgagcccaatgagtcgcggcggctgactgcgctgctggtgctgacggaggcggcggagtccgcgcccgccgtgttcaacgtgcacgtcaagtcgttcattgacgcggtgtggttcccgctgcgcgacgccaagcagcatatccgcgaggcggcggtgcgggcgctcaaggcttgcctgtgcctggtggagaagcgcgagacgcgctaccgcgtgcagtggtactacaagctgcacgagcagaccatgcgcggcatgaagcgcgaccaccgcaccggcgcgcttccctcgcccgagtccatccacggctcgctgctggcgctggcggagctgctacagcacaccggcgaattcatgctggcgcgctacaaggaggttgtggagaacgtgttccgctacaaggacagcaaggagaaaaacatccgccgggcggtcatccacctgctgccgcgcatggcggccttctcgccggagcgctttgcgtcggagtacctggctcgcgccattgccttcctgctgatcgtgctgaagaacccgcccgagcgcggcgcggcgttcgcggcgctggcggacatggcggcggccctggcgcggggctgcctgtcgcccatctacgtcgccatccgggaggcgctgtcggcgccgcccgccgcgcgcgccgccgcccggccgcggcccgccacctgctacgaggccctgcagtgcgtgggcatgctggcggtggcgctgggcccgctgtggcggccctacgcggcggcgctggtggaggccatggtgctcacaggcgtgagcgaggtgctggtgcaggcgctgacgcaggtcgccaacgcgctgccggagcttctggaggacatccagtaccagctgctggacctgctgagcctggtgctcagcaagaggcccttcaacagcagcaccacgcagcccaagttcgcggccctgagtgcggccatcgcggcgggcgagctgcagggcaatgcactcaccaagctggcgctgcagacactgggcacgtttgacctgggcggcatccagcttctggagttcatgcgcgaccacatcctggcctacaccgacgaccccgacaaggagatccgccaggccgcggtgctggccgcatgcccgcgtgctggagcggcacgcagcagcctccgcgtccgcagcctccgcagcggctggcggcgcgccgccgcggctgtgtggcacacgcgcgtggtggagcgctgtgtgggccggctgctggtggtggcggtggcggaccccagtgagcgcgtgcgcaaggaggtgctgcgggcgctggtggccaccacggccctggacgactacctggcgcaggccgactgcctgcgcgcgctgttcgtgggcatgaacgacgagagcgtggcggtgcgcgggctggccatccggctggtggggcggctggcggagcgcaacccggcgcacgtgaacccggcgctgcgcaagcacctgctgcagctgctgcacgacatggagttcagccccgacaacagggccagggaggagtcggccttcctgctggaggtgctcatcaccgccgccgcccgcctcatcatgccctacgtctcgcccatccagaaggcgctggtgtccaagctgcgcggcggctcgggcccgggcataactgtgttgtccacgctgggcgcgctggctgaggtgagcggcaccacgttccgccccttcatcagcgaggtcatgccgctggtcatcgaggccattcaggacaactcggacgggcggcggcgtgtggtggccgtcaagactctgggcttcatcgtgagcagctgcggcaatgtgatgggcccctacctggagtacccacagctgctgtcggtgctgctgcgcatgctgcacgagggacaccccgcgcaacgccgggaggtcatcaaggtgctgggcatcatcggtgcgctggacccgcacacacacaagctcaaccaggccagcctgagcggggagggcaagctggagaaggagggggtgcggccgctgcggcacggcggcggcggcgcgggcggcgccggcggcggcgcaggcgggggaggcgtcggcggcggcgtggcgggcgacagcaatgacggcggcatgggccccggcgacgacggcggccccggcggcgacctgctgccctcctcgggcctggtgaccagcagcgaggactattaccccaccgtggccatcaacgcgctgatgcgggtgctgcgcgaccccgccctggcctcccagcacctggccgtcatccgggcgctggcagccatattccgcgcgctgcagctcagcgtagtgccctacctgcccaaggtcctgcccatcctgctgggcgtgctgcgcggcggcgacgaggcgctgcgtgaggagatcctggcctcgctgcgcgcgctggtgggctacgtgcggcagcacatgcgccgcttcctgcccgacctcacgcagctggtgcacgagttctggcccgccgcgccgcgcacctgcctggcgctcatagcggacctgggcatggcgctgagggacgacatacgtgccaaacccctccctcccctccctctcctgccgccctcctctcccccccgcacaccccacaacaggcagtacgtgcccgagctgctgcccaagttcgtggcggtgttcagcgaggccgagcgcgccggcagctgggacctggtgcggcccgccctgggcgccctggagagcctgggcagcgccgtggacgactcgctgcacctgctgctgccctccatggtgcggctgatcagccccgccgccagctccacgccagccgaggtgcggcgcgcggcgctgcgctcgctgcggcggctcatcccgcgcatgcagctgggcggctacgcctcggcggtgctgcacccgctcatcaaggtcctggacggccacagcgacgagcagctgcggcgtgatgcgctagacaccatctgcgccgtggccgtgtgcctggggcccgagttcgccatcttcgtgcccaccatccgcaaggtgcgtgtgcggcaccgcctgcaccacgagtggttcgaccggctggccggcaaggtgtgcgccgtgtcgccgccctgcatgtcagacgcggaggactgggagggcgccggaggcgccgcctccggcgccggctccgccggcgcagccggcggctgggccgtggagatcgacctgctcgcccgcatgcaggcggagggcggcggcgccctgggcggccagccgccggtgccgccgggtcccgacggcggcccctccgccaagctgccggtgaacgcggcggtgctgcggcgcgcctgggagagcagccaccgcgtgaccaaggaggactgggcggagtggatgcgcaacttcgcggtggagctgctcaaggagagcccctcgcccgcgctgcgcgcctgccacggcctggcgcaggtgcaccccagcatggcgcgcgagctgttcgcggcgggcttcgtgagctgctgggcggagctggagcaggggctgcaggagcagctcgtgcgcagcctggaggctgcgctggcctcccccaccatcccccccgagacggtgactgcgctgctgaacctggccgagttcatggagcacgacgacaagcgcctgcctctggacacacgcacgctgggggcgctggcggagaagtgccacgccttcgccaaggcgctgcactacaaggagctggagttccagaccagcccgcagtccgccatcgaggcgctcatccacatcaacaaccagctgcggcagccggaggcggcggtgggcgtgctggcgtacgcccagaagcacctgcacatggagctcaaggagggctggtatgagaagctgtgccgctgggacgaggcactggacgcctacgagcggaggctgctcaaggaggcgccgggcagcatggagtaccacacagcgctgctgggcaagatgcgctgcctggcctcgctggccgagtgggagaacctgtccaacctgtgccgcaccgagtggcgcaagtcggagccgcacgtgcgccgtgagatggcgctcatcgcggcgcacgcggcctggcacatgggcgcctgggacgagatggccatgtacgtggacacggtggacaaccccgaggccgtggggcccaacagccacacccccaccggcgccttcctgcgcgcggtgctgtgcgtgcgcgccaaccaggtgagcggggcgcaggcgcacgtggagcgcacccgcgagctgatggtggcggacctggcggcgctggtgggcgagagctacgagcgcgcctacacggacatggtgcgcgtgcagcagctggcggagctggaggaggtgtgcgcctacaagcaggcgctggacaggagggcagccgacccgggcggcagcgaggctcgcatcggcttcatccagcagctgtggcgcgaccggctccgcggcgtgcagcggcacgtggaggtgtggcagagcctgttctccatccgcagcctggtggtgcccatggcgcaggacgtggacagctggctcaagttcgccagcctgtgccgcaagagcggccgcagcaggcaggcctaccgcatgctgctgcagctgctgcgctacaaccctatgaacatcactcaggccggcaaccccggctacggcgccggcagcggcgcgccgcacgtgatgctggccttcctgaagcacctgtggacgcagggcaaccgcacagaggcctacaaccgcatcaaggacctggcgtcgctcaacggccgggccttcctgcggctgggcatctggcagtgggccatgaacgatctggacaacccgggtgtgattgcggagaacctggcttccttccgcgcggccaccgagcacgcgcccaattgggccaaggcctggcaccagtgggcgctgttcaatgtggcggtttcagcgcactacaggtgcgaccccatgcgggacgagaaccaggccgtgtcgcacgtgccgccggcggtgcagggcttcttccgcagcgtggcgctggggcaggcggcgggcgaccgcacaggcaacctgcaggacatcctgcggctgctgacgctgtggttcaacttcggcgcgtacgccgaggtccgcgccgcgctgacggagggcttccagctggtgtccatcgacacctggctgctggtcatcccgcagatcatcgcgcgcatccacacccacaacacagacgtgcgccagctcatccaccacctgctggtcaagatcgggcgccaccacccgcaggctctgatgtacccgctgctggtggccaccaagtcccagagcccggcccggcgccaggcggcctacagcgtgctggagtgcatccggcagcacagcgcggcgctggtggagcaggcgcagctggtcagcggcgagctcatccgcatggccatcctgtggcacgagatgtggcacgagggcctggaggaggccagccgcctgtacttcggcgagagcaatgtggagggcatgctgaacacgctgctgccgctgcacgagatgctggagaaggcggggcccaccacactcaaggaaatcgccttcgtgcagagctacggccgggagctgtcggaggcgtacgagtggctgatgaagtacaaggccagccgcaaggaggcggagctgcaccaggcctgggacctgtactaccacgtcttcaagcgcatcaacaagcagctgcgctccctaaccacgctggagctgcagtacgtcagccccgcgctggtgcgggcgcaggacctggagctggcagtgcccggcacctacattgccggggagccgctggtgaccatcgccgccttcgcgccgcagctgcacgtcatcagctccaagcagcgcccgcgcaagctcaccatacacggcggcgacggcgcggagtacatgttcctgctcaagggccacgaggacctgcgccaggacgagcgcgtgatgcagctgtttggcctggtgaacaccatgttggcgcacgaccgcatcaccgccgagcgcgacctgtccatcgcgcgctacgccgtcatcccgctgtcgcccaacagcggcctcatcggctgggtgcccaactgcgacacgctgcacgcgctcatccgggagtacagggaggcccgcaagatcccgctcaactgggagcaccgtctgatgctgggcatggcgcccgactacgaccacctgacggtcatacagaaggtggaggtgttcgagtacgcgctggactccaccagcggcgaggacctgcacaaggtgctgtggctcaagagccgcaacagcgaggtttggctggaccggcgcaccaactacacccgctccgccgccgtcatgtccatggtgggctacatcctgggcctgggcgaccgccacccctccaacctcatgctggaccgctacagcggcaagctgctgcacatcgactttggcgactgcttcgaggcgtccatgaaccgggagaagttcccggagaaggtgccgttccggctcacgcgcatgatgatcaaggccatggaggtgtcgggcatcgagggcaacttccgcaccacgtgcgagaacgtgatgcgcgtgctgcgctccaacaaggagagcgtgaccgccatgctggaggccttcgtgcacgaccccctcatcaactggcgcctgctcaacaccaccgaggcagccacggaggcggcgctggcgcgcacggacggcggcggcggcggcggtggccacatggacggccccggggggcacccggggggccgggacgcgctgggcggcggcggcggcggggcgggcggcggcggcggcggcgacccgggggccatgcccagcccgccgcggcgcgagacgcgggagaaggagctcaaggaggcgtttgtgaacctgggcgatgccaacgaggtgttgaacacgcgcgcggtggaggtgatgaagcgcatgagcgacaagctcatgggccgcgactacgcccccgagctatgtgtgggcggcggcagcggcgccagcggcatggagccggacagcgtgccggcgcaggtggggcgcctcatcaacatggcggtcaaccacgagaacctgtgccagagctacatcggctggtgccccttctggtag

SEQ ID NO: 2565 - protein, 2523 aa, Chlamydomonas reinhardtii
MMLSGVGPVPTKPAFKAGGDTLSRHLEELCRSGAWERRHKDGDKALLEYIEAEARDLSVEAFGRLMTDVYQRIGNMLLKGNDITRRMGGVLAIDELIDVKLSGDDAAKTARLSGLLSRVLEESEDPVLSESASHTLGHLVRSGGAMTSDIVEKEIRRSLAWCDPRNEPNESRRLTALLVLTEAAESAPAVFNVHVKSFIDAVWFPLRDAKQHIREAAVRALKACLCLVEKRETRYRVQWYYKLHEQTMRGMKRDHRTGALPSPESIHGSLLALAELLQHTGEFMLARYKEVVENVFRYKDSKEKNIRRAVIHLLPRMAAFSPERFASEYLARAIAFLLIVLKNPPERGAAFAALADMAAALARGCLSPIYVAIREALSAPPAARAAARPRPATCYEALQCVGMLAVALGPLWRPYAAALVEAMVLTGVSEVLVQALTQVANALPELLEDIQYQLLDLLSLVLSKRPFNSSTTQPKFAALSAAIAAGELQGNALTKLALQTLGTFDLGGIQLLEFMRDHILAYTDDPDKEIRQAAVLAACPRAGAARSSLRVRSLRSGWRRAAAAVWHTRVVERCVGRLLVVAVADPSERVRKEVLRALVATTALDDYLAQADCLRALFVGMNDESVAVRGLAIRLVGRLAERNPAHVNPALRKHLLQLLHDMEFSPDNRAREESAFLLEVLITAAARLIMPYVSPIQKALVSKLRGGSGPGITVLSTLGALAEVSGTTFRPFISEVMPLVIEAIQDNSDGRRRVVAVKTLGFIVSSCGNVMGPYLEYPQLLSVLLRMLHEGHPAQRREVIKVLGIIGALDPHTHKLNQASLSGEGKLEKEGVRPLRHGGGGAGGAGGGAGGGGVGGGVAGDSNDGGMGPGDDGGPGGDLLPSSGLVTSSEDYYPTVAINALMRVLRDPALASQHLAVIRALAAIFRALQLSVVPYLPKVLPILLGVLRGGDEALREEILASLRALVGYVRQHMRRFLPDLTQLVHEFWPAAPRTCLALIADLGMALRDDIRAKPLPPLPLLPPSSPPRTPHNRQYVPELLPKFVAVFSEAERAGSWDLVRPALGALESLGSAVDDSLHLLLPSMVRLISPAASSTPAEVRRAALRSLRRLIPRMQLGGYASAVLHPLIKVLDGHSDEQLRRDALDTICAVAVCLGPEFAIFVPTIRKVRVRHRLHHEWFDRLAGKVCAVSPPCMSDAEDWEGAGGAASGAGSAGAAGGWAVEIDLLARMQAEGGGALGGQPPVPPGPDGGPSAKLPVNAAVLRRAWESSHRVTKEDWAEWMRNFAVELLKESPSPALRACHGLAQVHPSMARELFAAGFVSCWAELEQGLQEQLVRSLEAALASPTIPPETVTALLNLAEFMEHDDKRLPLDTRTLGALAEKCHAFAKALHYKELEFQTSPQSAIEALIHINNQLRQPEAAVGVLAYAQKHLHMELKEGWYEKLCRWDEALDAYERRLLKEAPGSMEYHTALLGKMRCLASLAEWENLSNLCRTEWRKSEPHVRREMALIAAHAAWHMGAWDEMAMYVDTVDNPEAVGPNSHTPTGAFLRAVLCVRANQVSGAQAHVERTRELMVADLAALVGESYERAYTDMVRVQQLAELEEVCAYKQALDRRAADPGGSEARIGFIQQLWRDRLRGVQRHVEVWQSLFSIRSLVVPMAQDVDSWLKFASLCRKSGRSRQAYRMLLQLLRYNPMNITQAGNPGYGAGSGAPHVMLAFLKHLWTQGNRTEAYNRIKDLASLNGRAFLRLGIWQWAMNDLDNPGVIAENLASFRAATEHAPNWAKAWHQWALFNVAVSAHYRCDPMRDENQAVSHVPPAVQGFFRSVALGQAAGDRTGNLQDILRLLTLWFNFGAYAEVRAALTEGFQLVSIDTWLLVIPQIIARIHTHNTDVRQLIHHLLVKIGRHHPQALMYPLLVATKSQSPARRQAAYSVLECIRQHSAALVEQAQLVSGELIRMAILWHEMWHEGLEEASRLYFGESNVEGMLNTLLPLHEMLEKAGPTTLKEIAFVQSYGRELSEAYEWLMKYKASRKEAELHQAWDLYYHVFKRINKQLRSLTTLELQYVSPALVRAQDLELAVPGTYIAGEPLVTIAAFAPQLHVISSKQRPRKLTIHGGDGAEYMFLLKGHEDLRQDERVMQLFGLVNTMLAHDRITAERDLSIARYAVIPLSPNSGLIGWVPNCDTLHALIREYREARKIPLNWEHRLMLGMAPDYDHLTVIQKVEVFEYALDSTSGEDLHKVLWLKSRNSEVWLDRRTNYTRSAAVMSMVGYILGLGDRHPSNLMLDRYSGKLLHIDFGDCFEASMNREKFPEKVPFRLTRMMIKAMEVSGIEGNFRTTCENVMRVLRSNKESVTAMLEAFVHDPLINWRLLNTTEAATEAALARTDGGGGGGGHMDGPGGHPGGRDALGGGGGGAGGGGGGDPGAMPSPPRRETREKELKEAFVNLGDANEVLNTRAVEVMKRMSDKLMGRDYAPELCVGGGSGASGMEPDSVPAQVGRLINMAVNHENLCQSYIGWCPFW

SEQ ID NO: 2566 - DNA, 7395 bp, Zea mays
  CDS (1)..(7395)
atgaagccctcgccgcacttcccggagatcggaaagaagcctaaagatttgattgctaaggaccacacatttaacatcgcggcttacatctcgtctggagcggatgttattgctgccgcgctccgtaaacatgttgaggaggaagcccgagatctcagcggtgaagcttttttaaggtttatggatcagctctatgagcagatatctagtttactgcagagcaacgatgttaatgaaaatttactggctctccgtgctatcgatgcgttaattgatatgccctttggagaaggcgcttccaaagtttctaagtttgccagcttcttgagaaacgtatttgaagtgaagcgcgaccctgaaatcctagttcccgcaagtgaagtgctgggtcatttagcaaaagcgggaggagcaatgactgcagatgaagtggagcggcagattaaaacggctttggggtggcttactggtgaacgagtggaatatcgccgatttgcagctgtactcattctcaaagagatggcagaaaatgcgtcaacagttttcaatgttcatgttcctgagtttgttgatgctatatgggtagcactgagagaccctaaacaagctgttcgtgaaaaagcagttgaagccttgcgcgcttgtctccatgttattgaaaaacgggagacacgttggcgtgtacaatggtattaccggatgtgtgaagccgcacaagttgggcttggcaggaatgcttctgttcatagtattcatggatcattattggccgttggagaattgctgaggaatacaggggagtttatgatgtctcggtacagagaagtggctgatattgtcctcgattatttaaagcatcgagatcagcttgttcgacgtagtataacatcacttcttcctcgaattgcccacttcctgcgtgacagatttgtgactaattacctgaagatttgtatggatcatatcttgtttgttctacgtacaccagacgagcgcgctagtggttttgttgcccttggagagatggctggggctctgggtgttgaacttgtgccttatttaccagcaattacctcacatttgcaagatgcgattgctcctcgcagaggaaggccatctcttgaggcaatttcttgtgtaggaagctttgcaaaagctatgggtcctgcaatggaacctcatattcgtagcggacttctagatgctatgttttttgctggtctttctgataaacttatagatgcactcgagtctataagcacaagcatcccgtctttactacccacaatacaggagcgtttattggattgtatatctcaagcactaccaaagtcatcaataaggccaggtgcttctgttggtcgagcaagcaggtcaaacaatttgcaacagtttgtggactctaatagtcctgttcttgtgcaacttgcactgtggactctagcaaacttcaactttaagggccatgaacttctggaattcgctagagagagtgtcatactttatttggaagatgaagatagcagtaccagaaaagctgcctctttgtgctgttgcaaattagttgcacactccctttctgcttcttcagcttcacagttcggttcaaataggacaaatcgtattggaggagctaagcgccgccggcttgtagaggagatagtggagaaacttcttatggctgcagttgctgatgctgatgttggtgttagaagttcagtcttcaaggctttgtatcgaaatccagcttttgatgatttcttggcccaagctgacatcttgacttcaatttttgttgccttaaatgatgaggaatatgatgtcagagaattggcaatttctgttgctggtcgattgtctgaaaagaatcctgcatatgtactgcctgcccttcgtcgctatcttatacaattgctcacatatcttgaccagagtatggatagcaagtgtagagaggaaagtgctagattattgggttgtttaattaggagctgcgcgcggctcattcttccttacattgctccagttcacaaggcactagtgactagattgtgtgaaggaacgggaccaaatgctaataatgctcttgctgcgggagtgcttgccactgttggagaactggccaaagtgggtggctttgctatgaggcaatatcttcctgagctgatgcctgtagttgtggattctcttttagatggaggtgctgttagtaaaagggaagtggcagtgtcaactctgggacagattatccagagcacaggctatgttattgccccctataatgagtaccccccattgcttggcttactcttgaagttgcttaatggtgaattggaatggtcaactagactagaagtgctgaaggttttagggattatgggtgcattggaccctcacgcacacaagcgtaatcagcacaatctacctggtcagcatagagaggtcctacggccaacatcgaaaccgcacaacatattgtttccatggaagaacctaccgactgactactggccttcttttcagcatccgaggactactattcaacagttgcaattagctccctcatgcgaattcttcgagatccttctctttcaagttatcaccaaatggtggttggctcccttatctttatttttaagtcaatgggccttggctgtgttcccatacttaccaaaggttcttcctgatctattccgtgctgttcgcatgtgcgaggatggtgctttaaaagagttcataacctggaaacttggaacattgatatctattgtccggcagcacatccgaaaatatttacaagacatactttccctcatctctgagctgtggacttcctcattcagcttggctgcaccaaatcggaccatacagggcccacagggttcaccggttcttcaccttgtcgagcaactatgcttagctttaaatgatgagttcagaatgtatttacttcacattctaccgagttgtatccaagtcttaggtgacgctgaacgttgcaatgattattactatgttcctgacatattacacacacttgaagtttttggcggaaatttggatgagcacatgcacttggttgctccggtgcttgttcgtttatttaaagtggagctggttgatatcaggcggcgtgcaattgttactttgactaatcttatacctaaggttcaggttggtactcatgtttcggctttagtgcatcatctgaagcttgtcttggatggcaacaacgatgatctgcggaaagatgctgcagaagcgctctgctgcctcgcccttggagaagactttactatcttcataccatcaatacgcaaaattcttgtgaagcaccacttgcggtacagaaaatgggatgagattgaaaatcggctactgaggcgagagctactcatcactgaaaacttgtctgtgcaaaagtacacacaatgtccacctgatgtcattagtgacccccttgatgattgtgatggtacaccttctgagatagctgatgaaacacagcgacaagcaagaagtcatcaagtcaatgatgtccggttgcggagtgccggtgaggcttctcaaaggagtactagggaagactgggctgaatggatgaggcatttcagtattgcgcttctcaaagagtcaccatctccagctttacgcacctgtgcaaggctagctcagcttcagccttctgttggccgcgagttgtttgctgcaggttttgcaagttgctgggcccaaatgagtgaatcctcccaggaacagctagtgagaagtctcaagacagccttctcatctcagaacattcctcctgaaattcttgccacgctgctgaacttagcagaatttatggaacatgatgagaagccgcttcctattgatacaagactgcttggtgcacttgctgagaagtgtcgagcatttgcaaaggcactccattataaagaaatggaatttgaagctgtgtgcaccaagaagatgggtgcaaatcctgttacagtggttgaatcccttattcatattaacaatcaactacagcagcatgaggcagctattggcatattgacttactcacagcaaaattcggaagttcaattgaaagaatcatggtatgaaaagttgcaccgttgggatgaggctcttaaagcatacaccgtgaaatcatctcaaacatctggtcctttacaaaacttggatgctacattaggtcgaatgaggtgtctagcagctttggctcggtgggaagatttaagtgcattgtgtagagagcaatggacgggtgcagaaccatctgctcgactggaaatggctccaatggctgcaaatgctgcttggcatatgggtgagtgggaccatatggcagactatgtttctcgcctggatgatgcagatgaaaataagctccgtatgttgggtaacgcaacagctagtggtgacggaagcagtaatggtgctttcttccgggcagttcttttagttcgttacaaaaagtatgatgacgctcggatgtatgttgagcgagctcggcggtgtttagctacagaacttgcagcactggtacttgagagttatgagcgagcgtataataacatggtgcgtgttcaacaactttcagaactggaagaggtgattgattactgcactcttcccatggaaagcccgattgctgacggacggagggaacttattcgcaatatgtggaatgaacggattaaaggaacaaaacggaatgtcgaggtgtggcaagccctacttgctgtcagggagttggttcttccccctaacgaagacagagacacctggataaagttcgctgaactttgctggaagaacggtcgtattagtcaggctagatctacgttagtcaaacttttacagtttgatcctgaatcttcccctgaattgacactgtatcatgcacatccacaagtagctctggcttatctaaaataccagtatgcagttggtgatgagcttaaaaggagggatgcattttctaaactgcaagagttgtctgtgcaggttgctaccaccatgggcaatttacctggaacatcagcaaaccatggcaccatgtcaaatgctggagtaccactcattgctcgtgtctacttgacacttggtagctggaagaaggcactatcacctgcattagatgacgattccattcaagaaattttgatttcttaccataatgccacgctaagtgcaaaggactgggggaaggcctggcacatatgggctttgttcaacacagaagtcatgtcacgctatactttccgaggccgaccagatattgctggaaaatatgttgttgcagcagtaactgggtatttctattctattgcttgtgcatctactacgaaaggggtcgatgatagcttgcaggatatccttcgtctgttaactctttggttcaaccatggggatacctcagaagttcaaacagcgttgcagaaaggtttttcccttgtcaagattgagatgtggctggttgtgctgccccagataattgctaggattcattcgaacaatagagtagttagagaactgatacaatctttgctagttcgaattggaaaggggcatccacaggctttgatgtatcctctcttggttgcctgcaaatcaataagtatattgagacaacgtgcagcgcaggaggtcgttgataagatccgccagcacagtggaggtcttgttgaccaggcacaacttgtgtcgaaggaactgatacgggtagcaattttgtggcatgaaatgtggcatgaggcactcgaggaagctagcaggatgtattttggtgagcacaatatcgaaggaatgcttgctgtacttgagccattgcatgcaatgcttgagaggggggatgagacaattaaagaaaatgccttcattcaggcttatgggcatgaattactggaagctcatgaatgctgtttgaaatatcgggctacaggagaggatgctgagctaactaaggcctgggatttgtattaccatgttttcagaagaatcgacaaacagcttccaagtcttacgaccctcgatctgcactctgtttcgcctgagctactcaaatgtcgaaagttggaacttgctgtgccaggaacttatgctgcagattcaccacttgtgacgattgagtattttgttccccaattgattgttataacgtccaaacaaagaccaagaaagctgacaattcatggaagtgatggcaatgattatgcattcttgcttaaaggccacgaagatttgcggcaagatgaacgagtaatgcagctttttggtttggtgaatactctcctagagaactcaaggaaaacatcagagaaggatttatcaatccaaagatatgctgttatacctttgtcacctaacagtggtttaattggatgggttccaaactgtgacacacttcatgctctgatccgtgaatacagagatgccaggaagattttcttgaatcaggagcacagacttatgttggcttttgcacccgattatgatcacttacccctcattgcaaaggtggaagtgtttcagcatgctttgcaaaatactgagggaaatgaccttgcgaaggttctgtggctgaagagtcgaacttcggaagtatggcttgagcgccgcacaaactacgctagaagcctggctgttatgagcatggttgggtatttgcttggtttaggagatcggcatccaagcaaccttatgttagatcgctatagtggaaaaatattacacatcgacttcggagattgctttgaggcttcaatgaatcgagaaaagttccctgaaaaagtaccattccgtttgactcgaatgcttgtgaaagctatggaagttagcggtattgagggtacattccgaacaacttgtgaaaatgtgatgcaagtccttcgcacaaacagagacagcgttatggccatgatggaggcatttgtacatgacccgttaatcaattggcgtctgttcaatttcaatgaggttcctcaagtgtcgaactatggtaatgttcatgctcacacggttgtcagtagtgaagaagcagtggctaaccgagagctcatgcaacctcagcgaggagcacgtgagagggaactgctacaggctgtcaatcaactcggtgatgccaatgaggttttgaatgagcgtgctgtagctgtgatggcacggatgagtgacaaactaacagggcgtgacttctcttctgggtcagctttggctggagcaggtagctctatccaacatggcagtgagcatttggcttcaggagatgcccgggatgcccaacctggtctctcagtgaaggttcaggttcagaagctcatactccaagcgacttcacacgaaaatttgtgccaaaactatgtcgggtggtgtccgttctggtga

SEQ ID NO: 2567 - protein, 2464 aa, Zea mays
MKPSPHFPEIGKKPKDLIAKDHTFNIAAYISSGADVIAAALRKHVEEEARDLSGEAFLRFMDQLYEQISSLLQSNDVNENLLALRAIDALIDMPFGEGASKVSKFASFLRNVFEVKRDPEILVPASEVLGHLAKAGGAMTADEVERQIKTALGWLTGERVEYRRFAAVLILKEMAENASTVFNVHVPEFVDAIWVALRDPKQAVREKAVEALRACLHVIEKRETRWRVQWYYRMCEAAQVGLGRNASVHSIHGSLLAVGELLRNTGEFMMSRYREVADIVLDYLKHRDQLVRRSITSLLPRIAHFLRDRFVTNYLKICMDHILFVLRTPDERASGFVALGEMAGALGVELVPYLPAITSHLQDAIAPRRGRPSLEAISCVGSFAKAMGPAMEPHIRSGLLDAMFFAGLSDKLIDALESISTSIPSLLPTIQERLLDCISQALPKSSIRPGASVGRASRSNNLQQFVDSNSPVLVQLALWTLANFNFKGHELLEFARESVILYLEDEDSSTRKAASLCCCKLVAHSLSASSASQFGSNRTNRIGGAKRRRLVEEIVEKLLMAAVADADVGVRSSVFKALYRNPAFDDFLAQADILTSIFVALNDEEYDVRELAISVAGRLSEKNPAYVLPALRRYLIQLLTYLDQSMDSKCREESARLLGCLIRSCARLILPYIAPVHKALVTRLCEGTGPNANNALAAGVLATVGELAKVGGFAMRQYLPELMPVVVDSLLDGGAVSKREVAVSTLGQIIQSTGYVIAPYNEYPPLLGLLLKLLNGELEWSTRLEVLKVLGIMGALDPHAHKRNQHNLPGQHREVLRPTSKPHNILFPWKNLPTDYWPSFQHPRTTIQQLQLAPSCEFFEILLFQVITKWWLAPLSLFLSQWALAVFPYLPKVLPDLFRAVRMCEDGALKEFITWKLGTLISIVRQHIRKYLQDILSLISELWTSSFSLAAPNRTIQGPQGSPVLHLVEQLCLALNDEFRMYLLHILPSCIQVLGDAERCNDYYYVPDILHTLEVFGGNLDEHMHLVAPVLVRLFKVELVDIRRRAIVTLTNLIPKVQVGTHVSALVHHLKLVLDGNNDDLRKDAAEALCCLALGEDFTIFIPSIRKILVKHHLRYRKWDEIENRLLRRELLITENLSVQKYTQCPPDVISDPLDDCDGTPSEIADETQRQARSHQVNDVRLRSAGEASQRSTREDWAEWMRHFSIALLKESPSPALRTCARLAQLQPSVGRELFAAGFASCWAQMSESSQEQLVRSLKTAFSSQNIPPEILATLLNLAEFMEHDEKPLPIDTRLLGALAEKCRAFAKALHYKEMEFEAVCTKKMGANPVTVVESLIHINNQLQQHEAAIGILTYSQQNSEVQLKESWYEKLHRWDEALKAYTVKSSQTSGPLQNLDATLGRMRCLAALARWEDLSALCREQWTGAEPSARLEMAPMAANAAWHMGEWDHMADYVSRLDDADENKLRMLGNATASGDGSSNGAFFRAVLLVRYKKYDDARMYVERARRCLATELAALVLESYERAYNNMVRVQQLSELEEVIDYCTLPMESPIADGRRELIRNMWNERIKGTKRNVEVWQALLAVRELVLPPNEDRDTWIKFAELCWKNGRISQARSTLVKLLQFDPESSPELTLYHAHPQVALAYLKYQYAVGDELKRRDAFSKLQELSVQVATTMGNLPGTSANHGTMSNAGVPLIARVYLTLGSWKKALSPALDDDSIQEILISYHNATLSAKDWGKAWHIWALFNTEVMSRYTFRGRPDIAGKYVVAAVTGYFYSIACASTTKGVDDSLQDILRLLTLWFNHGDTSEVQTALQKGFSLVKIEMWLVVLPQIIARIHSNNRVVRELIQSLLVRIGKGHPQALMYPLLVACKSISILRQRAAQEVVDKIRQHSGGLVDQAQLVSKELIRVAILWHEMWHEALEEASRMYFGEHNIEGMLAVLEPLHAMLERGDETIKENAFIQAYGHELLEAHECCLKYRATGEDAELTKAWDLYYHVFRRIDKQLPSLTTLDLHSVSPELLKCRKLELAVPGTYAADSPLVTIEYFVPQLIVITSKQRPRKLTIHGSDGNDYAFLLKGHEDLRQDERVMQLFGLVNTLLENSRKTSEKDLSIQRYAVIPLSPNSGLIGWVPNCDTLHALIREYRDARKIFLNQEHRLMLAFAPDYDHLPLIAKVEVFQHALQNTEGNDLAKVLWLKSRTSEVWLERRTNYARSLAVMSMVGYLLGLGDRHPSNLMLDRYSGKILHIDFGDCFEASMNREKFPEKVPFRLTRMLVKAMEVSGIEGTFRTTCENVMQVLRTNRDSVMAMMEAFVHDPLINWRLFNFNEVPQVSNYGNVHAHTVVSSEEAVANRELMQPQRGARERELLQAVNQLGDANEVLNERAVAVMARMSDKLTGRDFSSGSALAGAGSSIQHGSEHLASGDARDAQPGLSVKVQVQKLILQATSHENLCQNYVGWCPFW

SEQ ID NO: 2568 - DNA, 7335 bp, Aedes aegypti
  CDS (1)..(7335)
atgtcgacggtggtgctacagttcgtgagtgggctgaaaagccgcaacaaggatgcacagaataaggcggcccaggaactgtcgctgtacgtcaagacggaactgcgcgagattccgcaggatgatctgctggcgttcttcgaggacttcaaccagtacatttttgagatgttgtccagtgccgacatcaacgacaagaaaggaggcgtgctggccattaattgcttgataagtggcgatgtggtcaacacgacgactcagatttcccgttattcgaacaatctccggaatctgcttccgtcgagtgacatttcggtgatggagctggcagcgaaggtgctcgtcaagttagccctgctacccggctccaagggcgccgagtcgttcgagttcgacatcaaacgtgccttcgagtggctgatggaggaacgaaccgagggcaaacgccatgccgccgttttggtgctgcgtgaactggccgtggccatgccgacgtttttctaccagcaagttggaagctttttcgagcacatattcgtcgccatcaaggatcccaagccgatgattcgggagggagctggtcaagccttgcgggctgtattgattgtcacttcgcagagagagggaaccaagcagaataataatccacaatggtacaaccacttgttacgacaacgcaatggaatgcttcagggagcttccttccgcgagaaaggtttcaaccgagatgatcgcatccacggagcaataattgtgttcaatgaaatcttacgatgttcaaatgcagcctgggagaaaaagtacatgcagttggagagtttgaacgtcgatcgcaggtctcgtcacacggatgaaggtcacagcattttcccccggattcgtgtcccgttcatggacaagctaggaggaggacatagctctggagcgtctcgtaccagtgagggaagtgatgtcaaattcttccgccagaatagctccattcaggagtctgcaatctgccgagcgttgacgaacgacaactacgaattgatttgtcagaaagtgcttgagcaacgcaattcaaagtcaccctacgtgattcagtcgctgctgaccattctacctcgattggccgccttcaatcgcagagactttgtcaataaccatttgaaaactgtcgtcaactatcttatcctaacgattaagagcaaagaaaaggaacggaatctggcgttcgtcacgcttggctatatcgccgtggcagtcgagaaggatattgcccccttcaggaccaggatcatcgaggtgatcacggcagctctgcctccgaaagaaaccccaagcaagaagaaagtctgcgtcgatccgtcggtgttcatgtgcatcaccctgttgggtcatgcgttaaaaagtgcaattacaaccgatgtcaagagcttgatcttgccaatgctttcgactggactgagcacagggctaacggtgtgcttacacgagttgagcgagaatgtgccgcagctgaggcaggaaattaccagcggactgttgaagattttgtcctgcgtgctgatgaataaaccattgccgcagtttatacccgggcggcctcaaggtggaatgaacacgagcctctacgagcaacagattcaagatacgcccaccacagtgctggccctccgcactctgggaaccttcaatttcgaaggacacagcttgctaccgttcgtgcaacgatgcgccgatcactttctgctcagcgagcagcaggaaattcgcatcgaagccgttcagacgtgcactctgctgctgaagctggctctccaatcggtcgattcggcagacggatcggaaaccctcacccagaccgttggaagcgtgctggagaagattctgatcgttggtatcaccgacgttgatccgaatgtgcgtctgagggtgctgaaatctttggacgacagcttcgattctcagctggcgcaaccatggttcctgagctcgctgttgatcacgatgaatgatgaggtgtttgaaatcagggagttggcgattatcatcattggaagactgtcggccatcaatccggcttacgtgatgccaagcttgaggaaaacgatggtacagatcctaacggagctggaacactccggtatgagtagaaacaaggagcagagcgcgagaatgttggatcatctgatagtcagcactccgaggttgatatcttcctatatgcgtccgatcttgtcgatcttggttccgaaattgaaagagcctgaatcaaatccgggagtggtgttgaatgtgttgagagccataggtgatcttgctgaagttaatggaggtcataatgttttggaaaaatggtcggatgagctgctggctacattgctagagatgctaagcgatgccggatcaacggaaaagcgcggcgtggctttgtggactcttggccaattggtcagtgccacggggcaagcagtcaaaccgtaccacaaatatcccaatttgatcgatatattgatcaactttttgaaaaccgaacagcaaccgtacgtaaggcgggaaacgatccgtgtcctcgggttgctcggtgccttggatccgtacaagcacaagatgaatcgtggcctgattgacagccagaccaacaatatcctcatttcgatttccgacagcaagacagaggaatataccgatttgtccacgtcggaaatgttgatcaatatgaacaatcagctggaggagtactacccggcggtggccatttcaacgctgatgaaaatccttcgtgatcctacgttatcctcgcatcacaccagcgttgtccaggcgatcacctttatcttcaaaagtttgggtatcaaatgcgttccatatttgtcccaggtcttacccagtctgctcggcaatattcgcaatgccgaaatgaacttgaaggagttcttgttccagcagctatcgatcctgatcgagatagtcaaacagcacatcatcagcttcatggaggaaatattccagctgatcaaaacgttctggaacagtatctatcctttgcagccgaccctcatcattttggtggaaaagatcgccatcgctttgggatgtgagttcaagatctatcttcctcagttgatgccgcagatcttgcgagttctccttcacgatgcgtccacccatcgaatagtcaccgtcaagctcctcaacgctctgcagaagttcgggaacaatctggacgactatcttcacttgatcattccagccattgttaagctgttcgaaccgatcgaagttccttaccaggtgtctcttgcagccctagaaaccatcaactaccttgcggagatccttgatttcaccgatttctcgtcgcgcatcattcatcccttggtacgcgtcctggacaaccacccgggtcagctccaaacggccgcgctgcaaaccctctgctcgatcatgatccaactgggcaagaaatacctcgtttttgtcccgctagtcaaccgggtcatgatcaggcacaaaatatcttacacagagtacaacaaactcctctccaagctgcaaagtcagagcaccctcgccctggacgatgaattccgactgcgccaggctcggttcaagaatcgcgaaatgtccctcgctggggacaccaccatccgcaagttgaacgtgtccaccgcggatctccagctggcgttcaaagccaatcgcagggtatcccgtgacgattggctcgagtggctccgtcggctcagcattggtcttctgaaggagtccaaaagcccggcgctgcgatcctgccgaaccctggcccaaaactatccccagctgttgaaggatctgttcaacgcagccttcgtcagctgttggaccgatttaccggacagtctcaaagaggagctatcgtccagcttgaggcaggctctgatggtgccggaccttccggaaattacccaaaccattctcaacctggccgagtttatggaacactgcgagaacgatgcgctgaggatcgatccgaagatcttgggcgagagggccatggagtgccgagcctatgccaaggctttgcactacaaggaggaagagttcctgaacatgaaggacaaggatcagagcgtgttcgagtcgttgattttgatcaacaataagctgcagcagaaggaagcggctgaggggctgctggagtacgccatggaacacaggagcgcttctgaggaaatgaaagtccaggtgaggtggtacgagaagctgcacagctgggagaaagcattgaacttgtatcaggacaaattggagagcaatccgggtgatctggactcgagacttggtcagtggaggtgtttggaagcgctaggggagtggtcaacgctgaatacgctgaccaaggagacgtgggaatcgctgggaaccgaaggacagagtaaggccggtagacttgctgccgctgcagcctggggtttgaaggattgggagggaatgcaggagtttgtcaagttcatcccggaggacacgcaggacgggtcgttctatcgtgccgtactggctgtgcatcacggtgagtatgaacttgcccaaaccctaattgacgatacgagagacttgttggatacggaattgaccgcgatggccggcgaatcgtacgaacgcgcgtacggagcaatggtttgcgttcaaatgctgtcggaattggaagaagtcattcagtacaagctgattcccgagcggcaggaaactatcaaggcaatgtggtgggatcgcttgctcggtggccaacgtttggtggaagattggcaacgaattttgcaggttcatactttggttgtccaccccgcaaatgacgtcaaaacgtggctgaagtttgcctcactctgtcgcaagagtgattcgttgaaactttccgagaagaccctcgtcatgctgcttcgctacaatccctcggagtacccggatcacccgttggaattcatgcaaccagacatcagctttgcctacgcgaaacatctgtgggcagctggcgagcaagaaaaggcttacaatcaactgaatcgactagtcgccgatatgggcatcgagggtaacttcgacgtcgaggaaaaggacgaaaaccgccgtctgttggcgcgttgctacatgaagctcggacaatggcagaaccaactacaaggactcaacgagcaatccatcaagggcatcttggcttgctacgagaaggctaccaaacacgactccaattggtacaaggcgtggcatctctgggcttacatgaacttcgaggttgttcagaatcagaaacaacaggaggacctcatcaagaaccctggcggagacaaagagaagtgtatgattcggcagtatgccgttcccgcggttgaaggcttcttccgctcgatcaatctgtcacacggaaactccctccaagacacactccgtctcctaaccctctggttcgactacggacagtatcccaaggtgtacgaagccctggtcgaaggaatgcgcgtcattgaaatcaacacatggcttcaggtcatccctcagttgatcgcccgcatcgatactccgcgcaacctagttggccaactaatccaccagctgttgaacgacatcggaaagtgtcatccgcaggctcttgtctatccgctgaccgttgcttccaattcggcatccagtgcgcgacgacaggccgctcacaagatcttgggctccatgggtgaacattcgtccaacttggtcaaccaagcgatcatgtgcagcgaggaactgatccgcgtgaccattctgtggcacgaacagtggcacgagggcttggaggaggcgtcgcggctgtatttcggcgaccggaacatcaagggaatgttcgaaactttggaaccgctgcaccaaatgcttcagaggggacctcaaaccttgaaggagacctcgttcaatcaggcgtacggtagggatctgaacgaggcgcaggagtggtgcaaacattataagaactcgggcaacattcgtgacttgaaccaagcgtgggatttgtactatcacgtattccgccgaatttcccggcagttgccgcagcttacctccctagaactacaatacgtcagtcctaagctgctagcctgtcgtgatctagagctagccgtccccggaagctacgcccccggtcaggagctgatccggatcgccagcattcaatcgaacctccaggtgatcacttcgaagcaaagaccgcgaaaactttgcatccgtggctccaacggcaaggagtacatgttcctgctgaagggccacgaagatttgcgccaggacgaacgcgtgatgcagctgtttgggctggtgaacaccctgctgctaaacgatccggacacgttccgtcggaatctgaccattcaacggtacgcattcattccgttgagcaccaattccggcttgatcggttgggtgccccactgcgatacgctgcacacgctgactcgagattaccgcgagaagaaaaagaccatgctgaacatcgagcatcggattatgttgcgaatggcaacggattacgaccatctgacgttgatgcaaaaggtcgaagtctttgagtatgcgttggagctcaccaaaggagacgacctggccaagctgctctggctgaagagcccctcgtcggaggtttggttcgatagaagaacgaattatacgcgatcccttgcggtcatgtcgatggttggctacattctgggactgggcgatcgacatccgtcgaacttgatgctggatcgattgagcggcaaaattctgcacatcgactttggcgattgcttcgaggttgcgatgacccgcgagaagttcccggagaagattcccttccgtttgacgcgaatgctgatcaacgccatggaagttaccggcatcgaggggacctaccgccggacgtgtgaaagcgtcatgcacgtgctccgtcgcaacaaggatagtctaatggccgtgctggaagctttcgtatacgatccattgctcaactggcgcctgctggatgtggacaagaatcgcaggtccaagaatgccaccgacgtggacagcacaacggaaagcatggaagaaacgttggatcttctgatcaacgccaggaacctgcggatgaacgaagccaacggaggcggagacgtggtggatcagggcagcaattgcatcgccaatccggccgaagctaccaacaataaagcccgggccatcgtggatcgtgtgaagcagaaactgaccggaaaggacttcaacacggtcgaaccggtgcaacggcagatcgatctgttgatacggcaggcgacgaacaatgaaaacctctgccagtgctacatcgggtggtgtcctttctggtag

SEQ ID NO: 2569 - protein, 2444 aa, Aedes aegypti
MSTVVLQFVSGLKSRNKDAQNKAAQELSLYVKTELREIPQDDLLAFFEDFNQYIFEMLSSADINDKKGGVLAINCLISGDVVNTTTQISRYSNNLRNLLPSSDISVMELAAKVLVKLALLPGSKGAESFEFDIKRAFEWLMEERTEGKRHAAVLVLRELAVAMPTFFYQQVGSFFEHIFVAIKDPKPMIREGAGQALRAVLIVTSQREGTKQNNNPQWYNHLLRQRNGMLQGASFREKGFNRDDRIHGAIIVFNEILRCSNAAWEKKYMQLESLNVDRRSRHTDEGHSIFPRIRVPFMDKLGGGHSSGASRTSEGSDVKFFRQNSSIQESAICRALTNDNYELICQKVLEQRNSKSPYVIQSLLTILPRLAAFNRRDFVNNHLKTVVNYLILTIKSKEKERNLAFVTLGYIAVAVEKDIAPFRTRIIEVITAALPPKETPSKKKVCVDPSVFMCITLLGHALKSAITTDVKSLILPMLSTGLSTGLTVCLHELSENVPQLRQEITSGLLKILSCVLMNKPLPQFIPGRPQGGMNTSLYEQQIQDTPTTVLALRTLGTFNFEGHSLLPFVQRCADHFLLSEQQEIRIEAVQTCTLLLKLALQSVDSADGSETLTQTVGSVLEKILIVGITDVDPNVRLRVLKSLDDSFDSQLAQPWFLSSLLITMNDEVFEIRELAIIIIGRLSAINPAYVMPSLRKTMVQILTELEHSGMSRNKEQSARMLDHLIVSTPRLISSYMRPILSILVPKLKEPESNPGVVLNVLRAIGDLAEVNGGHNVLEKWSDELLATLLEMLSDAGSTEKRGVALWTLGQLVSATGQAVKPYHKYPNLIDILINFLKTEQQPYVRRETIRVLGLLGALDPYKHKMNRGLIDSQTNNILISISDSKTEEYTDLSTSEMLINMNNQLEEYYPAVAISTLMKILRDPTLSSHHTSVVQAITFIFKSLGIKCVPYLSQVLPSLLGNIRNAEMNLKEFLFQQLSILIEIVKQHIISFMEEIFQLIKTFWNSIYPLQPTLIILVEKIAIALGCEFKIYLPQLMPQILRVLLHDASTHRIVTVKLLNALQKFGNNLDDYLHLIIPAIVKLFEPIEVPYQVSLAALETINYLAEILDFTDFSSRIIHPLVRVLDNHPGQLQTAALQTLCSIMIQLGKKYLVFVPLVNRVMIRHKISYTEYNKLLSKLQSQSTLALDDEFRLRQARFKNREMSLAGDTTIRKLNVSTADLQLAFKANRRVSRDDWLEWLRRLSIGLLKESKSPALRSCRTLAQNYPQLLKDLFNAAFVSCWTDLPDSLKEELSSSLRQALMVPDLPEITQTILNLAEFMEHCENDALRIDPKILGERAMECRAYAKALHYKEEEFLNMKDKDQSVFESLILINNKLQQKEAAEGLLEYAMEHRSASEEMKVQVRWYEKLHSWEKALNLYQDKLESNPGDLDSRLGQWRCLEALGEWSTLNTLTKETWESLGTEGQSKAGRLAAAAAWGLKDWEGMQEFVKFIPEDTQDGSFYRAVLAVHHGEYELAQTLIDDTRDLLDTELTAMAGESYERAYGAMVCVQMLSELEEVIQYKLIPERQETIKAMWWDRLLGGQRLVEDWQRILQVHTLVVHPANDVKTWLKFASLCRKSDSLKLSEKTLVMLLRYNPSEYPDHPLEFMQPDISFAYAKHLWAAGEQEKAYNQLNRLVADMGIEGNFDVEEKDENRRLLARCYMKLGQWQNQLQGLNEQSIKGILACYEKATKHDSNWYKAWHLWAYMNFEVVQNQKQQEDLIKNPGGDKEKCMIRQYAVPAVEGFFRSINLSHGNSLQDTLRLLTLWFDYGQYPKVYEALVEGMRVIEINTWLQVIPQLIARIDTPRNLVGQLIHQLLNDIGKCHPQALVYPLTVASNSASSARRQAAHKILGSMGEHSSNLVNQAIMCSEELIRVTILWHEQWHEGLEEASRLYFGDRNIKGMFETLEPLHQMLQRGPQTLKETSFNQAYGRDLNEAQEWCKHYKNSGNIRDLNQAWDLYYHVFRRISRQLPQLTSLELQYVSPKLLACRDLELAVPGSYAPGQELIRIASIQSNLQVITSKQRPRKLCIRGSNGKEYMFLLKGHEDLRQDERVMQLFGLVNTLLLNDPDTFRRNLTIQRYAFIPLSTNSGLIGWVPHCDTLHTLTRDYREKKKTMLNIEHRIMLRMATDYDHLTLMQKVEVFEYALELTKGDDLAKLLWLKSPSSEVWFDRRTNYTRSLAVMSMVGYILGLGDRHPSNLMLDRLSGKILHIDFGDCFEVAMTREKFPEKIPFRLTRMLINAMEVTGIEGTYRRTCESVMHVLRRNKDSLMAVLEAFVYDPLLNWRLLDVDKNRRSKNATDVDSTTESMEETLDLLINARNLRMNEANGGGDVVDQGSNCIANPAEATNNKARAIVDRVKQKLTGKDFNTVEPVQRQIDLLIRQATNNENLCQCYIGWCPFW

SEQ ID NO: 2570 - DNA, 7158 bp, Emericella nidulans
  CDS (1)..(7158)
atggcgcaagcaggtccgatcacggacgtcacccagaggctcttcatcgagctgaagtctaagaacgaggaaacgcgggtccgagctgcttacgagctttacgaaaatgttcttgccatctcaagagactggcctcccgagaagttcattgaattctataacgccgttagtcaacgcatcgcccagcttgttgtcaccggcagtgatgcacacgaaaggatcggcggtctcctagctcttgaccgactaatagatttcgatggcgtggacaatgcgcagaagacaacgaggttcgccagctatttgcggagcgccctgcgcagcagcgataatgccgtacttgtctacgccgctcgggcacttggtcgcctggcgaagcccggtggtgcccttactgcagaattggttgagagtgaaatacagtcggcactggaatggcttcagtctgaacgacaagaaggtcgacggtttgctgcggtgctggttattcgggagctcgctaaagggtcgcccacgcttctttacgggttcgttcctcagatcttcgaactcatctgggttgctctgagagaccccaaggtacttatccgagagactgctgcagaagcagtaagtgaatgcttcgaaatcattgctgcgagagatatacaggttcggcagctatggtttgcgagaatatacgaggaagcgctccagggcttgaagtcgaataatgtggactggatccatggatcactcttggttcttaaggaacttctcctcaaaggagccatgttcatgaatgaacattatcgaaatgcgtgtgaaatcgtgcttcgtctcaaggaccaccgagacccgaaaattcggacgcaagttgttctcacaattcccattcttgcctcctacgctccggttgatttcaccgaaacatacctgcatagattcatggtgtatcttcaagcccagctcaaaaaggacaaggagcgcaatgctgctttcatagctatcggaaagattgcaaatgcggtgggtgtagctattgcacaataccttgatggtatcattgtttacatccgcgaaggactggccctgaaagcgaaaaatcgagctgccattaatgaagcgccaatgtttgagtgtattagtatgctctcgctggctgttgggcaggctctcagcaaatacatggaatcgctcctcgatcccatctttgcatgtggcttaagtgaatccctgacacaggctcttgttgatatggctcattatattccaccaatcaagcccacgattcaagtaaagctgctggatatgcttagcctgattcttgatgggacgccttttcgccccctaggttgtccggaaagcaggctacctccgctgccgtctttcgccaaagacttcaccctgcaagaactgcattctgacgctgaaattgcgctggctctccacaccctgggaagcttcgatttttctggtcatattttgaatgaatttgtgcgcgacgttgccattcactatgttgaaaacgacaaccctgaaattcggaaggctgcggctcttacctgctgccagctatttgtgcatgaccccattatcaatcagaccagcagccactcaatacaggttgttagcgaggtcatcgacaagctattgaccgttggtgtcggcgaccctgatcctgagattagacgcactgtgctatggtccttggatcgcaaatttgaccggcaccttgcacggccagaaaatatccgatgcctcttcttggccgtgaatgatgaagtgttcgctgtcagagaggcagcgatctgcataattggccgcctttccagtgtcaacccagcctacgtattccctcccctaaggaagttgctggtgaacttgctcactggacttgggttcgcaagcactgctcgccagaaggaagaaagtgcacagcttattagcctttttgtttcgaatgccacgaaacttatccggtcgtacgtcgaccctatggttacgactctgctaccgaaagcagttgatgccaatcacggcgtcgcctccacaacactgaaagctgtcggagaacttgcaagcgttgggggcagcgatatgaaagcctacctgcctaagctgatgccaatcgttctggatgccttgcaggacctttcatctcatgctaagagagaagcggctttgcgaacattgggccagatagccagcaactcaggctacgttatcgacccgtacaccgaccaccctcatctgctggcggtgcttattggtatcatcaagacggagcaggcaggatcgcttcgcaaggaaacgataaaagttctaggaattctaggtgcactggacccttataaataccagcaaataagcgaaaccgcaccagacgtccaccatatcaacgaagtacaagtggtgtcagacgttagtcttattatgcaaggccttgccccttccaatgaagagtactacccaactgttgttatccatactctcatgcagaacatacttcgcgagaactcccttgcgcaatatcattctgctgtcatcgacgcgattgttacgatctttaagacccttggcttgaagtgtgtccccttccttggccagatcattcctggtttcatttctgtcattcgaggttcaccctcaagccggctcgaatcttatttcaaccaaatggcaatccttgtcaatattgtgcggcagcacatcagagcctttcttcctgaaataattgaggtcattcgggaattctgggacacgtcatatcaggttcaagcgaccattctctcgcttgtggacgcgatagccaagtcccttgagggtgaatttaagaagtaccttgcaaatctcattcctccaatgctggacacactggaaaaggataatactccgcgccgccagccttccgagaggattttgcatagcttcttagtattcggctccagtggcgaagagtacatgcatctgattgtgccctccattgtgcgtctgtttgataggtcccagaacccagcgagcatcagaaagtcagctattgacagcttgaccaaactttcgcgacaagtgaatgtctccgattttgcgtccttgattgtacactccctttctcgagtcgttgccggcaacgaccgtatgttacgacaggctgctatggattgcatatgctctttgatattccagcttggccaggatttcaaccattatattcatctgctgaacaaggtcttgaagcatcatcaagtcaatcacgtgaactatcagatccttgtcacaaagctccagaaaggagacccgctcccacaggatctcaatcctgacgagagctatgccccattggcggatgacgcgaactatgcagagatcggtcaaaagaagatggtggtcaatcaacaacatcttaagaacgcctgggacgcttcgcaaaagtcgactcgcgaagactggcaagaatggatccggaggttcagtgtagagcttttgaaagaatcaccttcgccggcgctgcgtgcttgtgccagcctggcgggcatctaccaacccctcgctagggatctattcaatgccgctttcgtctcctgttggacggaattgtacgaccagtaccaggaagagctggttcggtcaatcgaaaaagccctcacctcgccgaacattccaccggaaattcttcagatcttgctcaatcttgctgagtttatggagcacgacgacaaggcgctgccgattgatatccgcactcttggaaaatatgctgccaaatgtcacgcgttcgcaaaggcgctccactacaaagaactcgagttcgagcaagatcagaactctggagctgtagaggcactcattactatcaacaatcagctccagcaatccgatgccgctattggtatccttcggaaggctcaggcgtatcgggatgttgaactgaaggagacctggtttgagaaacttcagcgatgggaagaagcccttgcagcttacaaacgtcgtgagaagattgaccccgactctttcggtatcacaatggggaaaatgcgctgtctacatgctcttggagaatggaaagtgttgtctgacctcgctcaggagaagtggaaccaggcctctctagaacaccggaaatcaatcgctcctctcgctgcggcagctgcatggggtcgcggtcaatgggagctgatggattcgtacctaggagttatgaaagaacaatctcctgaccgttcgttctttggggcaatactggcaattcatcgcaaccaatttgatgaagccattatgtacatcgaaaaggcccggaacggccttgacacggaactctcagcacttctcggagagtcatataaccgtgcctacaatgtagttgttcgcgttcaaatgcttgctgaactcgaggagatcatcacctacaaacagaatgttggtgatcccgagagacaagaggcaatgcgccagacctggaacaggcgacttctcggctgccagcagaatgtagaggtatggcagcgcatgctcaaggtcagagcacttgttacaacaccgcgagagaacctagacatgtggatcaagtttgccaatttgtgtcgcaaatcaaaccgcatggggttagcggaacgttctctcgcctctctagaaactgtcatccctgacggcaacggcggcactcgcactatctccccaccagaagtcacatatgctcgcttgaagtttagctgggcaactggccgccaacgcgaggcccttcatatgctccgtgaatttactgccaacctaacagaagacttcactcgcttcaatgcacttgttgcctcacaatctgaccataacggtatcaacggcgttaatggtatcgcagaaggaaaccataccgatatcatggcccttcgagagcgcgttggtgatgtcaacaagtttagaaagctccttgcaaagagttatctaagacttggtgagtggcaaacggctctacaacgaggggactggcggccagagcatgtccgcgaagtactcaacgcatattcagcagccaccaggtacaaccgcgattcctacaaagcctggcactcatgggccctggccaactttgaggtcgtgacgacaattgccagccaggcaagtaaggacggcggaaatctggcattggttccagggcatatcgtaacagaacatgtgattcctgcgattcgcggcttttttaggtccattgccctctcttcgacgtcgtctcttcaggatactcttcggttgctcactctctggttcaaccatggtggtgaccaggaggtgaactcggtcgttacagagggtttcacggctgttaatatcgacacgtggctcgccgtcactcctcagcttattgcccgcatcaatcagcccaacttcagggttcgcagcgccgttcatcgcttgcttgctgaagttggcaaggcacatccccaagccctcgtgtatccgctcacagttgcgatgaagtcgaatgttgcccgacgatcacagtccgcaggcaacattatggagagcatgcggacacacagtgcaaacctagtggagcaggctgatcttgtaagtcatgagctgattagggtcgctgttctgtggcacgaactctggcacgaaggactggaagaggcgtcacgtctctatttcggtgaccataacgtggatgggatgtttgcaactctcgcaccgcttcatgaaatgcttgataaaggtgctgaaaccctgcgcgaagtatcgtttgcccaagctttcggacgtgacctggctgaggccaagcattactgcatgctctatcgcgagacggaagaaatcggtgacctaaaccaagcgtgggatttgtattacacagtgttccgcaaaatcagccgacagctaccacagttatcaaccctagatctcaaatacgtctcgcccaaactcaaggattgcgtggaccttgatctcgctgttcctggtacctaccaaagtggcaggcccattatccgaatcatcagtttcgatccaatcctacatgttcttcaaacgaagaagcgaccacggaggatgactttgaagggcagtgacggcagctcctacatgtatgtggtgaagggccacgaagatatccgacaagatgagagagtcatgcagttattcggcctggtcaacactcttctcgataacgatagtgaaagcttcaagcggcatctaacggtgcagcgcttcccggccattcctctgtctcagaactctggtatcatcggctgggtcaccaatagtgacaccctccatgctttgataaaagaataccgggaaacgcggcgtattctcctcaacatcgagcataggatcatgttacagatggctccagactatgacaatctaacgctcatgcagaaggttgaagtatttggctatgcgatggacaacacaaccgggaaggatctgtaccgtgttctgtggttgaagagtaagagctccgaagcctggcttgagcgtcgtaccaactacactcgttcacttggagtcatgtccatggtcggctacatccttggtctaggtgaccgccacccgtccaatcttcttctggacagagtgaccggcaaagtggttcatattgactttggtgactgcttcgaagttgccatgcatcgtgaaaagtatccggagcgcgtgccattccgtttgacgcgtatgttgacgtttgcgatggaagtcagcaacattgaaggaagctaccggatcacttgtgaagctgtcatgcgggtgatacgtgagaacaaggactcgctgatggccgttctggaggcttttattcacgaccctctaatcaactggcgtctgggaattcgcgagtctcctgaccgaatgccatttaacgcggagcgtcgtcaatcgattgtctccaatgtcaacctcgagcacggcgtccaacccagcaacttctctcggcaccgtcggccttcaatccttgaaggtggtattctcgacgctcaagaaggggtgcctaatgaggcacgtgaggctcagaatgcaagagccttacaggtgcttgctcgggtgcgggagaagctgaccggccgggactttaagcctagcgaagagctcaatgttagcgatcaagttgacaagcttcttgcacaggcaactagtgttgagaacatctgtcagcattggattggatggtgcagtttctggtga

SEQ ID NO: 2571 - protein, 2385 aa, Emericella nidulans
MAQAGPITDVTQRLFIELKSKNEETRVRAAYELYENVLAISRDWPPEKFIEFYNAVSQRIAQLVVTGSDAHERIGGLLALDRLIDFDGVDNAQKTTRFASYLRSALRSSDNAVLVYAARALGRLAKPGGALTAELVESEIQSALEWLQSERQEGRRFAAVLVIRELAKGSPTLLYGFVPQIFELIWVALRDPKVLIRETAAEAVSECFEIIAARDIQVRQLWFARIYEEALQGLKSNNVDWIHGSLLVLKELLLKGAMFMNEHYRNACEIVLRLKDHRDPKIRTQVVLTIPILASYAPVDFTETYLHRFMVYLQAQLKKDKERNAAFIAIGKIANAVGVAIAQYLDGIIVYIREGLALKAKNRAAINEAPMFECISMLSLAVGQALSKYMESLLDPIFACGLSESLTQALVDMAHYIPPIKPTIQVKLLDMLSLILDGTPFRPLGCPESRLPPLPSFAKDFTLQELHSDAEIALALHTLGSFDFSGHILNEFVRDVAIHYVENDNPEIRKAAALTCCQLFVHDPIINQTSSHSIQVVSEVIDKLLTVGVGDPDPEIRRTVLWSLDRKFDRHLARPENIRCLFLAVNDEVFAVREAAICIIGRLSSVNPAYVFPPLRKLLVNLLTGLGFASTARQKEESAQLISLFVSNATKLIRSYVDPMVTTLLPKAVDANHGVASTTLKAVGELASVGGSDMKAYLPKLMPIVLDALQDLSSHAKREAALRTLGQIASNSGYVIDPYTDHPHLLAVLIGIIKTEQAGSLRKETIKVLGILGALDPYKYQQISETAPDVHHINEVQVVSDVSLIMQGLAPSNEEYYPTVVIHTLMQNILRENSLAQYHSAVIDAIVTIFKTLGLKCVPFLGQIIPGFISVIRGSPSSRLESYFNQMAILVNIVRQHIRAFLPEIIEVIREFWDTSYQVQATILSLVDAIAKSLEGEFKKYLANLIPPMLDTLEKDNTPRRQPSERILHSFLVFGSSGEEYMHLIVPSIVRLFDRSQNPASIRKSAIDSLTKLSRQVNVSDFASLIVHSLSRVVAGNDRMLRQAAMDCICSLIFQLGQDFNHYIHLLNKVLKHHQVNHVNYQILVTKLQKGDPLPQDLNPDESYAPLADDANYAEIGQKKMVVNQQHLKNAWDASQKSTREDWQEWIRRFSVELLKESPSPALRACASLAGIYQPLARDLFNAAFVSCWTELYDQYQEELVRSIEKALTSPNIPPEILQILLNLAEFMEHDDKALPIDIRTLGKYAAKCHAFAKALHYKELEFEQDQNSGAVEALITINNQLQQSDAAIGILRKAQAYRDVELKETWFEKLQRWEEALAAYKRREKIDPDSFGITMGKMRCLHALGEWKVLSDLAQEKWNQASLEHRKSIAPLAAAAAWGRGQWELMDSYLGVMKEQSPDRSFFGAILAIHRNQFDEAIMYIEKARNGLDTELSALLGESYNRAYNVVVRVQMLAELEEIITYKQNVGDPERQEAMRQTWNRRLLGCQQNVEVWQRMLKVRALVTTPRENLDMWIKFANLCRKSNRMGLAERSLASLETVIPDGNGGTRTISPPEVTYARLKFSWATGRQREALHMLREFTANLTEDFTRFNALVASQSDHNGINGVNGIAEGNHTDIMALRERVGDVNKFRKLLAKSYLRLGEWQTALQRGDWRPEHVREVLNAYSAATRYNRDSYKAWHSWALANFEVVTTIASQASKDGGNLALVPGHIVTEHVIPAIRGFFRSIALSSTSSLQDTLRLLTLWFNHGGDQEVNSVVTEGFTAVNIDTWLAVTPQLIARINQPNFRVRSAVHRLLAEVGKAHPQALVYPLTVAMKSNVARRSQSAGNIMESMRTHSANLVEQADLVSHELIRVAVLWHELWHEGLEEASRLYFGDHNVDGMFATLAPLHEMLDKGAETLREVSFAQAFGRDLAEAKHYCMLYRETEEIGDLNQAWDLYYTVFRKISRQLPQLSTLDLKYVSPKLKDCVDLDLAVPGTYQSGRPIIRIISFDPILHVLQTKKRPRRMTLKGSDGSSYMYVVKGHEDIRQDERVMQLFGLVNTLLDNDSESFKRHLTVQRFPAIPLSQNSGIIGWVTNSDTLHALIKEYRETRRILLNIEHRIMLQMAPDYDNLTLMQKVEVFGYAMDNTTGKDLYRVLWLKSKSSEAWLERRTNYTRSLGVMSMVGYILGLGDRHPSNLLLDRVTGKVVHIDFGDCFEVAMHREKYPERVPFRLTRMLTFAMEVSNIEGSYRITCEAVMRVIRENKDSLMAVLEAFIHDPLINWRLGIRESPDRMPFNAERRQSIVSNVNLEHGVQPSNFSRHRRPSILEGGILDAQEGVPNEAREAQNARALQVLARVREKLTGRDFKPSEELNVSDQVDKLLAQATSVENICQHWIGWCSFW

SEQ ID NO: 2572 - DNA, 7542 bp, Arabidopsis thaliana
  CDS (1)..(7542)
atgtctacctcgtcgcaatcttttgtggctggacggcctgcatccatggcttccccttcgcaatcgcaccgcttttgtggtccctcagccaccgcttctggtggcggaagctttgacactttgaatcgtgtcatcgctgacctttgcagccgtggtaatcctaaggagggagctcctttagcgtttaggaaacacgtagaggaagcagttcgtgatcttagtggtgaagcttcctctaggttcatggagcaattatatgacaggattgctaatttaattgagagcactgatgtggcggaaaacatgggtgcactcagagccattgatgagttgacggagattggatttggtgagaatgctactaaggtttctagatttgcgggttacatgaggactgtgttcgagttgaagcgtgatcctgaaatcttggtgcttgctagtagagttttggggcaccttgctcgggcaggtggagcaatgacttctgatgaagtggagtttcagatgaaaacagcttttgattggcttcgcgtagacagggtggaatatcgtcgtttcgccgccgttttaatattaaaggagatggccgaaaatgcttctactgtctttaacgttcatgtccctgaatttgtggatgctatctgggttgcacttagggacccccagttgcaagtgcgagaacgagctgttgaagctttgcgtgcatgccttcgtgttattgagaaaagggagactcgatggcgagtgcagtggtactatcgaatgtttgaagctacacaggatgggttgggcagaaatgctccggttcacagtattcatggttctttacttgccgtgggggagctgttgagagtttacagcttaatgctagagttcgtttgcaggaatacaggtgagttcatgatgtctaggtatagagaagttgccgaaattgtcctcagataccttgaacatcgtgatcgccttgttcgccttagcatcacctcgttactgcctcgcattgctcactttctccgtgaccggtttgtgacaaactatttaacgatatgcatgaatcatattcttactgtgttaagaataccggctgaaagagccagtgggttcatcgcccttggggaaatggctggtgctttggatggtgagcttatccattatttgccgacaattatgtctcatctgcgggatgcgattgctccacgtaaaggcagacctttgcttgaagctgtggcttgtgttggtaacatcgcaaaggcaatgggatccacagtggaaactcatgttcgagatcttttagatgttatgttttcatctagtctctcttccacacttgttgacgctcttgaccagataaccatcagcattccttctttgctgccaacagtacaagatcggcttctagattgcatttcgttggttctttcaaaatcccattattctcaagcaaagcctcctgttaccattgtccgaggtagtacagtgggcatggcaccacagtcttctgaccctagttgttcagctcaagttcaactagccctgcagactcttgctcgtttcaatttcaagggacatgatcttcttgaatttgctcgggagtcagttgttgtttatttggatgatgaggatgcagccacaagaaaagatgctgctttgtgttgttgcagactaattgcaaattctctttctggcatcacacaatttggctcgagcaggtcaacacgagcaggggggagacgcaggcgccttgtggaagagattgtggaaaagcttctcaggacagccgttgcagatgctgatgtaactgttcgcaaatctatattcgttgctttatttggcaaccaatgtttcgatgattatctagcacaggctgatagtttgactgccatttttgcttccttaaatgatgaggaccttgatgttcgagaatatgccatctcagttgctggaaggttatcggaaaaaaatccagcatacgtacttccagcacttcgtcgccatcttatacagttgttgacctatcttgagctgagcagtgcagataacaagtgcagggaagagagtgcaaagctccttggttgtttagttcgaaattgtgaacggctcattcttccatacgtagcccctgtccaaaaggcacttgttgcgagacttagtgaaggaactggagtgaatgctaacaataatattgtcactggagttctcgtaactgttggggatcttgcaagagtgggtggcttggcaatgagacaatatattccggagctgatgcctttaattgttgaagctttaatggatggagctgctgtagcaaaacgtgaggtggctgtttctactcttggtcaagttgttcaaagtacagggtatgttgtgactccatacaaggaatacccattgttgcttgggttactcttgaaattgctgaagggtgacttagtgtggtctaccagacgagaagtgctcaaggttcttggaattatgggcgctttggatcctcatgtgcataaacgtaaccaacaaagtttatcaggatcacatggtgaagttcctcgcggcactggtgattctggtcaacctattccatcaattgatgagttacctgtcgaactccggccgtcatttgctacatctgaggattattactcaacggttgctatcaactcgcttatgcgaattcttagagatgcatcacttcttagttaccacaaaagggttgttagatctctgatgatcattttcaaggttttacctgagctttttcacactgttcgaacatctgatgagaacctgaaggacttcattacgtggggtcttgggactcttgtttccattgttcgccagcacatacgcaagtatctgccagagctgctttcattagtctctgaactatggtcatccttcaccttgcccggtcccatacgcccatcacgtggtcttccgatatcttatggggagtacttcgcctctcttactgataatcaggttctgcatctactggaacatctttgcttggcacttaatgatgaattcagaacttatcttccagtcatccttccatgtttcatccaagtattaggtgacgccgagcggtttaatgattacacctatgttcctgatattctccacacactcgaagtgtttggcggaactcttgatgagcacatgcatttactccttccggcacttattcgattgtttaaagtagatgctcctgtagctataagacgcgatgccatcaaaactttgacaagagtaatcccgtgtgttcaggttactggtcatatctccgctctcgtgcatcacttgaagctagtattagatgggaagaatgatgagttgcggaaagatgctgtcgatgcactatgctgtttggctcatgcacttggagaggacttcaccatattcattgaatcaattcacaagcttttattgaagcatcgattgcggcataaagaatttgaggaaattcatgctcgctggcggagacgtgaaccattgattgtagctacaactgcaacccaacaattaagtaggcgactgccagttgaggttatcagggatcctgtaattgagaatgagatcgatcctttcgaagaaggaactgacagaaaccatcaggttaatgatggtagactacggacagctggagaagcttctcaacgcagcaccaaagaagattgggaggaatggatgagacattttagtattgaattacttaaggagtctccctctccagcattaagaacttgtgcaaaacttgctcagttgcagccatttgtcgggagagagttgtttgctgctggctttgtcagttgctgggcacagctaaacgagtctagccaaaagcagttagttaggagcttggaaatggccttttcatctccaaatatccctccagaaattttagctacactactcaatttggcagagtttatggaacatgatgagaagcctcttcccattgatattcgtcttctgggggctcttgctgaaaagtgccgtgtttttgccaaagctctgcattataaagagatggaatttgaaggtccacgatccaagaggatggatgccaacccagttgctgttgtcgaggctcttatacacataaataatcagttacaccagcatgaggctgctgtcggtatactaacctatgctcaacaacatcttgatgtgcaattaaaagaatcatggtatgagaagctgcagcgctgggacgatgcactcaaggcgtacactttgaaagcatctcaaacaacaaatcctcatcttgtattagaagccacattaggacaaatgagatgtcttgctgcacttgcacgatgggaagagctcaacaatctctgcaaagagtactggagtcctgctgagccatctgcgcgtctggaaatggcaccaatggctgcacaagctgcatggaacatgggagagtgggatcaaatggccgaatatgtgtctcggctagatgatggtgatgaaacaaagcttcggggtttagcaagcccggtttctagtggcgatgggagcagtaatggcacattcttcagggctgttctgttagttcgaagggcaaagtacgacgaggcacgcgaatatgtggaaagagctagaaaatgtcttgccacagaacttgcagcgctggttttggagagctatgagcgtgcgtacagcaatatggttcgtgttcagcagctgtcagaactagaggaggtaattgaatattatacgctgcctgtgggaaatactattgccgaagaacggagagctctaattcgtaatatgtggactcagcggattcagggatctaagcgtaatgtggaggtgtggcaagcacttttggctgtccgggcacttgtgctacctcctacagaagatgtggaaacttggctcaagtttgcctcgctttgtcgaaagagtgggaggatcagtcaggcgaaatctactctactcaagctcttaccgtttgatccagaagtatcaccagaaaacatgcaatatcacggacctccacaagtgatgcttggatacttaaaataccaatggtcacttggagaggaacgtaagcgcaaagaggcatttaccaagctgcagattctaacgagagagctctcaagtgtgccacattctcaatctgacatactggctagcatggtatctagcaagggcgcaaatgttccacttcttgcacgtgtaaatctcaaactgggaacgtggcagtgggcactttcttccggtttgaatgatgggtctattcaagaaattcgtgatgcgtttgacaaatctacttgctatgctcctaaatgggctaaagcatggcacacatgggcattattcaatacagcagtgatgtcgcattacatttcaagaggtcaaattgcttcccagtacgttgtttctgcagtcactggatatttttattctatagcatgtgcagcaaatgccaaaggagttgatgatagtttacaggacatactgcgtcttctgacattgtggttcaaccatggagctacagctgatgtccaaaccgcattgaagacaggattcagtcatgtcaacattaacacatggcttgttgtgctacctcaaatcattgctaggatacattctaataatcgtgctgtcagggaactgattcagtctcttctcatccgcataggcgaaaaccacccacaggctctgatgtatccccttctcgttgcatgtaaatcaataagcaatcttcggagagctgcggctcaagaggtggttgataaagttcgccagcacagtggtgcactcgtggatcaggcgcaacttgtatcacatgaacttatcagggttgccatactttggcatgaaatgtggcatgaagcactagaagaagctagtcgcttgtattttggtgaacataacattgaaggcatgctgaaagtacttgaacccttacatgacatgctcgacgaaggtgtaaaaaaggacagtacgaccatacaggaaagagcatttatagaggttggaaatttcaatcccggatttttggcataccgtcacgaactaaaagaggcacatgaatgctgttgcaattacaagataactgggaaagatgctgaacttacacaggcttgggatctttactatcacgttttcaaacggattgacaaacagctagccagtctcacgacattggatttggaatctgtttctcctgagttgctgctgtgccgtgacttggagctagcagttcctggaacatatcgtgcagatgcccccgtcgtgactatatcatctttttcacgccaacttgttgttataacctctaaacaaagaccaaggaaattgactattcacggaaatgacggtgaggactacgccttcttgttgaagggacatgaagatttaaggcaagatgagcgtgttatgcagctttttggtttggtgaacactttgcttgagaattccagaaaaacagccgaaaaagatctttccattcaacgctattctgtaataccactatctcccaatagtggactcatcggatgggttccgaactgcgatacccttcaccatcttattcgagagcacagagatgcaagaaagatcattcttaatcaagaaaataagcatatgttgagttttgctccagactatgacaatctaccgcttatagcaaaggttgaagtatttgagtatgctctagaaaacacagagggaaatgatctatccagggttctctggttaaaaagtcgctcgtcagaagtttggctagaaagaagaacaaactatactagaagtttagcagttatgagtatggttggttatattcttgggttaggtgatcgacacccaagtaaccttatgcttcatagatacagtggaaagatcttgcatattgattttggagattgttttgaggcttctatgaatagagagaagtttcctgaaaaggttccattccgcctgacaagaatgcttgtcaaagcaatggaagtcagtggcattgaaggaaacttccgctcaacctgcgaaaacgttatgcaagttctcagaaccaataaagatagtgtaatggcaatgatggaagcgtttgtacatgatcctttaatcaattggcgtcttttcaatttcaatgaagtcccccaattagcactgctcggtaacaacaaccccaatgctcctgctgatgttgagcctgacgaagaagatgaagatcccgctgatatagatcttcctcagcctcaaaggagtactcgagagaaggagattcttcaggctgtaaatatgcttggagatgctaatgaagttttaaatgagcgtgccgtagttgttatggcacgtatgagtcataagcttacagggcgtgatttttcttcgtctgcaattccgagcaatcccattgctgatcataataacttgctcggaggagattctcatgaagtcgaacatggtttgtctgtgaaagttcaggttcaaaaactaatcaatcaagccacttcccatgagaatctctgtcaaaactatgttgggtatgttcctctacacttctacactcctaaaccccgattgctttag

SEQ ID NO: 2573 - protein, 2513 aa, Arabidopsis thaliana
MSTSSQSFVAGRPASMASPSQSHRFCGPSATASGGGSFDTLNRVIADLCSRGNPKEGAPLAFRKHVEEAVRDLSGEASSRFMEQLYDRIANLIESTDVAENMGALRAIDELTEIGFGENATKVSRFAGYMRTVFELKRDPEILVLASRVLGHLARAGGAMTSDEVEFQMKTAFDWLRVDRVEYRRFAAVLILKEMAENASTVFNVHVPEFVDAIWVALRDPQLQVRERAVEALRACLRVIEKRETRWRVQWYYRMFEATQDGLGRNAPVHSIHGSLLAVGELLRVYSLMLEFVCRNTGEFMMSRYREVAEIVLRYLEHRDRLVRLSITSLLPRIAHFLRDRFVTNYLTICMNHILTVLRIPAERASGFIALGEMAGALDGELIHYLPTIMSHLRDAIAPRKGRPLLEAVACVGNIAKAMGSTVETHVRDLLDVMFSSSLSSTLVDALDQITISIPSLLPTVQDRLLDCISLVLSKSHYSQAKPPVTIVRGSTVGMAPQSSDPSCSAQVQLALQTLARFNFKGHDLLEFARESVVVYLDDEDAATRKDAALCCCRLIANSLSGITQFGSSRSTRAGGRRRRLVEEIVEKLLRTAVADADVTVRKSIFVALFGNQCFDDYLAQADSLTAIFASLNDEDLDVREYAISVAGRLSEKNPAYVLPALRRHLIQLLTYLELSSADNKCREESAKLLGCLVRNCERLILPYVAPVQKALVARLSEGTGVNANNNIVTGVLVTVGDLARVGGLAMRQYIPELMPLIVEALMDGAAVAKREVAVSTLGQVVQSTGYVVTPYKEYPLLLGLLLKLLKGDLVWSTRREVLKVLGIMGALDPHVHKRNQQSLSGSHGEVPRGTGDSGQPIPSIDELPVELRPSFATSEDYYSTVAINSLMRILRDASLLSYHKRVVRSLMIIFKVLPELFHTVRTSDENLKDFITWGLGTLVSIVRQHIRKYLPELLSLVSELWSSFTLPGPIRPSRGLPISYGEYFASLTDNQVLHLLEHLCLALNDEFRTYLPVILPCFIQVLGDAERFNDYTYVPDILHTLEVFGGTLDEHMHLLLPALIRLFKVDAPVAIRRDAIKTLTRVIPCVQVTGHISALVHHLKLVLDGKNDELRKDAVDALCCLAHALGEDFTIFIESIHKLLLKHRLRHKEFEEIHARWRRREPLIVATTATQQLSRRLPVEVIRDPVIENEIDPFEEGTDRNHQVNDGRLRTAGEASQRSTKEDWEEWMRHFSIELLKESPSPALRTCAKLAQLQPFVGRELFAAGFVSCWAQLNESSQKQLVRSLEMAFSSPNIPPEILATLLNLAEFMEHDEKPLPIDIRLLGALAEKCRVFAKALHYKEMEFEGPRSKRMDANPVAVVEALIHINNQLHQHEAAVGILTYAQQHLDVQLKESWYEKLQRWDDALKAYTLKASQTTNPHLVLEATLGQMRCLAALARWEELNNLCKEYWSPAEPSARLEMAPMAAQAAWNMGEWDQMAEYVSRLDDGDETKLRGLASPVSSGDGSSNGTFFRAVLLVRRAKYDEAREYVERARKCLATELAALVLESYERAYSNMVRVQQLSELEEVIEYYTLPVGNTIAEERRALIRNMWTQRIQGSKRNVEVWQALLAVRALVLPPTEDVETWLKFASLCRKSGRISQAKSTLLKLLPFDPEVSPENMQYHGPPQVMLGYLKYQWSLGEERKRKEAFTKLQILTRELSSVPHSQSDILASMVSSKGANVPLLARVNLKLGTWQWALSSGLNDGSIQEIRDAFDKSTCYAPKWAKAWHTWALFNTAVMSHYISRGQIASQYVVSAVTGYFYSIACAANAKGVDDSLQDILRLLTLWFNHGATADVQTALKTGFSHVNINTWLVVLPQIIARIHSNNRAVRELIQSLLIRIGENHPQALMYPLLVACKSISNLRRAAAQEVVDKVRQHSGALVDQAQLVSHELIRVAILWHEMWHEALEEASRLYFGEHNIEGMLKVLEPLHDMLDEGVKKDSTTIQERAFIEVGNFNPGFLAYRHELKEAHECCCNYKITGKDAELTQAWDLYYHVFKRIDKQLASLTTLDLESVSPELLLCRDLELAVPGTYRADAPVVTISSFSRQLVVITSKQRPRKLTIHGNDGEDYAFLLKGHEDLRQDERVMQLFGLVNTLLENSRKTAEKDLSIQRYSVIPLSPNSGLIGWVPNCDTLHHLIREHRDARKIILNQENKHMLSFAPDYDNLPLIAKVEVFEYALENTEGNDLSRVLWLKSRSSEVWLERRTNYTRSLAVMSMVGYILGLGDRHPSNLMLHRYSGKILHIDFGDCFEASMNREKFPEKVPFRLTRMLVKAMEVSGIEGNFRSTCENVMQVLRTNKDSVMAMMEAFVHDPLINWRLFNFNEVPQLALLGNNNPNAPADVEPDEEDEDPADIDLPQPQRSTREKEILQAVNMLGDANEVLNERAVVVMARMSHKLTGRDFSSSAIPSNPIADHNNLLGGDSHEVEHGLSVKVQVQKLINQATSHENLCQNYVGYVPLHFYTPKPRLL

SEQ ID NO: 2574 - DNA, 7008 bp, Schizosaccharomyces pombe
  CDS (1)..(7008)
atggagtattttagtgatctaaaaaacaaaaatgaaagcattcaactagcagccgctgatcaattaaaagaatttgtacatagttctactaaggaattatcaggtgaatcccttgcgcgtttcaataacgatatcaatcgtcgaatttttgagcttattcatagccatgattcccacgaaagatttggaggaatccttgcgataggcaagctaattgaattcgaaagtgagggagatgttactaatctttcgcggtatgcaaattacttacgaatgacccttcctagtacggattggcattcgatggaactatctgcgaaggttcttggtcatttggctgcgtctggtggtacccttgcagccgaattcgttgaatttgaagttcagcgtgctttcgagtggcttcaaggagaccgtcaagagcaaaaacggatggcggctattttaattattaaggctttagcacaaaattctcctaccttagtttacttgtatattagtgaaattttccaaaatttgtggactggattgcgtgatccaaagcctcttattcgggaaactgctgctgatgctttgggtgcttctttagacgtggtttgtcaaagagaagctaaagttcaattgcagtgttttaatgaagttctgcttcaagctgaacatggtttacgacagtcgagtgtggaatatctgcatggaagtcttctcgcatacaaagagcttttcgaaaaatctggctcttttattcgtgaacattacacagaattttgtgatttggcgcttcgtttacgagagcatagagataactctatcagacgctgcatagtatttttactgcctacattgtctgaatataaccccaaaaaatttcaacagcgttatttagattcttttatggtttacttactttcccatatcaggaaagacaaggaaaagtctttagcttttgaagctattggaagaatagccatggcagtcaatgaagcaatgattccttatttacagaatattttaaaagtaataagggatacattgacagcaaaagtacgtgaaaaaacgcaatatgaaaagcctgtttttgaatgcattggcatgttggctgctgctgtaaagcttgaactccttgaagattctcgaagtctacttggtctgattttttcttgcgaactgagcgttcacttgcgtcaagctcttgtgaaaatggcagaaaacatccctcctcttttggctcctattcaagaacgattattgaatatggttagtcaaattttgactggaaaaaactttgaaattcgtactaatgacacatatactcccagtttcactaatatatactctgctagggaacctgaccaaagaagtaaaagcacggaatcaattattttggctttagaaactttgggtacttttaattttactggttattcattaattagtttcatccaagaatctgtcttatcttacttggaaaatgataattcagagatccgtattgctgctgcacgaacttgctgtcaggtttttgccagagatccgatatgtagaaaaacaaatcctttggctgttgaatcagtcgctgaggtgcttgaaaagctattaacccttggaattgcagatagtgatccaaaaattagggaaaccgtactctcattactagatgaaagatttgatcggcatttggcacatcctgataatattcgttgcttatttatcgctctgaatgatgaagttttttcaatcagagaaattgctatcattattataggaaggcttgcattgtataatccggcccatgtgatgccatcgctacgaaaaactattattcagttattatctgacatggaatattcgggtaatagtcgtcaaaaagaagaaagcgcacagcttctcaaattactggtatccaaagctagaacactcattaagccatatatccaatcgatcattcatgtaatattaccgaaagcagcagatacgagtcctggagtttcatctgccattatatcagctttaggtgaactcgcaagtgttgaaggagaagatatgcctgtggatgttcgtggttccttcatgaagttaatacttgtgaatttacaggatcaaagctctacattgaagcgacttgcttctcttaaatgtttacgaaaactttgtggtcgttcaggttatgtaattcagccatatttagattaccctcctttgttgggcgcgctaattggtattttgcaatcagaacaaccaacaccgataagaagagaagtactgagaacattaggtgtgttaggtgctttagatccatatacgtatttaactactgaggaagtttcagatgatttacaaagtagtcataataatgcccatggtgtacctcaaattagtgccgcgcagtacccgtcattggaaaactacgctatggttgctgttgtcactttgataggtattttaaaagacagttcgctctctatgcatcactcttctgttgttcaagcagtgatgcatatttgctctcaaatgggatctaaatctactgtatttttacctcaagtggtaccaacgtttctacaagtaatgcaatccttatcggcttcctcggctgagttttattttcagcagttaacgactttaacttctattattggaccaaacattagggattatgtatctgatatttttaatctttcaaaagtcttttgggaatctaccacatctctattgctagttattcttgaactcatcgatgccatagcaattgcactgcaggatgaatttaaattttacttgcctcaaatattatcttgtatgttgaaagcattttcccttgataatacgtcttcccgttccgtttcatacaaagttttacaatcatttgttatatttggttctaatattgaagaatacatgcatcttgttctaccagttataattagaagttttgagcgtgatactataccccttggattcaggaagagtgccctcaaatgcattgcccaattatttcaatctgttaatttctcggatcatgcctctcgaatcattcatccattggttcgcatgctagggaaatctaatggcgatttgagagcagttattatggatactctttgtgctatagtatcgcaacttgggtatgattattcgatttttataccgatggtgaataaagttttggttagtcacaagataagtcatccggcttacgaacttttggtttcacgacttttgaaaggtgagcctctacccaaagatgtcgtagtaaaggagtttaagccgaggccctcaacaaagcctttttctacacaagatgaagtcttgacaaagcttcctgttgatcaagcatccttgaaagcagcatgggaatcatcacaaaaattgacaagggatgattggcaggactggataagaagaataagtattgaacttctgaaggaatccccttcttcggcacttaggtcttgttcgaccttagctggtatataccatccattggctcgcgatttatttaatgtcagttttttgtcttgttgggatgagttaactgaaagcaataagaaaaatctcgttaaatcaatagagctcgctatgaatgcccctaacatttcagtagaaatattacagactctgttaaatcttgctgagtatatggagcgtgaagatcatacattaccaattcctatcaaagtaattagtgctcatgcatctaagtgtaatgtttatgccaaggctctgcattatacagaattacaattcgttcaagagacgaaagaggaagttagcattagcactatcgagtctctcattaccataaacaatcatctgcaacaatccgatgccgctgtaggtatgcttcaatataccaaagaacacaagcagtttagtttgaaagaaacttggtatgaaaaattacatagatgggatgatgcattagctgcatatgagcatcgagaacgtgaaggtgactcgtctttcgagataaatatcggaaaattacgctgttattatgctttgggtgactgggatcacctttccgaattggcacaaaaagcttgggtaacgtctgaacaagaacatcgtgaagctattgctccacttgcagctgccgctgcttggggtttgggtcaatggaatttaattagtgaatatgttagtgccatggaccgtgacccacaagataaagagtttttttccgctattagtgctgtacatcttggtcaatacaataaggcgtatggccatatcgagagacatcgtgatatattagtaaacgacctttcttccataatcggtgaaagctataatcgtgcatatggtattatggtcaaatcccaaatgctttcggaacttgaagaaattattgactataaaaagaatatgcaatatgaaaacaatttggactctcttaaaaaaacgtggcggaaaaggcttgaaggatgtcagaaaaatgtggatgtttggcataatacgcttcggtttagggctctggtattgtctccacaagattctcctgaaatgtggataaaattagctgatctttgccgtcgttctgaccggttgaagctttcaaatcagtgtctcacatatttgatgggtcgcgatccttcaaatgcttacccgcttgactcacttaagcttctcaatcctcatgttgtatatacgtatttaaaatatttgtgggctacagatcaaaaaaatattgcggtatcggagctcgaagagttcacctcatatctatcgtcaaaacatgggtataaaatgggtgattcttcaaagttggttgatattttagcctcatcatctgtaagttcggaagagcgttcgtttttagcaaggtgttttcataaacttggcaaatggaaaaagtctcttcaagatagtgttaatcaagaaagcgtaagggatattttgaattgttatttttatgctactttgttcgataaatcgtggtataaagcttggcactcttgggctctcgcaaatttcgaagtcgttggttattatgaacagactgaacatggggttacccaagatatgtatgaacaatatattgtacctgctattaaaggattttttcactcttctgttttaaatcaaaaaaactcacttcaggatatattgcggttacttaatttatggtttaaattcggtgagcacagcgacgtagcagccgcaattgttgaaggattttccaatgttccaatggatacatggttagaagttataccacaactaattgcacgaatacacacttcaagttcttcagttagagcatctgttcatcagttactttccgatattggtagggtgcatcctcaggcattggtgtattcacttactgtgtcctccaaatctacaaatccgcagcagaagcattcagcaaaatcaattatggatagcatgctttcgcatagtgatacgttggttcgtcaagctctacttgttagtcaagagctaattagagttgctatactttggcatgaattatggtatgaaggattagaggaagcttctcaagcttatttttcagatcacgatatatctttaatgattgatattgtgaaacccctgcatgaaacattggagaagggtccttccaccttgtctgagatatcatttgctcagacatttgggtatgatttacgtaaagctagaagttactggcagaaatttttgcaagatggtgaccctacggaattaaatcagtcttgggatttgtattatcaagtctttagacgtattcaaaagcaattaccacggattaagcatttggagctacaatatgtttcccctaagttattggatgcttgtgatttggaactagctgtgcctggaacctatggtcataacaaaccggtcattcggatctcgcatttccatcacactttcgaagttatttcttctaagcaaaggccaagaagattgacaattcatggtagtgatggcaaagattatcagtatgtccttaagggtcatgaagatttgaggcaagatgaacgagttatgcagctttttggtttatgtaatacgttactgactacggattctgagacattcaaacgacgtctgaatatagagcgttatacagttattccgctatctcccaattctggtttgctggggtgggttccgcatagtgatacattacatttcctgatcaaagagtttcgctcaaagcgtaacatattgttaaatttagagcatcgcatgatgcttcaaatggcacccgactgcgacagtttaacattattgcaaaaactagaagtattcgaatatgttatggctaatactgatggttatgatttgtatcatgtgttgtggcttaaaagtcgaagttcagaagcatggcttgataggagaaccagctatactcaaagcttggcagtcatgtcaatggttggatatatacttggacttggtgaccgacatccttccaatctaatgatggatcggtattctggtaagatcattcatattgactttggtgattgttttgaggttgccatgcatagagaaaaatttcctgagaaaataccgtttcgacttactcgaatgcttattaatgctatggaggttagcggtatccaaggtacttacaaaattacttgcgagcttgttatgcgtgttttaagatcaaatacggagtctttaatggcagttcttgaagcatttgtctatgaccctttgattaattggagacttatgactaaaagctctttcggggcttctacgacactccggcctacctcaagtagtgtagaagagaaaggaaggtcctacactcatcgtgcgcgtcacgctgattatgcagctcttagtgaaacaaatggtgtaaacgccgaaggactcaacgagagatctattcaagtcttgaagcgtgtctcaaataagctaactggtaaagatttcgatttgaaagagcaattgccagtcaaagcgcaagttgaaaagcttatccaacaagctacagctcccgaaaatctttgccgttgttatgtaggatggtgtagtttttggtaa

SEQ ID NO: 2575 - protein, 2335 aa, Schizosaccharomyces pombe
MEYFSDLKNKNESIQLAAADQLKEFVHSSTKELSGESLARFNNDINRRIFELIHSHDSHERFGGILAIGKLIEFESEGDVTNLSRYANYLRMTLPSTDWHSMELSAKVLGHLAASGGTLAAEFVEFEVQRAFEWLQGDRQEQKRMAAILIIKALAQNSPTLVYLYISEIFQNLWTGLRDPKPLIRETAADALGASLDVVCQREAKVQLQCFNEVLLQAEHGLRQSSVEYLHGSLLAYKELFEKSGSFIREHYTEFCDLALRLREHRDNSIRRCIVFLLPTLSEYNPKKFQQRYLDSFMVYLLSHIRKDKEKSLAFEAIGRIAMAVNEAMIPYLQNILKVIRDTLTAKVREKTQYEKPVFECIGMLAAAVKLELLEDSRSLLGLIFSCELSVHLRQALVKMAENIPPLLAPIQERLLNMVSQILTGKNFEIRTNDTYTPSFTNIYSAREPDQRSKSTESIILALETLGTFNFTGYSLISFIQESVLSYLENDNSEIRIAAARTCCQVFARDPICRKTNPLAVESVAEVLEKLLTLGIADSDPKIRETVLSLLDERFDRHLAHPDNIRCLFIALNDEVFSIREIAIIIIGRLALYNPAHVMPSLRKTIIQLLSDMEYSGNSRQKEESAQLLKLLVSKARTLIKPYIQSIIHVILPKAADTSPGVSSAIISALGELASVEGEDMPVDVRGSFMKLILVNLQDQSSTLKRLASLKCLRKLCGRSGYVIQPYLDYPPLLGALIGILQSEQPTPIRREVLRTLGVLGALDPYTYLTTEEVSDDLQSSHNNAHGVPQISAAQYPSLENYAMVAVVTLIGILKDSSLSMHHSSVVQAVMHICSQMGSKSTVFLPQVVPTFLQVMQSLSASSAEFYFQQLTTLTSIIGPNIRDYVSDIFNLSKVFWESTTSLLLVILELIDAIAIALQDEFKFYLPQILSCMLKAFSLDNTSSRSVSYKVLQSFVIFGSNIEEYMHLVLPVIIRSFERDTIPLGFRKSALKCIAQLFQSVNFSDHASRIIHPLVRMLGKSNGDLRAVIMDTLCAIVSQLGYDYSIFIPMVNKVLVSHKISHPAYELLVSRLLKGEPLPKDVVVKEFKPRPSTKPFSTQDEVLTKLPVDQASLKAAWESSQKLTRDDWQDWIRRISIELLKESPSSALRSCSTLAGIYHPLARDLFNVSFLSCWDELTESNKKNLVKSIELAMNAPNISVEILQTLLNLAEYMEREDHTLPIPIKVISAHASKCNVYAKALHYTELQFVQETKEEVSISTIESLITINNHLQQSDAAVGMLQYTKEHKQFSLKETWYEKLHRWDDALAAYEHREREGDSSFEINIGKLRCYYALGDWDHLSELAQKAWVTSEQEHREAIAPLAAAAAWGLGQWNLISEYVSAMDRDPQDKEFFSAISAVHLGQYNKAYGHIERHRDILVNDLSSIIGESYNRAYGIMVKSQMLSELEEIIDYKKNMQYENNLDSLKKTWRKRLEGCQKNVDVWHNTLRFRALVLSPQDSPEMWIKLADLCRRSDRLKLSNQCLTYLMGRDPSNAYPLDSLKLLNPHVVYTYLKYLWATDQKNIAVSELEEFTSYLSSKHGYKMGDSSKLVDILASSSVSSEERSFLARCFHKLGKWKKSLQDSVNQESVRDILNCYFYATLFDKSWYKAWHSWALANFEVVGYYEQTEHGVTQDMYEQYIVPAIKGFFHSSVLNQKNSLQDILRLLNLWFKFGEHSDVAAAIVEGFSNVPMDTWLEVIPQLIARIHTSSSSVRASVHQLLSDIGRVHPQALVYSLTVSSKSTNPQQKHSAKSIMDSMLSHSDTLVRQALLVSQELIRVAILWHELWYEGLEEASQAYFSDHDISLMIDIVKPLHETLEKGPSTLSEISFAQTFGYDLRKARSYWQKFLQDGDPTELNQSWDLYYQVFRRIQKQLPRIKHLELQYVSPKLLDACDLELAVPGTYGHNKPVIRISHFHHTFEVISSKQRPRRLTIHGSDGKDYQYVLKGHEDLRQDERVMQLFGLCNTLLTTDSETFKRRLNIERYTVIPLSPNSGLLGWVPHSDTLHFLIKEFRSKRNILLNLEHRMMLQMAPDCDSLTLLQKLEVFEYVMANTDGYDLYHVLWLKSRSSEAWLDRRTSYTQSLAVMSMVGYILGLGDRHPSNLMMDRYSGKIIHIDFGDCFEVAMHREKFPEKIPFRLTRMLINAMEVSGIQGTYKITCELVMRVLRSNTESLMAVLEAFVYDPLINWRLMTKSSFGASTTLRPTSSSVEEKGRSYTHRARHADYAALSETNGVNAEGLNERSIQVLKRVSNKLTGKDFDLKEQLPVKAQVEKLIQQATAPENLCRCYVGWCSFW

SEQ ID NO: 2576 - DNA, 7014 bp, Schizosaccharomyces pombe
  CDS (1)..(7014)
atgaaagaatttcctgggttgaaaagcaggaatgaagaaattcgcaataaagcggcaaatgatctttatgaatatgttatagcttattctcgagaattatcgggcgaagctttagttcagtttaacaatgatgttaacaagtacgtttatactttaattcacagtaccgatccactcgatcgtctggcaggcgtaactgccataaatcgtctaattgattatgaaggagaagatactacaaggattactagatttgcaaattatttgcgtattattcttccaggaactgaccaaaaagccaccgttcttgctgcaaaagctttagggagacttgcagttcctggaggtgctctaacttctgaatttgtgaacttcgaagttaaacgcgctttggaatggcttcaaggagaacgtaatgaaaatcgtagatatgcagcagtgcttatacttaaggagcttgccaaaaatacgtctacattaatctatgctcatatcgattcaatttttgagcttttatggcatggacttcgggatccaaaagttactattcgaatagcttcggctgatgcgttgagtgagttcttgaaaatcgttaggcaaagggattcatccatccgtctccaatggtatacaagtattctcaatgaagctcaacgtggtgttgcacagggttcttctgattacattcatggtagtttactagtatatcgccaattatttttaaaagctggaatgtttatgcatgagaggtatcgagaagtatcggacattatattgcaattcagagatcacaaagatttgcttattcgcaaaaccgttacagaattgattgctacactcgcagcttataatccagatgaatttgtttccaattatttacacgtttgtatgctccatctacttaatctattaaaaaaagaaaatgttaagatgttggcgtttgccactattggaaaagttgccgtggctattactaatagcataatcccatatcttgaccccatatgcgattcaatcaaggaaagtctaaaaatccatatccgtaataaaagtgcttcggatgctgcaatttttcaatgcattagcctactttctatagcactaggacaagccttttcaaactatgcgtatgacctctttgacttaatatttgcaagcggactttctgaggcttcttaccgtgctctctcagatctggcccataatatacctccattattaccagtcatacaggaacgactattagatatgctcagcaaaattctaagtggtcgtccttttattcctccaggatgtcctccccaatatgtagcaagatctttaaaatcttcaaagagtgcttccctgaagacaggattttttcccaatgacgtctatattttggctctaaaagttttgggaaattttgacttctccggttatattcttaatgaatttgtgaaggattgtgtagttgtataccttgaaaacaatgacccggaagtacgcaaaaccgcctccataacctgctcccaactatttgctcgtgatcctattttatcgcagactagtgatcatgcgattcaagtagttgccgaagtgctagaaaagcttctaacagttggtatttgcgatactgttccagatattcggctaactgttcttaattctctcgattctcgctttaacaagcatttagcccaagcagataaaattcgtttactttttattgctattaatgatgaaaactttgctgtacgagaatctgcattacggataattggaagactaaatgtctataaccctgcctatgtgatgccatatttaaggaaaataatgttaaaaactttaacaatattggactattctacaattatcagaactaaagaagagaatgccaagttattgtgtttattaattgcagcagctcctcgcttaatagagtcacatgtggaaccaatactgcaaatacttttacccaaagctaaagattctagttcaattgtggcagctagtattgttaattcgcttggtgaaatatgccaaatcagcggtgaggttattgttccttttattaaagacttaatgccgctaataattgaggctttgcaggaccaaagttctcctattaggagagcagcggctttaaaggctttgggtaatttatcaagcagcaccggatatgtaattgatccgtatattgaattcccttctttacttgatatacttattggcataacgaaaaccgaacaagatattactattcgtcgagagactattaaactaataggtacacttggtgctttagatcccaataggcatcgtgttttagaaaagggaacagaaaaagtagttccagaacagaaaaacattcctcctgacatttctttgctgatgtcgggcattggtccatcatccgatgaatattaccccacagtcgtgattactgctttgatgagtatattaaaagacccgtccttaactattcaccatactgctgttattcaagctgtaatgtatatattcaagaccatgggtctcagatgtgccccctttctttcccaaattattccagaatttatcgcagttatgagaacgtgtcctacgaacatattggagttttattttcagcaactaagtattttggtccttattgttcgtcagcacatacgaagttttttaccagatttatttaagcttatcaaagatttttggaacccgcattctaatttacaatttacaattttgtcgctaattgaatcactggctagagcaatgcagggagagttcaagccatacttaccatctttattagtaatgatgctacaaatatttgactctgatgtatcagtggactcagtcagtacaaaaaaggtattgcacgcattcatcgtcttcggtgatacattagctgattattttcatatgctcttggatccaatacttcgactgtatgagcgaaatgatgtttcaatcggtataaaagaaagtataatgattacaattggacgactttcaatggttattaatctctcggaatatgcatcaagaattatacatcctgttatgcgtatgctttcgtgcaacaatgcctctctcattcgcgtgagtatggatactgtatgtgcgcttatatatcaacttaatgttgattttgctattttcattccaatgattgataagtgccttaagatgaatggcgttactcatgaaacctactcgatacttgttgaacaatttttacaagaacagcctcttcctataaaactcaacccttatgaaaaatacgataagcctaaattagatgtggtagcttccgctgctgatataacctctaaaaagcttcctgtaaatcaagaaatcctcagaaatgcgtgggaagcatctcaacgatcgactaaggatgactggcaagaatggatccgacgattaggcgtagctctcttaagagaatcaccttcacatgccttacgagcatgtgctgctttggctgctgcctatcaacctttagccagggacttatttaacgctagttttgtttcttgttggtctgaattatatgatcactttcaagaagaattagttaagtcgattgagatagctttaacgtcgccacacatatctcctgaaattattcagattttactcaatcttgcggaatttatggagcatgatgataaaccacttccgattgatattcgtactttgggtgcctatgcagctaaatgccatgcgtttgctaaggctttacattacaaggagctagaattcattgaagaagaattggtgacaaaaccttcggttgatacaattgaggccctaatttcaatcaataatcaactccaacaaccagacgcagctattggaatacttaaacatgctcagcagcatgacaaaatgaatcttaaagaaacttggtacgaaaagttacaaaggtgggaagatgctctgtcagcttatgaaaaaagagaagctgctggcgctggcaatttcgaaataacgatgggcaaacttcgttgtttacacgctttgggtgaatgggatcgattatctcagttagctcaagaaaattggattcatgctggtcatgatgcgcgacggtatattgcaccgctttccgtagccgctgcttgggggttaggtcaatgggagcaaatggatgaatatatttctgttatgaagtctgagtcaccagataaagctttttttaacgcgattgtggctctacatcgatcacaatttgaagaagcagcttcttatatcaccagagctcgagatttacttgatactgagcttactgcgcttgttggtgaaagttataatagggcttacagcgttgctgtccgtgttcaaatgttatccgaattagaagaaatcattacctataaaaaagccgaggacaaacccgaagttcgtgaaatgataaagaagacatgggttagacgtttgaaaggctgtcagagaaatgtggatgtttggcaaagaatgttaagaatacgatctttagttatttcaccccgtgataacatggagatgtggatcaaattcgctaatctctgcagaaaatctggtaggatcagtctagcgaaaaaatcacttaatttactccttgaagacgacgaaaacttagataattcactcgtcttaaagaagactcacccttcaattgtctatgcaaatctaaagtttttgtgggctgttgacgataaaaggaaggctcttaatagcatgcaagagtttacttctcagctaatttctgacattaatgttgaccctgctctttttgttcaatctacatcagttaatactcaaaaatcacaagaagaaattcaatattattttcatcttctagctagatgttatcacaagcaaggtcaatggcagcaagaaattgagaataattggtcagaaggatcttttgatggagttcttcaatcatatatgtatgctacgcaatttgattctaaatggtataaagcttggcactcttgggcattagctaatttcgaagctgtaaagtttttggagcaatcagaggagcaaatcccaagtgctgcatatgagcagtatattattccagcagtcaaaggcttttttaagtcaattgctttaagcaaaggtaaccttcaggacaccttgcgccttcttaatctttggtttaaattcggcaataatagcaatgtaattaatactttgaacgttggtatatccactgtgaacatcgatatctggctggacgttatacctcagcttattgcgagaattcatgcctcctctttgagtgttcgtaaatctgtgcatcagttgctttccgatgtaggtcgcgcgcatccccaagctcttgtttatcctttaactgtagcagcaaaatcgcagagttctgctaggcaaaacgctgctttagcaattatggattccttgaaaacacatagtccacgtctagttgaacaagcaagacttgttagtcatgagcttatcagagctgcaatcctttggcatgaacaatggcatgaaggattggaagaggcttcacgattgtattttggtgatcataacattgagggtatgtttgccgtgttgagaccattgcatgaaatgttggaacgtggtccggaaacgcttcgtgaaatttctttccaacaagcctttggacgtgacttagtcgaagcaagggattgttgtatccgttttgagcaaactggtgatatatcagacttaaatcaggcctgggacttatattaccaagttttcaagaaaattcgtaaacagctacctcagttgacaacattagatttacaatacgtttctcctaaactcttacatgtacatgatcttgagttagctgttccgggaacatacgttagcgggaaacctgttataagaattgtaaagttttaccctacattcaacgtgataacatctaagcaacgtccgagacgactgagtattaaaggcagtgatggaaaagattatcaatatgttttaaagggtcacgaggacatcagacaagatgaacgtgttatgcagctatttgggctttgtaacaatctgttactagctgacccggaaacttttaagcgcttactttcaatccaaaggtatccagtgattcctttatcaccggattcaggccttttaggctgggttttggatagcgatactttgcatgtcttaattcgtgactacagagaaagcagaaagattttactcaacatagaacataggttgatcattcagatggctccagattacgatcgtctcactctccttcagaaagttgaagtctttgaatatgccctacttagtactacggggcaggatttataccgcgttttatggctgaagagtcgtagctcagaagcttggcttaataggcgaactaactattctcgtactcttgcggtgatgtcaatggtagggtacatcttaggtttgggcgatcgtcatccttccaatttgatgctggacaggtatacaggtaatatcatccatatcgattttggagattgttttgaagtagcaatgcatcgagaaaagtttcccgagaagattcctttccgccttacgcgaatgcttgttaacgcaatggaagttagtggtatagaggggacgttccggataacatgcgaacatgttatgcgagttcttcgtactaataaggagtctgtgatggcagttttagaagctttcgtttacgatcctcttattaactggcgccttgctcctgcatattcaccttctatcgatgaaaagcaatctaacgaacctaatacacttctcggtgagacaattgatggtttacaccggaaacgcttaaacgaagaaggaattacacttgaagaacgtcaaaaacccgagatactcaatcaaagagctataaccgttcttaatcgtgtgtccaataaacttactggtcgggatttcaaaccccaacagcaattggatgtaccaagtcaagtagagaagctgattttacaagcaacctctatagagaacctatgcttgtgctatattggctggtgtagtttctggtag

SEQ ID NO: 2577 - protein, 2337 aa, Schizosaccharomyces pombe
MKEFPGLKSRNEEIRNKAANDLYEYVIAYSRELSGEALVQFNNDVNKYVYTLIHSTDPLDRLAGVTAINRLIDYEGEDTTRITRFANYLRIILPGTDQKATVLAAKALGRLAVPGGALTSEFVNFEVKRALEWLQGERNENRRYAAVLILKELAKNTSTLIYAHIDSIFELLWHGLRDPKVTIRIASADALSEFLKIVRQRDSSIRLQWYTSILNEAQRGVAQGSSDYIHGSLLVYRQLFLKAGMFMHERYREVSDIILQFRDHKDLLIRKTVTELIATLAAYNPDEFVSNYLHVCMLHLLNLLKKENVKMLAFATIGKVAVAITNSIIPYLDPICDSIKESLKIHIRNKSASDAAIFQCISLLSIALGQAFSNYAYDLFDLIFASGLSEASYRALSDLAHNIPPLLPVIQERLLDMLSKILSGRPFIPPGCPPQYVARSLKSSKSASLKTGFFPNDVYILALKVLGNFDFSGYILNEFVKDCVVVYLENNDPEVRKTASITCSQLFARDPILSQTSDHAIQVVAEVLEKLLTVGICDTVPDIRLTVLNSLDSRFNKHLAQADKIRLLFIAINDENFAVRESALRIIGRLNVYNPAYVMPYLRKIMLKTLTILDYSTIIRTKEENAKLLCLLIAAAPRLIESHVEPILQILLPKAKDSSSIVAASIVNSLGEICQISGEVIVPFIKDLMPLIIEALQDQSSPIRRAAALKALGNLSSSTGYVIDPYIEFPSLLDILIGITKTEQDITIRRETIKLIGTLGALDPNRHRVLEKGTEKVVPEQKNIPPDISLLMSGIGPSSDEYYPTVVITALMSILKDPSLTIHHTAVIQAVMYIFKTMGLRCAPFLSQIIPEFIAVMRTCPTNILEFYFQQLSILVLIVRQHIRSFLPDLFKLIKDFWNPHSNLQFTILSLIESLARAMQGEFKPYLPSLLVMMLQIFDSDVSVDSVSTKKVLHAFIVFGDTLADYFHMLLDPILRLYERNDVSIGIKESIMITIGRLSMVINLSEYASRIIHPVMRMLSCNNASLIRVSMDTVCALIYQLNVDFAIFIPMIDKCLKMNGVTHETYSILVEQFLQEQPLPIKLNPYEKYDKPKLDVVASAADITSKKLPVNQEILRNAWEASQRSTKDDWQEWIRRLGVALLRESPSHALRACAALAAAYQPLARDLFNASFVSCWSELYDHFQEELVKSIEIALTSPHISPEIIQILLNLAEFMEHDDKPLPIDIRTLGAYAAKCHAFAKALHYKELEFIEEELVTKPSVDTIEALISINNQLQQPDAAIGILKHAQQHDKMNLKETWYEKLQRWEDALSAYEKREAAGAGNFEITMGKLRCLHALGEWDRLSQLAQENWIHAGHDARRYIAPLSVAAAWGLGQWEQMDEYISVMKSESPDKAFFNAIVALHRSQFEEAASYITRARDLLDTELTALVGESYNRAYSVAVRVQMLSELEEIITYKKAEDKPEVREMIKKTWVRRLKGCQRNVDVWQRMLRIRSLVISPRDNMEMWIKFANLCRKSGRISLAKKSLNLLLEDDENLDNSLVLKKTHPSIVYANLKFLWAVDDKRKALNSMQEFTSQLISDINVDPALFVQSTSVNTQKSQEEIQYYFHLLARCYHKQGQWQQEIENNWSEGSFDGVLQSYMYATQFDSKWYKAWHSWALANFEAVKFLEQSEEQIPSAAYEQYIIPAVKGFFKSIALSKGNLQDTLRLLNLWFKFGNNSNVINTLNVGISTVNIDIWLDVIPQLIARIHASSLSVRKSVHQLLSDVGRAHPQALVYPLTVAAKSQSSARQNAALAIMDSLKTHSPRLVEQARLVSHELIRAAILWHEQWHEGLEEASRLYFGDHNIEGMFAVLRPLHEMLERGPETLREISFQQAFGRDLVEARDCCIRFEQTGDISDLNQAWDLYYQVFKKIRKQLPQLTTLDLQYVSPKLLHVHDLELAVPGTYVSGKPVIRIVKFYPTFNVITSKQRPRRLSIKGSDGKDYQYVLKGHEDIRQDERVMQLFGLCNNLLLADPETFKRLLSIQRYPVIPLSPDSGLLGWVLDSDTLHVLIRDYRESRKILLNIEHRLIIQMAPDYDRLTLLQKVEVFEYALLSTTGQDLYRVLWLKSRSSEAWLNRRTNYSRTLAVMSMVGYILGLGDRHPSNLMLDRYTGNIIHIDFGDCFEVAMHREKFPEKIPFRLTRMLVNAMEVSGIEGTFRITCEHVMRVLRTNKESVMAVLEAFVYDPLINWRLAPAYSPSIDEKQSNEPNTLLGETIDGLHRKRLNEEGITLEERQKPEILNQRAITVLNRVSNKLTGRDFKPQQQLDVPSQVEKLILQATSIENLCLCYIGWCSFW

SEQ ID NO: 2578 - DNA, 7425 bp, Saccharomyces cerevisiae
  CDS (1)..(7425)
atgaataaatacattaacaaatacaccacgccacctaacttattgtctttacgacaaagggccgaaggcaaacacagaacaagaaagaaacttacacacaaatcgcactcccacgatgatgagatgtcaactacttcaaacacagattccaatcacaatgggcccaatgactctggtagagtgatcactggttctgctggtcatattggtaaaatatcctttgtagattcagaactagatacaacattttctactttaaatttgatttttgataaacttaaaagcgatgtgccacaagaacgagcctctggcgctaatgaattaagcactactttgacctcattagcaagggaagtatctgctgagcaatttcaaaggtttagcaacagtttaaacaataagatatttgaacttattcacgggtttacttcaagtgagaagataggtggtattcttgctgttgatactctgatctcattctacctgagtacagaggagctgccaaaccaaacttcaagactggcgaactatttacgtgttttaattccatccagtgacattgaagttatgagattagcggctaacaccttaggtagattgaccgtgccaggtggtacattaacatcagatttcgtcgaatttgaggtcagaacttgcattgattggcttactctgacagcagataataactcatcgagctctaagttggaatacaggagacatgctgcgctattaatcataaaggcattagcagacaattcaccctatcttttatacccttacgttaactctatcttagacaatatttgggtgccattaagggatgcaaagttaattatacgattagatgccgcagtggcattgggtaaatgtcttactattattcaggatagagaccctgctttgggaaaacagtggtttcaaagattatttcaaggttgtacacatggcttaagtctcaatacgaatgattcagtgcatgctactctgttggtatttcgagaattactcagcttgaaagcaccttatctcagggataaatatgatgatatttacaaatctactatgaagtacaaggaatataaatttgatgttataaggagagaagtttatgctattttacctcttttagctgcttttgaccctgccattttcacaaagaaatatctcgataggataatggttcattatttaagatatttgaagaacatcgatatgaatgctgcaaataattcggataaaccttttatattagtttctataggtgatattgcatttgaagttggttcgagcatttcaccctatatgacacttattctggataatattagggaaggcttaagaacgaaattcaaagttagaaaacaattcgagaaggatttattttattgcattggtaaattagcttgtgctttgggcccagcttttgctaagcacttgaacaaagatcttcttaatttgatgttaaactgtccaatgtccgaccatatgcaggagactttaatgatccttaacgagaaaataccctctttggaatctaccgttaattcgaggatactaaatttactgtcgatatccttatctggtgaaaaatttattcaatcaaaccaatacgattttaataatcaattttccattgaaaaggctcgtaaatcaagaaaccaaagtttcatgaaaaaaactggtgaatctaatgacgatattacagatgcccaaattttgattcagtgttttaaaatgctgcaactaattcatcatcaatattccttgacggagtttgttaggcttataaccatttcttacattgagcatgaggattcgtctgtcagaaaattggcagcattaacgtcgtgtgatttatttatcaaagacgatatatgtaaacaaacatcagttcatgctttacactcggtttctgaagtgctaagtaagctattaatgatcgcaataactgatccggttgcagaaattagattggaaattcttcagcatttggggtcaaattttgatcctcaattggcccaaccagacaatttacgcctacttttcatggcgctgaacgatgagatttttggtattcaattggaagctatcaaaataataggcagattgagttctgtcaaccccgcttatgtagttccttctttgaggaaaactttactggaactattaacgcaattgaagttctcaaatatgccaaaaaaaaaggaggaaagtgcaactctattatgtacgctgataaattccagcgatgaagtagcgaaaccttatattgatcctattctagacgtcattcttcctaaatgccaggatgcttcatctgccgtagcatccaccgctttaaaggttttgggtgaactatctgttgttggaggaaaagaaatgacgcgttacttaaaggaattgatgccattgatcattaacacatttcaggaccaatcaaactcttttaaaagagatgccgccttaacaacattaggacagctggctgcttcctctggttatgttgttggccctttactagactacccagagttacttggcattttgataaatattcttaagactgaaaacaaccctcatatcaggcgtggaactgttcgtttgattggtatattaggcgctcttgatccatataagcacagagaaatagaagtcacatcaaactcaaagagttcagtagagcaaaatgctccttcaatcgacatcgcattgctaatgcaaggggtatctccatccaacgatgaatattaccccactgtagttatccacaatctgatgaagatattgaatgatccatcgttgtcaatccatcacacggctgctattcaagctattatgcatatttttcaaaaccttggtttacgatgtgtctcctttttggatcaaattattccaggtatcattttagtcatgcgttcatgcccgccgtcccaacttgacttttattttcagcaactgggatctctcatctcaattgtcaagcaacatattaggccccatgtcgagaaaatttatggtgtgatcagggagtttttcccgatcattaaactacaaatcacaattatttctgtcatagaatcgatatctaaggctctggaaggtgagtttaaaagatttgttcccgagactctaacctttttccttgatattcttgagaacgaccagtctaataaaaggatcgttccgattcgtatattaaaatctttggttacttttgggccgaatctagaagactattcccatttgattatgcctatcgttgttagaatgactgagtattctgctggaagtctaaagaaaatctccattataactttgggtagattagcaaagaatatcaacctctctgaaatgtcatcaagaattgttcaggcgttggtaagaattttgaataatggggatagagaactaacaaaagcaaccatgaatacgctaagtttgctccttttacaactaggtaccgactttgtggtctttgtgccagtgattaacaaggcgttattgaggaataggattcagcattcagtgtacgatcaactggttaataaattactgaacaatgaatgcttgccaacaaatatcatatttgacaaggagaacgaagtacctgaaaggaaaaattatgaagacgaaatgcaagtaacgaaattaccggtaaaccaaaatatcctaaagaatgcatggtattgttctcaacagaagaccaaagaagattggcaagaatggataagaaggctatctattcagcttctaaaggaatcaccttcagcttgtctacgatcctgttcgagtttagtcagcgtttattatccgttggcgagagaattgtttaatgcttcattctcaagttgctgggttgagcttcaaacgtcataccaagaggatttgattcaagcattatgcaaggctttatcatcctctgaaaacccacccgagatttatcaaatgttgttaaatttagtggaatttatggagcacgatgacaaaccattgcctatcccaatccatacattaggtaagtatgcccaaaaatgtcatgcttttgcgaaggcactacattacaaagaggtagaattcttagaagagccgaaaaattcaacaatcgaggcattgattagcattaataatcaacttcaccaaactgattctgctattggtattttgaagcatgcgcaacaacacaatgaattgcagctgaaggaaacttggtatgaaaaacttcaacgttgggaggatgctcttgcagcatataatgagaaggaggcagcaggagaagattcggttgaagtgatgatgggaaaattaagatcgttatatgcccttggagagtgggaagagctttctaaattggcatctgaaaagtggggcacggcaaaacccgaagtgaagaaggcaatggcgcctttggctgccggcgctgcctggggtttggagcaatgggatgaaatagcccagtatactagcgtcatgaaatcgcagtctccagataaagaattctatgatgcaattttatgtttgcataggaataattttaagaaggcggaagttcacatctttaatgcaagggatcttctagttactgaattgtcagctcttgttaatgaaagctacaatagagcatataatgttgttgttagagcgcagattatagcagagttggaggaaatcatcaaatataagaagttgccacaaaattcagataaacgtctaactatgagagaaacttggaataccagattactgggctgtcaaaaaaatattgatgtgtggcaaagaattctgcgtgtcagatcattggtgataaagccaaaggaggatgctcaagtgaggattaagtttgccaacttatgcagaaaatcgggtaggatggcgctagctaaaaaagtcttaaatacattgcttgaagaaacagatgacccagatcatcctaatactgctaaggcatcccctccagttgtttatgcacaactgaagtacttgtgggctacggggttgcaagatgaggctttgaagcaattaattaatttcacatctagaatggctcatgatttaggtttggatccaaataatatgatagctcaaagcgttcctcaacaaagcaaaagagtccctcgtcacgttgaagattatactaagcttttagctcgttgtttcttgaagcaaggagaatggagagtttgcttacagcctaaatggagattgagcaatccagattcgatcctaggctcctatttgctcgctacacattttgacaacacatggtacaaagcgtggcataactgggcactggccaattttgaagtcatttctatgctaacatctgtctctaaaaagaaacaggaaggaagtgatgcttcctcggtaactgatattaatgagtttgataatggcatgatcggcgtcaatacatttgatgctaaggaagttcattactcttctaatttaatacacaggcacgtaattccagcaattaagggtttttttcattccatttctttatcagaatcaagctctcttcaagatgcattaaggttattaactttatggtttacttttggtggtattccagaagcaacccaagctatgcacgagggtttcaacctaatccaaataggcacatggttagaagtgttgccacagttaatttctagaattcatcaacccaatcaaattgttagtaggtcattactctccctattatctgatctaggtaaggctcatccgcaggcattagtgtaccccttaatggttgcgattaaatccgaatctctctcacgacagaaagcagctttgtccatcatagaaaagatgagaatacatagtccagttttggtcgaccaggctgaacttgtcagccacgaattgatacgtatggcggtgctttggcatgagcaatggtatgagggtctggatgacgccagtaggcagttttttggagaacataataccgaaaaaatgtttgctgctttagagcctctgtacgaaatgctgaagagaggaccggaaactttgagggaaatatcgttccaaaattcttttggtagggacttgaatgacgcttacgaatggctgatgaattacaaaaaatctaaagatgttagtaatttaaaccaagcgtgggacatttactataatgttttcaggaaaattggtaaacagttgccacaattacaaactcttgaactacaacatgtgtcgccaaaactactatctgcgcatgatttggaattggctgtccccgggacccgtgcaagtggtggaaaaccaattgttaaaatatctaaattcgagccagtattttcagtaatctcatccaaacaaagaccgagaaagttttgtatcaagggtagtgatggtaaagattataagtatgtgttgaaaggacatgaagacattagacaggatagcttggtcatgcaattattcggactagttaacacgcttttgcaaaatgacgctgagtgctttagaaggcatctagatatccagcaatatccagcaatcccattatctccgaagtctgggttactgggttgggtaccgaatagtgacacgttccatgtattaattagggagcatagagaagccaaaaaaattcctttaaacattgagcattgggtcatgttacaaatggcacctgattatgacaatttaacgttgttgcagaaagtagaagtcttcacttacgccctaaataatacggagggacaagatctttataaggtgttatggctgaagagtaggtcatcggaaacgtggttggagcgtagaactacttacactcgatcgctagccgtgatgtccatgaccggttatatattggggttaggtgaccgccaccctagtaatttgatgttggatagaatcactgggaaagtcattcatattgattttggtgattgtttcgaggctgctatattaagagaaaaattccccgaaaaagtaccttttagattaactagaatgttaacatatgcaatggaagtgagtggaattgaaggtagcttccgtattacttgtgagaatgttatgaaggtacttagagataacaagggttcattaatggcaatccttgaagcttttgctttcgatcctttgatcaattggggttttgacttaccaacaaagaaaattgaggaagaaacgggcattcaacttcccgtgatgaatgccaatgagctattgagtaatggggctattaccgaagaagaagttcaaagggtggaaaacgagcacaagaatgccattcgaaatgcaagggccatgttggtattgaagcgcattactgacaaattaacggggaacgatataagaaggtttaatgacttggacgttccagaacaagtggataaactaatccaacaagccacatcagtggaaaacctatgccaacattatatcggttggtgtccattctggtag

SEQ ID NO: 2579 - protein, 2474 aa, Saccharomyces cerevisiae
MNKYINKYTTPPNLLSLRQRAEGKHRTRKKLTHKSHSHDDEMSTTSNTDSNHNGPNDSGRVITGSAGHIGKISFVDSELDTTFSTLNLIFDKLKSDVPQERASGANELSTTLTSLAREVSAEQFQRFSNSLNNKIFELIHGFTSSEKIGGILAVDTLISFYLSTEELPNQTSRLANYLRVLIPSSDIEVMRLAANTLGRLTVPGGTLTSDFVEFEVRTCIDWLTLTADNNSSSSKLEYRRHAALLIIKALADNSPYLLYPYVNSILDNIWVPLRDAKLIIRLDAAVALGKCLTIIQDRDPALGKQWFQRLFQGCTHGLSLNTNDSVHATLLVFRELLSLKAPYLRDKYDDIYKSTMKYKEYKFDVIRREVYAILPLLAAFDPAIFTKKYLDRIMVHYLRYLKNIDMNAANNSDKPFILVSIGDIAFEVGSSISPYMTLILDNIREGLRTKFKVRKQFEKDLFYCIGKLACALGPAFAKHLNKDLLNLMLNCPMSDHMQETLMILNEKIPSLESTVNSRILNLLSISLSGEKFIQSNQYDFNNQFSIEKARKSRNQSFMKKTGESNDDITDAQILIQCFKMLQLIHHQYSLTEFVRLITISYIEHEDSSVRKLAALTSCDLFIKDDICKQTSVHALHSVSEVLSKLLMIAITDPVAEIRLEILQHLGSNFDPQLAQPDNLRLLFMALNDEIFGIQLEAIKIIGRLSSVNPAYVVPSLRKTLLELLTQLKFSNMPKKKEESATLLCTLINSSDEVAKPYIDPILDVILPKCQDASSAVASTALKVLGELSVVGGKEMTRYLKELMPLIINTFQDQSNSFKRDAALTTLGQLAASSGYVVGPLLDYPELLGILINILKTENNPHIRRGTVRLIGILGALDPYKHREIEVTSNSKSSVEQNAPSIDIALLMQGVSPSNDEYYPTVVIHNLMKILNDPSLSIHHTAAIQAIMHIFQNLGLRCVSFLDQIIPGIILVMRSCPPSQLDFYFQQLGSLISIVKQHIRPHVEKIYGVIREFFPIIKLQITIISVIESISKALEGEFKRFVPETLTFFLDILENDQSNKRIVPIRILKSLVTFGPNLEDYSHLIMPIVVRMTEYSAGSLKKISIITLGRLAKNINLSEMSSRIVQALVRILNNGDRELTKATMNTLSLLLLQLGTDFVVFVPVINKALLRNRIQHSVYDQLVNKLLNNECLPTNIIFDKENEVPERKNYEDEMQVTKLPVNQNILKNAWYCSQQKTKEDWQEWIRRLSIQLLKESPSACLRSCSSLVSVYYPLARELFNASFSSCWVELQTSYQEDLIQALCKALSSSENPPEIYQMLLNLVEFMEHDDKPLPIPIHTLGKYAQKCHAFAKALHYKEVEFLEEPKNSTIEALISINNQLHQTDSAIGILKHAQQHNELQLKETWYEKLQRWEDALAAYNEKEAAGEDSVEVMMGKLRSLYALGEWEELSKLASEKWGTAKPEVKKAMAPLAAGAAWGLEQWDEIAQYTSVMKSQSPDKEFYDAILCLHRNNFKKAEVHIFNARDLLVTELSALVNESYNRAYNVVVRAQIIAELEEIIKYKKLPQNSDKRLTMRETWNTRLLGCQKNIDVWQRILRVRSLVIKPKEDAQVRIKFANLCRKSGRMALAKKVLNTLLEETDDPDHPNTAKASPPVVYAQLKYLWATGLQDEALKQLINFTSRMAHDLGLDPNNMIAQSVPQQSKRVPRHVEDYTKLLARCFLKQGEWRVCLQPKWRLSNPDSILGSYLLATHFDNTWYKAWHNWALANFEVISMLTSVSKKKQEGSDASSVTDINEFDNGMIGVNTFDAKEVHYSSNLIHRHVIPAIKGFFHSISLSESSSLQDALRLLTLWFTFGGIPEATQAMHEGFNLIQIGTWLEVLPQLISRIHQPNQIVSRSLLSLLSDLGKAHPQALVYPLMVAIKSESLSRQKAALSIIEKMRIHSPVLVDQAELVSHELIRMAVLWHEQWYEGLDDASRQFFGEHNTEKMFAALEPLYEMLKRGPETLREISFQNSFGRDLNDAYEWLMNYKKSKDVSNLNQAWDIYYNVFRKIGKQLPQLQTLELQHVSPKLLSAHDLELAVPGTRASGGKPIVKISKFEPVFSVISSKQRPRKFCIKGSDGKDYKYVLKGHEDIRQDSLVMQLFGLVNTLLQNDAECFRRHLDIQQYPAIPLSPKSGLLGWVPNSDTFHVLIREHREAKKIPLNIEHWVMLQMAPDYDNLTLLQKVEVFTYALNNTEGQDLYKVLWLKSRSSETWLERRTTYTRSLAVMSMTGYILGLGDRHPSNLMLDRITGKVIHIDFGDCFEAAILREKFPEKVPFRLTRMLTYAMEVSGIEGSFRITCENVMKVLRDNKGSLMAILEAFAFDPLINWGFDLPTKKIEEETGIQLPVMNANELLSNGAITEEEVQRVENEHKNAIRNARAMLVLKRITDKLTGNDIRRFNDLDVPEQVDKLIQQATSVENLCQHYIGWCPFW

SEQ ID NO: 2580 - DNA, 23 bp, Artificial sequence
  primer
atggaaccgcatgaggagcagat

SEQ ID NO: 2581 - DNA, 23 bp, Artificial sequence
  primer
tcaccagaatgggcaccatccaa

SEQ ID NO: 2582 - protein, 3039 aa, Artificial sequence
  consensus sequence
  Variant (2)..(15): Xaa in position 2 to 15 is any amino acid
  Variant (16)..(17): Xaa in position 16 to 17 is any or no amino acid
  Variant (19)..(33): Xaa in position 19 to 33 is any amino acid
  Variant (34)..(51): Xaa in position 34 to 51 is any or no amino acid
  Variant (53)..(58): Xaa in position 53 to 58 is any amino acid
  Variant (59)..(59): Xaa in position 59 is any or no amino acid
  Variant (61)..(73): Xaa in position 61 to 73 is any amino acid
  Variant (74)..(74): Xaa in position 74 is any or no amino acid
  Variant (76)..(78): Xaa in position 76 to 78 is any amino acid
  Variant (80)..(82): Xaa in position 80 to 82 is any amino acid
  Variant (85)..(95): Xaa in position 85 to 95 is any amino acid
  Variant (96)..(108): Xaa in position 96 to 108 is any or no amino acid
  Variant (110)..(113): Xaa in position 110 to 113 is any amino acid
  Variant (115)..(120): Xaa in position 115 to 120 is any amino acid
  Variant (121)..(122): Xaa in position 121 to 122 is any or no amino acid
  Variant (124)..(129): Xaa in position 124 to 129 is any amino acid
  Variant (131)..(133): Xaa in position 131 to 133 is any amino acid
  Variant (136)..(136): Xaa in position 136 is any amino acid
  Variant (138)..(141): Xaa in position 138 to 141 is any amino acid
  Variant (143)..(158): Xaa in position 143 to 158 is any amino acid
  Variant (159)..(159): Xaa in position 159 is any or no amino acid
  Variant (162)..(166): Xaa in position 162 to 166 is any amino acid
  Variant (167)..(175): Xaa in position 167 to 175 is any or no amino acid
  Variant (177)..(178): Xaa in position 177 to 178 is any amino acid
  Variant (180)..(180): Xaa in position 180 is any amino acid
  Variant (183)..(183): Xaa in position 183 is any amino acid
  Variant (185)..(189): Xaa in position 185 to 189 is any amino acid
  Variant (191)..(207): Xaa in position 191 to 207 is any amino acid
  Variant (210)..(211): Xaa in position 210 to 211 is any amino acid
  Variant (215)..(219): Xaa in position 215 to 219 is any amino acid
  Variant (221)..(222): Xaa in position 221 to 222 is any amino acid
  Variant (224)..(227): Xaa in position 224 to 227 is any amino acid
  Variant (228)..(236): Xaa in position 228 to 236 is any or no amino acid
  Variant (238)..(240): Xaa in position 238 to 240 is any amino acid
  Variant (241)..(247): Xaa in position 241 to 247 is any or no amino acid
  Variant (249)..(267): Xaa in position 249 to 267 is any amino acid
  Variant (268)..(311): Xaa in position 268 to 311 is any or no amino acid
  Variant (315)..(315): Xaa in position 315 is any amino acid
  Variant (318)..(320): Xaa in position 318 to 320 is any amino acid
  Variant (323)..(351): Xaa in position 323 to 351 is any amino acid
  Variant (352)..(434): Xaa in position 352 to 434 is any or no amino acid
  Variant (436)..(442): Xaa in position 436 to 442 is any amino acid
  Variant (444)..(445): Xaa in position 444 to 445 is any amino acid
  Variant (447)..(452): Xaa in position 447 to 452 is any amino acid
  Variant (454)..(457): Xaa in position 454 to 457 is any amino acid
  Variant (459)..(468): Xaa in position 459 to 468 is any amino acid
  Variant (470)..(482): Xaa in position 470 to 482 is any amino acid
  Variant (483)..(491): Xaa in position 483 to 491 is any or no amino acid
  Variant (493)..(494): Xaa in position 493 to 494 is any amino acid
  Variant (496)..(516): Xaa in position 496 to 516 is any amino acid
  Variant (517)..(520): Xaa in position 517 to 520 is any or no amino acid
  Variant (522)..(532): Xaa in position 522 to 532 is any amino acid
  Variant (533)..(587): Xaa in position 533 to 587 is any or no amino acid
  Variant (589)..(589): Xaa in position 589 is any amino acid
  Variant (591)..(593): Xaa in position 591 to 593 is any amino acid
  Variant (595)..(596): Xaa in position 595 to 596 is any amino acid
  Variant (598)..(609): Xaa in position 598 to 609 is any amino acid
  Variant (610)..(610): Xaa in position 610 is any or no amino acid
  Variant (612)..(618): Xaa in position 612 to 618 is any amino acid
  Variant (619)..(619): Xaa in position 619 is any or no amino acid
  Variant (622)..(627): Xaa in position 622 to 627 is any amino acid
  Variant (629)..(635): Xaa in position 629 to 635 is any amino acid
  Variant (637)..(641): Xaa in position 637 to 641 is any amino acid
  Variant (643)..(645): Xaa in position 643 to 645 is any amino acid
  Variant (648)..(650): Xaa in position 648 to 650 is any amino acid
  Variant (652)..(653): Xaa in position 652 to 653 is any amino acid
  Variant (655)..(686): Xaa in position 655 to 686 is any amino acid
  Variant (687)..(720): Xaa in position 687 to 720 is any or no amino acid
  Variant (723)..(724): Xaa in position 723 to 724 is any amino acid
  Variant (726)..(727): Xaa in position 726 to 727 is any amino acid
  Variant (729)..(729): Xaa in position 729 is any amino acid
  Variant (731)..(731): Xaa in position 731 is any amino acid
  Variant (732)..(734): Xaa in position 732 to 734 is any or no amino acid
  Variant (736)..(737): Xaa in position 736 to 737 is any amino acid
  Variant (739)..(746): Xaa in position 739 to 746 is any amino acid
  Variant (747)..(754): Xaa in position 747 to 754 is any or no amino acid
  Variant (756)..(757): Xaa in position 756 to 757 is any amino acid
  Variant (759)..(780): Xaa in position 759 to 780 is any amino acid
  Variant (781)..(794): Xaa in position 781 to 794 is any or no amino acid
  Variant (796)..(797): Xaa in position 796 to 797 is any amino acid
  Variant (799)..(800): Xaa in position 799 to 800 is any amino acid
  Variant (804)..(808): Xaa in position 804 to 808 is any amino acid
  Variant (810)..(814): Xaa in position 810 to 814 is any amino acid
  Variant (816)..(818): Xaa in position 816 to 818 is any amino acid
  Variant (820)..(821): Xaa in position 820 to 821 is any amino acid
  Variant (823)..(825): Xaa in position 823 to 825 is any amino acid
  Variant (826)..(827): Xaa in position 826 to 827 is any or no amino acid
  Variant (830)..(831): Xaa in position 830 to 831 is any amino acid
  Variant (834)..(840): Xaa in position 834 to 840 is any amino acid
  Variant (843)..(845): Xaa in position 843 to 845 is any amino acid
  Variant (849)..(852): Xaa in position 849 to 852 is any amino acid
  Variant (854)..(855): Xaa in position 854 to 855 is any amino acid
  Variant (858)..(860): Xaa in position 858 to 860 is any amino acid
  Variant (864)..(866): Xaa in position 864 to 866 is any amino acid
  Variant (872)..(872): Xaa in position 872 is any amino acid
  Variant (874)..(874): Xaa in position 874 is any amino acid
  Variant (877)..(882): Xaa in position 877 to 882 is any amino acid
  Variant (885)..(885): Xaa in position 885 is any amino acid
  Variant (887)..(894): Xaa in position 887 to 894 is any amino acid
  Variant (895)..(895): Xaa in position 895 is any or no amino acid
  Variant (898)..(899): Xaa in position 898 to 899 is any amino acid
  Variant (901)..(901): Xaa in position 901 is any amino acid
  Variant (904)..(912): Xaa in position 904 to 912 is any amino acid
  Variant (914)..(916): Xaa in position 914 to 916 is any amino acid
  Variant (918)..(919): Xaa in position 918 to 919 is any amino acid
  Variant (921)..(924): Xaa in position 921 to 924 is any amino acid
  Variant (926)..(935): Xaa in position 926 to 935 is any amino acid
  Variant (936)..(940): Xaa in position 936 to 940 is any or no amino acid
  Variant (942)..(942): Xaa in position 942 is any amino acid
  Variant (943)..(945): Xaa in position 943 to 945 is any or no amino acid
  Variant (947)..(949): Xaa in position 947 to 949 is any amino acid
  Variant (951)..(951): Xaa in position 951 is any amino acid
  Variant (954)..(954): Xaa in position 954 is any amino acid
  Variant (956)..(956): Xaa in position 956 is any amino acid
  Variant (957)..(958): Xaa in position 957 to 958 is any or no amino acid
  Variant (960)..(968): Xaa in position 960 to 968 is any amino acid
  Variant (969)..(969): Xaa in position 969 is any or no amino acid
  Variant (971)..(979): Xaa in position 971 to 979 is any amino acid
  Variant (981)..(984): Xaa in position 981 to 984 is any amino acid
  Variant (985)..(988): Xaa in position 985 to 988 is any or no amino acid
  Variant (991)..(992): Xaa in position 991 to 992 is any amino acid
  Variant (994)..(996): Xaa in position 994 to 996 is any amino acid
  Variant (1000)..(1004): Xaa in position 1000 to 1004 is any amino acid
  Variant (1006)..(1006): Xaa in position 1006 is any amino acid
  Variant (1008)..(1009): Xaa in position 1008 to 1009 is any amino acid
  Variant (1011)..(1013): Xaa in position 1011 to 1013 is any amino acid
  Variant (1016)..(1016): Xaa in position 1016 is any amino acid
  Variant (1019)..(1020): Xaa in position 1019 to 1020 is any amino acid
  Variant (1022)..(1026): Xaa in position 1022 to 1026 is any amino acid
  Variant (1027)..(1027): Xaa in position 1027 is any or no amino acid
  Variant (1029)..(1033): Xaa in position 1029 to 1033 is any amino acid
  Variant (1034)..(1034): Xaa in position 1034 is any or no amino acid
  Variant (1036)..(1036): Xaa in position 1036 is any amino acid
  Variant (1038)..(1042): Xaa in position 1038 to 1042 is any amino acid
  Variant (1044)..(1044): Xaa in position 1044 is any amino acid
  Variant (1051)..(1085): Xaa in position 1051 to 1085 is any amino acid
  Variant (1086)..(1130): Xaa in position 1086 to 1130 is any or no amino acid
  Variant (1133)..(1134): Xaa in position 1133 to 1134 is any amino acid
  Variant (1136)..(1136): Xaa in position 1136 is any amino acid
  Variant (1138)..(1139): Xaa in position 1138 to 1139 is any amino acid
  Variant (1141)..(1142): Xaa in position 1141 to 1142 is any amino acid
  Variant (1143)..(1143): Xaa in position 1143 is any or no amino acid
  Variant (1146)..(1146): Xaa in position 1146 is any amino acid
  Variant (1148)..(1148): Xaa in position 1148 is any amino acid
  Variant (1149)..(1149): Xaa in position 1149 is any or no amino acid
  Variant (1151)..(1153): Xaa in position 1151 to 1153 is any amino acid
  Variant (1155)..(1156): Xaa in position 1155 to 1156 is any amino acid
  Variant (1158)..(1159): Xaa in position 1158 to 1159 is any amino acid
  Variant (1161)..(1163): Xaa in position 1161 to 1163 is any amino acid
  Variant (1166)..(1166): Xaa in position 1166 is any amino acid
  Variant (1167)..(1168): Xaa in position 1167 to 1168 is any or no amino acid
  Variant (1170)..(1171): Xaa in position 1170 to 1171 is any amino acid
  Variant (1174)..(1175): Xaa in position 1174 to 1175 is any amino acid
  Variant (1177)..(1178): Xaa in position 1177 to 1178 is any amino acid
  Variant (1179)..(1180): Xaa in position 1179 to 1180 is any or no amino acid
  Variant (1182)..(1187): Xaa in position 1182 to 1187 is any amino acid
  Variant (1189)..(1195): Xaa in position 1189 to 1195 is any amino acid
  Variant (1196)..(1196): Xaa in position 1196 is any or no amino acid
  Variant (1198)..(1202): Xaa in position 1198 to 1202 is any amino acid
  Variant (1204)..(1205): Xaa in position 1204 to 1205 is any amino acid
  Variant (1207)..(1208): Xaa in position 1207 to 1208 is any amino acid
  Variant (1211)..(1211): Xaa in position 1211 is any amino acid
  Variant (1216)..(1218): Xaa in position 1216 to 1218 is any amino acid
  Variant (1219)..(1262): Xaa in position 1219 to 1262 is any or no amino acid
  Variant (1264)..(1264): Xaa in position 1264 is any amino acid
  Variant (1266)..(1270): Xaa in position 1266 to 1270 is any amino acid
  Variant (1272)..(1273): Xaa in position 1272 to 1273 is any amino acid
  Variant (1276)..(1277): Xaa in position 1276 to 1277 is any amino acid
  Variant (1279)..(1286): Xaa in position 1279 to 1286 is any amino acid
  Variant (1288)..(1289): Xaa in position 1288 to 1289 is any amino acid
  Variant (1291)..(1304): Xaa in position 1291 to 1304 is any amino acid
  Variant (1305)..(1310): Xaa in position 1305 to 1310 is any or no amino acid
  Variant (1312)..(1316): Xaa in position 1312 to 1316 is any amino acid
  Variant (1319)..(1323): Xaa in position 1319 to 1323 is any amino acid
  Variant (1325)..(1325): Xaa in position 1325 is any amino acid
  Variant (1328)..(1329): Xaa in position 1328 to 1329 is any amino acid
  Variant (1331)..(1332): Xaa in position 1331 to 1332 is any amino acid
  Variant (1334)..(1346): Xaa in position 1334 to 1346 is any amino acid
  Variant (1347)..(1350): Xaa in position 1347 to 1350 is any or no amino acid
  Variant (1352)..(1353): Xaa in position 1352 to 1353 is any amino acid
  Variant (1355)..(1357): Xaa in position 1355 to 1357 is any amino acid
  Variant (1359)..(1366): Xaa in position 1359 to 1366 is any amino acid
  Variant (1367)..(1368): Xaa in position 1367 to 1368 is any or no amino acid
  Variant (1370)..(1374): Xaa in position 1370 to 1374 is any amino acid
  Variant (1376)..(1376): Xaa in position 1376 is any amino acid
  Variant (1378)..(1378): Xaa in position 1378 is any amino acid
  Variant (1380)..(1383): Xaa in position 1380 to 1383 is any amino acid
  Variant (1384)..(1394): Xaa in position 1384 to 1394 is any or no amino acid
  Variant (1396)..(1402): Xaa in position 1396 to 1402 is any amino acid
  Variant (1404)..(1405): Xaa in position 1404 to 1405 is any amino acid
  Variant (1407)..(1407): Xaa in position 1407 is any amino acid
  Variant (1408)..(1409): Xaa in position 1408 to 1409 is any or no amino acid
  Variant (1412)..(1416): Xaa in position 1412 to 1416 is any amino acid
  Variant (1418)..(1437): Xaa in position 1418 to 1437 is any amino acid
  Variant (1439)..(1447): Xaa in position 1439 to 1447 is any amino acid
  Variant (1449)..(1473): Xaa in position 1449 to 1473 is any amino acid
  Variant (1474)..(1512): Xaa in position 1474 to 1512 is any or no amino acid
  Variant (1514)..(1517): Xaa in position 1514 to 1517 is any amino acid
  Variant (1519)..(1520): Xaa in position 1519 to 1520 is any amino acid
  Variant (1522)..(1531): Xaa in position 1522 to 1531 is any amino acid
  Variant (1532)..(1534): Xaa in position 1532 to 1534 is any or no amino acid
  Variant (1537)..(1537): Xaa in position 1537 is any amino acid
  Variant (1540)..(1540): Xaa in position 1540 is any amino acid
  Variant (1542)..(1543): Xaa in position 1542 to 1543 is any amino acid
  Variant (1545)..(1546): Xaa in position 1545 to 1546 is any amino acid
  Variant (1549)..(1549): Xaa in position 1549 is any amino acid
  Variant (1554)..(1554): Xaa in position 1554 is any amino acid
  Variant (1558)..(1558): Xaa in position 1558 is any amino acid
  Variant (1560)..(1561): Xaa in position 1560 to 1561 is any amino acid
  Variant (1564)..(1572): Xaa in position 1564 to 1572 is any amino acid
  Variant (1576)..(1577): Xaa in position 1576 to 1577 is any amino acid
  Variant (1579)..(1579): Xaa in position 1579 is any amino acid
  Variant (1583)..(1584): Xaa in position 1583 to 1584 is any amino acid
  Variant (1586)..(1592): Xaa in position 1586 to 1592 is any amino acid
  Variant (1594)..(1599): Xaa in position 1594 to 1599 is any amino acid
  Variant (1601)..(1606): Xaa in position 1601 to 1606 is any amino acid
  Variant (1608)..(1608): Xaa in position 1608 is any amino acid
  Variant (1610)..(1614): Xaa in position 1610 to 1614 is any amino acid
  Variant (1618)..(1618): Xaa in position 1618 is any amino acid
  Variant (1624)..(1625): Xaa in position 1624 to 1625 is any amino acid
  Variant (1627)..(1627): Xaa in position 1627 is any amino acid
  Variant (1628)..(1628): Xaa in position 1628 is any or no amino acid
  Variant (1632)..(1635): Xaa in position 1632 to 1635 is any amino acid
  Variant (1638)..(1639): Xaa in position 1638 to 1639 is any amino acid
  Variant (1641)..(1642): Xaa in position 1641 to 1642 is any amino acid
  Variant (1644)..(1644): Xaa in position 1644 is any amino acid
  Variant (1646)..(1646): Xaa in position 1646 is any amino acid
  Variant (1655)..(1655): Xaa in position 1655 is any amino acid
  Variant (1658)..(1665): Xaa in position 1658 to 1665 is any amino acid
  Variant (1666)..(1673): Xaa in position 1666 to 1673 is any or no amino acid
  Variant (1675)..(1675): Xaa in position 1675 is any amino acid
  Variant (1678)..(1678): Xaa in position 1678 is any amino acid
  Variant (1682)..(1682): Xaa in position 1682 is any amino acid
  Variant (1684)..(1684): Xaa in position 1684 is any amino acid
  Variant (1686)..(1687): Xaa in position 1686 to 1687 is any amino acid
  Variant (1690)..(1690): Xaa in position 1690 is any amino acid
  Variant (1692)..(1692): Xaa in position 1692 is any amino acid
  Variant (1694)..(1706): Xaa in position 1694 to 1706 is any amino acid
  Variant (1707)..(1713): Xaa in position 1707 to 1713 is any or no amino acid
  Variant (1715)..(1715): Xaa in position 1715 is any amino acid
  Variant (1719)..(1719): Xaa in position 1719 is any amino acid
  Variant (1722)..(1723): Xaa in position 1722 to 1723 is any amino acid
  Variant (1726)..(1727): Xaa in position 1726 to 1727 is any amino acid
  Variant (1729)..(1740): Xaa in position 1729 to 1740 is any amino acid
  Variant (1741)..(1747): Xaa in position 1741 to 1747 is any or no amino acid
  Variant (1749)..(1750): Xaa in position 1749 to 1750 is any amino acid
  Variant (1752)..(1759): Xaa in position 1752 to 1759 is any amino acid
  Variant (1762)..(1762): Xaa in position 1762 is any amino acid
  Variant (1766)..(1766): Xaa in position 1766 is any amino acid
  Variant (1768)..(1769): Xaa in position 1768 to 1769 is any amino acid
  Variant (1771)..(1777): Xaa in position 1771 to 1777 is any amino acid
  Variant (1779)..(1792): Xaa in position 1779 to 1792 is any amino acid
  Variant (1793)..(1833): Xaa in position 1793 to 1833 is any or no amino acid
  Variant (1836)..(1836): Xaa in position 1836 is any amino acid
  Variant (1840)..(1843): Xaa in position 1840 to 1843 is any amino acid
  Variant (1845)..(1846): Xaa in position 1845 to 1846 is any amino acid
  Variant (1848)..(1849): Xaa in position 1848 to 1849 is any amino acid
  Variant (1851)..(1862): Xaa in position 1851 to 1862 is any amino acid
  Variant (1863)..(1879): Xaa in position 1863 to 1879 is any or no amino acid
  Variant (1881)..(1882): Xaa in position 1881 to 1882 is any amino acid
  Variant (1884)..(1884): Xaa in position 1884 is any amino acid
  Variant (1886)..(1887): Xaa in position 1886 to 1887 is any amino acid
  Variant (1889)..(1894): Xaa in position 1889 to 1894 is any amino acid
  Variant (1896)..(1901): Xaa in position 1896 to 1901 is any amino acid
  Variant (1904)..(1905): Xaa in position 1904 to 1905 is any amino acid
  Variant (1907)..(1907): Xaa in position 1907 is any amino acid
  Variant (1911)..(1911): Xaa in position 1911 is any amino acid
  Variant (1913)..(1915): Xaa in position 1913 to 1915 is any amino acid
  Variant (1919)..(1919): Xaa in position 1919 is any amino acid
  Variant (1923)..(1925): Xaa in position 1923 to 1925 is any amino acid
  Variant (1927)..(1928): Xaa in position 1927 to 1928 is any amino acid
  Variant (1930)..(1930): Xaa in position 1930 is any amino acid
  Variant (1932)..(1932): Xaa in position 1932 is any amino acid
  Variant (1937)..(1937): Xaa in position 1937 is any amino acid
  Variant (1939)..(1939): Xaa in position 1939 is any amino acid
  Variant (1942)..(1953): Xaa in position 1942 to 1953 is any amino acid
  Variant (1954)..(1964): Xaa in position 1954 to 1964 is any or no amino acid
  Variant (1966)..(1967): Xaa in position 1966 to 1967 is any amino acid
  Variant (1970)..(1970): Xaa in position 1970 is any amino acid
  Variant (1972)..(1972): Xaa in position 1972 is any amino acid
  Variant (1974)..(1975): Xaa in position 1974 to 1975 is any amino acid
  Variant (1977)..(1978): Xaa in position 1977 to 1978 is any amino acid
  Variant (1981)..(1982): Xaa in position 1981 to 1982 is any amino acid
  Variant (1984)..(1984): Xaa in position 1984 is any amino acid
  Variant (1987)..(1987): Xaa in position 1987 is any amino acid
  Variant (1990)..(1991): Xaa in position 1990 to 1991 is any amino acid
  Variant (1993)..(1998): Xaa in position 1993 to 1998 is any amino acid
  Variant (2000)..(2000): Xaa in position 2000 is any amino acid
  Variant (2004)..(2004): Xaa in position 2004 is any amino acid
  Variant (2010)..(2010): Xaa in position 2010 is any amino acid
  Variant (2012)..(2018): Xaa in position 2012 to 2018 is any amino acid
  Variant (2020)..(2020): Xaa in position 2020 is any amino acid
  Variant (2021)..(2027): Xaa in position 2021 to 2027 is any or no amino acid
  Variant (2030)..(2041): Xaa in position 2030 to 2041 is any amino acid
  Variant (2042)..(2051): Xaa in position 2042 to 2051 is any or no amino acid
  Variant (2053)..(2053): Xaa in position 2053 is any amino acid
  Variant (2055)..(2056): Xaa in position 2055 to 2056 is any amino acid
  Variant (2058)..(2058): Xaa in position 2058 is any amino acid
  Variant (2061)..(2062): Xaa in position 2061 to 2062 is any amino acid
  Variant (2064)..(2074): Xaa in position 2064 to 2074 is any amino acid
  Variant (2075)..(2085): Xaa in position 2075 to 2085 is any or no amino acid
  Variant (2087)..(2091): Xaa in position 2087 to 2091 is any amino acid
  Variant (2092)..(2146): Xaa in position 2092 to 2146 is any or no amino acid
  Variant (2150)..(2155): Xaa in position 2150 to 2155 is any amino acid
  Variant (2157)..(2157): Xaa in position 2157 is any amino acid
  Variant (2159)..(2161): Xaa in position 2159 to 2161 is any amino acid
  Variant (2163)..(2173): Xaa in position 2163 to 2173 is any amino acid
  Variant (2174)..(2176): Xaa in position 2174 to 2176 is any or no amino acid
  Variant (2178)..(2179): Xaa in position 2178 to 2179 is any amino acid
  Variant (2181)..(2182): Xaa in position 2181 to 2182 is any amino acid
  Variant (2185)..(2189): Xaa in position 2185 to 2189 is any amino acid
  Variant (2193)..(2193): Xaa in position 2193 is any amino acid
  Variant (2197)..(2197): Xaa in position 2197 is any amino acid
  Variant (2201)..(2201): Xaa in position 2201 is any amino acid
  Variant (2206)..(2221): Xaa in position 2206 to 2221 is any amino acid
  Variant (2222)..(2267): Xaa in position 2222 to 2267 is any or no amino acid
  Variant (2269)..(2270): Xaa in position 2269 to 2270 is any amino acid
  Variant (2274)..(2274): Xaa in position 2274 is any amino acid
  Variant (2277)..(2277): Xaa in position 2277 is any amino acid
  Variant (2279)..(2282): Xaa in position 2279 to 2282 is any amino acid
  Variant (2283)..(2287): Xaa in position 2283 to 2287 is any or no amino acid
  Variant (2292)..(2292): Xaa in position 2292 is any amino acid
  Variant (2301)..(2302): Xaa in position 2301 to 2302 is any amino acid
  Variant (2304)..(2307): Xaa in position 2304 to 2307 is any amino acid
  Variant (2309)..(2310): Xaa in position 2309 to 2310 is any amino acid
  Variant (2312)..(2314): Xaa in position 2312 to 2314 is any amino acid
  Variant (2316)..(2323): Xaa in position 2316 to 2323 is any amino acid
  Variant (2326)..(2326): Xaa in position 2326 is any amino acid
  Variant (2328)..(2328): Xaa in position 2328 is any amino acid
  Variant (2331)..(2331): Xaa in position 2331 is any amino acid
  Variant (2333)..(2333): Xaa in position 2333 is any amino acid
  Variant (2336)..(2340): Xaa in position 2336 to 2340 is any amino acid
  Variant (2341)..(2341): Xaa in position 2341 is any or no amino acid
  Variant (2343)..(2348): Xaa in position 2343 to 2348 is any amino acid
  Variant (2351)..(2353): Xaa in position 2351 to 2353 is any amino acid
  Variant (2355)..(2356): Xaa in position 2355 to 2356 is any amino acid
  Variant (2359)..(2382): Xaa in position 2359 to 2382 is any amino acid
  Variant (2386)..(2386): Xaa in position 2386 is any amino acid
  Variant (2390)..(2390): Xaa in position 2390 is any amino acid
  Variant (2393)..(2393): Xaa in position 2393 is any amino acid
  Variant (2396)..(2399): Xaa in position 2396 to 2399 is any amino acid
  Variant (2400)..(2400): Xaa in position 2400 is any or no amino acid
  Variant (2402)..(2404): Xaa in position 2402 to 2404 is any amino acid
  Variant (2406)..(2414): Xaa in position 2406 to 2414 is any amino acid
  Variant (2417)..(2418): Xaa in position 2417 to 2418 is any amino acid
  Variant (2421)..(2421): Xaa in position 2421 is any amino acid
  Variant (2424)..(2425): Xaa in position 2424 to 2425 is any amino acid
  Variant (2428)..(2428): Xaa in position 2428 is any amino acid
  Variant (2433)..(2433): Xaa in position 2433 is any amino acid
  Variant (2435)..(2435): Xaa in position 2435 is any amino acid
  Variant (2440)..(2440): Xaa in position 2440 is any amino acid
  Variant (2442)..(2442): Xaa in position 2442 is any amino acid
  Variant (2447)..(2447): Xaa in position 2447 is any amino acid
  Variant (2451)..(2452): Xaa in position 2451 to 2452 is any amino acid
  Variant (2455)..(2456): Xaa in position 2455 to 2456 is any amino acid
  Variant (2458)..(2460): Xaa in position 2458 to 2460 is any amino acid
  Variant (2462)..(2464): Xaa in position 2462 to 2464 is any amino acid
  Variant (2466)..(2466): Xaa in position 2466 is any amino acid
  Variant (2470)..(2471): Xaa in position 2470 to 2471 is any amino acid
  Variant (2473)..(2474): Xaa in position 2473 to 2474 is any amino acid
  Variant (2476)..(2477): Xaa in position 2476 to 2477 is any amino acid
  Variant (2478)..(2481): Xaa in position 2478 to 2481 is any or no amino acid
  Variant (2483)..(2484): Xaa in position 2483 to 2484 is any amino acid
  Variant (2486)..(2487): Xaa in position 2486 to 2487 is any amino acid
  Variant (2489)..(2492): Xaa in position 2489 to 2492 is any amino acid
  Variant (2493)..(2501): Xaa in position 2493 to 2501 is any or no amino acid
  Variant (2503)..(2504): Xaa in position 2503 to 2504 is any amino acid
  Variant (2506)..(2507): Xaa in position 2506 to 2507 is any amino acid
  Variant (2509)..(2514): Xaa in position 2509 to 2514 is any amino acid
  Variant (2516)..(2523): Xaa in position 2516 to 2523 is any amino acid
  Variant (2525)..(2525): Xaa in position 2525 is any amino acid
  Variant (2530)..(2530): Xaa in position 2530 is any amino acid
  Variant (2533)..(2533): Xaa in position 2533 is any amino acid
  Variant (2536)..(2537): Xaa in position 2536 to 2537 is any amino acid
  Variant (2539)..(2540): Xaa in position 2539 to 2540 is any amino acid
  Variant (2544)..(2544): Xaa in position 2544 is any amino acid
  Variant (2546)..(2547): Xaa in position 2546 to 2547 is any amino acid
  Variant (2548)..(2549): Xaa in position 2548 to 2549 is any or no amino acid
  Variant (2551)..(2551): Xaa in position 2551 is any amino acid
  Variant (2553)..(2554): Xaa in position 2553 to 2554 is any amino acid
  Variant (2558)..(2558): Xaa in position 2558 is any amino acid
  Variant (2560)..(2564): Xaa in position 2560 to 2564 is any amino acid
  Variant (2566)..(2566): Xaa in position 2566 is any amino acid
  Variant (2572)..(2572): Xaa in position 2572 is any amino acid
  Variant (2574)..(2575): Xaa in position 2574 to 2575 is any amino acid
  Variant (2577)..(2581): Xaa in position 2577 to 2581 is any amino acid
  Variant (2582)..(2582): Xaa in position 2582 is any or no amino acid
  Variant (2584)..(2591): Xaa in position 2584 to 2591 is any amino acid
  Variant (2594)..(2594): Xaa in position 2594 is any amino acid
  Variant (2601)..(2605): Xaa in position 2601 to 2605 is any amino acid
  Variant (2608)..(2608): Xaa in position 2608 is any amino acid
  Variant (2610)..(2611): Xaa in position 2610 to 2611 is any amino acid
  Variant (2613)..(2615): Xaa in position 2613 to 2615 is any amino acid
  Variant (2622)..(2622): Xaa in position 2622 is any amino acid
  Variant (2626)..(2627): Xaa in position 2626 to 2627 is any amino acid
  Variant (2640)..(2641): Xaa in position 2640 to 2641 is any amino acid
  Variant (2643)..(2647): Xaa in position 2643 to 2647 is any amino acid
  Variant (2649)..(2649): Xaa in position 2649 is any amino acid
  Variant (2651)..(2651): Xaa in position 2651 is any amino acid
  Variant (2654)..(2654): Xaa in position 2654 is any amino acid
  Variant (2656)..(2657): Xaa in position 2656 to 2657 is any amino acid
  Variant (2662)..(2663): Xaa in position 2662 to 2663 is any amino acid
  Variant (2667)..(2667): Xaa in position 2667 is any amino acid
  Variant (2671)..(2673): Xaa in position 2671 to 2673 is any amino acid
  Variant (2676)..(2676): Xaa in position 2676 is any amino acid
  Variant (2678)..(2678): Xaa in position 2678 is any amino acid
  Variant (2681)..(2683): Xaa in position 2681 to 2683 is any amino acid
  Variant (2685)..(2687): Xaa in position 2685 to 2687 is any amino acid
  Variant (2690)..(2690): Xaa in position 2690 is any amino acid
  Variant (2693)..(2693): Xaa in position 2693 is any amino acid
  Variant (2696)..(2697): Xaa in position 2696 to 2697 is any amino acid
  Variant (2700)..(2700): Xaa in position 2700 is any amino acid
  Variant (2704)..(2704): Xaa in position 2704 is any amino acid
  Variant (2708)..(2708): Xaa in position 2708 is any amino acid
  Variant (2710)..(2710): Xaa in position 2710 is any amino acid
  Variant (2712)..(2713): Xaa in position 2712 to 2713 is any amino acid
  Variant (2719)..(2720): Xaa in position 2719 to 2720 is any amino acid
  Variant (2723)..(2724): Xaa in position 2723 to 2724 is any amino acid
  Variant (2726)..(2726): Xaa in position 2726 is any amino acid
  Variant (2728)..(2728): Xaa in position 2728 is any amino acid
  Variant (2731)..(2733): Xaa in position 2731 to 2733 is any amino acid
  Variant (2739)..(2740): Xaa in position 2739 to 2740 is any amino acid
  Variant (2743)..(2743): Xaa in position 2743 is any amino acid
  Variant (2746)..(2746): Xaa in position 2746 is any amino acid
  Variant (2750)..(2750): Xaa in position 2750 is any amino acid
  Variant (2756)..(2756): Xaa in position 2756 is any amino acid
  Variant (2780)..(2781): Xaa in position 2780 to 2781 is any amino acid
  Variant (2784)..(2785): Xaa in position 2784 to 2785 is any amino acid
  Variant (2795)..(2795): Xaa in position 2795 is any amino acid
  Variant (2797)..(2798): Xaa in position 2797 to 2798 is any amino acid
  Variant (2802)..(2802): Xaa in position 2802 is any amino acid
  Variant (2805)..(2806): Xaa in position 2805 to 2806 is any amino acid
  Variant (2815)..(2816): Xaa in position 2815 to 2816 is any amino acid
  Variant (2821)..(2821): Xaa in position 2821 is any amino acid
  Variant (2826)..(2827): Xaa in position 2826 to 2827 is any amino acid
  Variant (2829)..(2829): Xaa in position 2829 is any amino acid
  Variant (2833)..(2833): Xaa in position 2833 is any amino acid
  Variant (2836)..(2836): Xaa in position 2836 is any amino acid
  Variant (2840)..(2840): Xaa in position 2840 is any amino acid
  Variant (2843)..(2843): Xaa in position 2843 is any amino acid
  Variant (2845)..(2845): Xaa in position 2845 is any amino acid
  Variant (2848)..(2848): Xaa in position 2848 is any amino acid
  Variant (2853)..(2854): Xaa in position 2853 to 2854 is any amino acid
  Variant (2858)..(2859): Xaa in position 2858 to 2859 is any amino acid
  Variant (2861)..(2884): Xaa in position 2861 to 2884 is any amino acid
  Variant (2885)..(2957): Xaa in position 2885 to 2957 is any or no amino acid
  Variant (2959)..(2960): Xaa in position 2959 to 2960 is any amino acid
  Variant (2962)..(2963): Xaa in position 2962 to 2963 is any amino acid
  Variant (2965)..(2966): Xaa in position 2965 to 2966 is any amino acid
  Variant (2968)..(2970): Xaa in position 2968 to 2970 is any amino acid
  Variant (2975)..(2975): Xaa in position 2975 is any amino acid
  Variant (2978)..(2982): Xaa in position 2978 to 2982 is any amino acid
  Variant (2983)..(3008): Xaa in position 2983 to 3008 is any or no amino acid
  Variant (3010)..(3010): Xaa in position 3010 is any amino acid
  Variant (3012)..(3013): Xaa in position 3012 to 3013 is any amino acid
  Variant (3016)..(3017): Xaa in position 3016 to 3017 is any amino acid
  Variant (3020)..(3020): Xaa in position 3020 is any amino acid
  Variant (3024)..(3025): Xaa in position 3024 to 3025 is any amino acid
  Variant (3031)..(3033): Xaa in position 3031 to 3033 is any amino acid
  Variant (3037)..(3037): Xaa in position 3037 is any amino acid
LXXXXXXXXXXXXXXXXLXXXXXXXXXXXXXXXXXXXXXXXXXXXXXXXXXFXXXXXXXIXXXXXXXXXXXXXXGXXXAXXXLIXXXXXXXXXXXXXXXXXXXXXXXXRXXXXLXXXXXXXXDXXXXXXAXXXLGXLXXXXGXXXXXXXXXXXXXXXXXWLXXXXXXXXXXXXXXEXXRXAAXLXXXXXAXXXXXXXXXXXXXXXXXIWXXLRDXXXXXRXXAXXXXXXXXXXXXXRXXXXXXXXXXWXXXXXXXXXXXXXXXXXXXXXXXXXXXXXXXXXXXXXXXXXXXXXXXXXXXXXXXXXXXXXXXIHGXLLXXXELXXXXXXXXXXXXXXXXXXXXXXXXXXXXXXXXXXXXXXXXXXXXXXXXXXXXXXXXXXXXXXXXXXXXXXXXXXXXXXXXXXXXXXXXXXXXXXXXXXXXXXXXXXXXXXXXRXXXXXXXPXXAXXXXXXFXXXXLXXXXXXXXXXLXXXXXXXXXXXXXXXXXXXXXXGXXAXXXXXXXXXXXXXXXXXXXXXXXXXLXXXXXXXXXXXXXXXXXXXXXXXXXXXXXXXXXXXXXXXXXXXXXXXXXXXXXXXXXXXXXXXXXXFXCXXXLXXAXXXXXXXXXXXXXLXXXXXXXXLSXXXXXXLXXXXXXXPXXXXXIXXXLLXXXSXXLXXXXXXXXXXXXXXXXXXXXXXXXXXXXXXXXXXXXXXXXXXXXXXXXXXXXXXXXXXXXXXXXXXALXXLXXFXFXXXXLXXFXXXXXXXXXXXXXXXXRXXAXXXXXXXXXXXXXXXXXXXXXXXXXXXXXXXXXXXXVXXVXXKLLXXXXXDXXXXXRXXXLXXLXXXXXFDXXLAXXXXXXXLFXXXNDEXXXXRXXAIXXXGRLXXXNPAYVXPXLRXXXXXXLTXLXXXXXXXXXKEXXAXLLXXXXXXXXXLXXXYXXPXXXXLXXXXXXXXXXXXXXXVXXXXLXXXGXLAXVXXXGXXXXXXXXXXLXXXXXXXXXDXXXXXXXXKRXXAXXXLGQXXXXXGXVXXPXXXYPXLLXXLXXXXXXEXXXXXXRXEXXXXXGXLGALDPXXXXXXXXXXXXXXXXXXXXXXXXXXXXXXXXXXXXXXXXXXXXXXXXXXXXXXXXXXXXXXXXXXXXXXXXXXXXXXXXYYXXVXIXXLXXXILXDXXLXXXHXXVXXAXXXIFXXXGXXCVXXLXXXXPXXXXXXRXXXXXXXXEXXXXXLXXLXXIVXQHIRXXXXXXXXXXXXXXXXXXXXXXXXXXXXXXXXXXXXXXXXXXXXXXXLXEXXXXXLXXEFXXYXXXXXXXXLXXLXXXXXXXXXXXXXXXXXXXXLXXXXXFGXXXXXYXHLXXPXXVXXXXXXXXXXXXXXXXXAXXTXXXLXXXXXXXXXXSXXXXXLXRXLXXXXXXXXXXXXXXXLXXXXXXXLXXLXXXLGXXXXXFXXXXXXXXXXXXXXXXXXXXLXXXXXXXXXLXXXXXXXXXXXXXXXXXXXXXXXXXXXXXXXXXXXXXXXXXXXXXXXXXXXXXXXXXXXXXXXXVXXXXLXXAXXXXXXXXXXXXXDWXEWXRXXSXXLLXESPSXALRXCXXLAXXXXXXXXXLFNXXFXSCWXXLXXXXXXXLXXXXXXAXXXXXXPXEXXXXXLNLXEFMEHXXKXXLPIXXXXLGXXAXXCXAXAKALHYKEXEFXXXXXXXXXXXXXXXXEXLIXINNXLXQXXAAXGXLXXXXXXXXXXXXXXXXXXXXWXEKLXRWXXALXXYXXXXXXXXXXXXXXXXXXXGXXRXXXXXXXXCLXALGXWXXLXXXXXXXWXXXXXXXXXXXXXXXXXXXXXXXXXXXXXXXXXXXXXXXXXXXXXXXXXXXXXXXAAXAAWXXXXWXXMXXYXXXXXXXXXXXXXXXXXXXXXXXXXXXXXFXXAXLXXHXXXXXXAXXXXXXARXXLXTELXAXXXESYXRAYXXXVXXQXLXELEEXIXYKXXXXXXXXXXXXXXXXXXXXXXXWXXRLXGXQXXVXXWQXXLXVRXLVXXPXXXXXXWXKFAXLCRKSXRXXXXXXXLXXXXXXXXLLXXXXXXXXXXXXXXXXXXXXXXPXVXXAXLKXXWXXXXXXXXXXXXXXXXXXXXXXLXXXXXXXXXXXXXXXXXXXXXXXXXXXXXXXXXXXXXXXXXXXXXXXXXXXXXXXXXXXXLLAXXXXXXGXWXXXLXXXXXXXXXXXXXXLXXYXXATXXXXXWYKXAWHXWALXNFEVXXXXXXXXXXXXXXXXXXXXXXXXXXXXXXXXXXXXXXXXXXXXXXXXXXXXXXXXXXXXXXAXXGFFXSIXLXXXXXXXXXSLQDXLRLLTLWFXXGXXXXVXXAXXXGXXXXXXXXWLXVXPQXIXRIXXXXXXVXXXXXXLLXXXGXXHPXXXXXXXXXXXXXXXXXXXXXXXXQALXYPLXVAXKSXXXXXRXXXAXXXXXXXXXHSXXLVXQAXXVSXELIRXAXLWHEXWXEGLEXASRXXFGXXNXXXMXXXLXPLHXXLXXGXXXXXXTXXEXXFXXXXXXXXXXXXXGXXLXXAXXXXXXYXXXXXXXXLXQAWDXYYXVFXXIXXQLPXLXXXXLXLXXVSPXLXXXXXLXLAVPGXYXXGXXXXXXIXXXXXXXXVIXSKQRPRXXXXXGSXGXXYXXXLKGHEDXRQDXXVMQLFGLVNTLLXXDXXXXXRXLXIQXYXXIPLSXXSGLXGWVXXXDTXHXLIXXXRXXXKIXLNXEHXXMLXMAPXDYDXLXLXXKVEVFXXALXXTXGXDLXXXLWLKSXXSEXWLXRRTXYTRSLXVMSMVGYILGLGDRHPSNLMLDRXXGKXXHIDFGDCFEXAXXREKXPEXXPFRLTRMLXXAMEVXGIEGXXRXTCEXVMXVLRXNKXSXMAXLEAFXXDPLXXWXXXXXXXXXXXXXXXXXXXXXXXXXXXXXXXXXXXXXXXXXXXXXXXXXXXXXXXXXXXXXXXXXXXXXXXXXXXXXXXXXXXXXXXXXXXXXXXXXNXXAXXVXXRXXXKLTGXDFXXXXXXXXXXXXXXXXXXXXXXXXXXXXXXXLXVXXQVXXLIXQATXXENLCQXXXGWCXFW

SEQ ID NO: 2583 - protein, 59 aa, Artificial sequence
  protein pattern
  Variant (2)..(2): Xaa in position 2 is any amino acid
  Variant (7)..(7): Xaa in position 7 is Thr or Val
  Variant (10)..(10): Xaa in position 10 is Ile or Leu
  Variant (22)..(22): Xaa in position 22 is Leu or Met
  Variant (24)..(24): Xaa in position 24 is any amino acid
  Variant (26)..(26): Xaa in position 26 is any amino acid
  Variant (27)..(27): Xaa in position 27 is Asn, Ser or Thr
  Variant (29)..(29): Xaa in position 29 is any amino acid
  Variant (30)..(30): Xaa in position 30 is Ile or Val
  Variant (31)..(31): Xaa in position 31 is Ile, Leu or Val
  Variant (41)..(41): Xaa in position 41 is Ala, Ile or Val
  Variant (42)..(42): Xaa in position 42 is Ala or Ser
  Variant (43)..(43): Xaa in position 43 is Ile or Met
  Variant (44)..(44): Xaa in position 44 is any amino acid
  Variant (48)..(48): Xaa in position 48 is Phe or Tyr
  Variant (51)..(51): Xaa in position 51 is Lys or Arg
  Variant (52)..(52): Xaa in position 52 is Ile or Val
LXVMSMXGYXLGLGDRHPSNLXLXRXXGXXXHIDFGDCFEXXXXREKXPEXXPFRLTRM

SEQ ID NO: 2584 - protein, 60 aa, Artificial sequence
  protein pattern
  Variant (5)..(5): Xaa in position 5 is Ile or Leu
  Variant (9)..(9): Xaa in position 9 is Glu, Asn or Ser
  Variant (10)..(10): Xaa in position 10 is any amino acid
  Variant (18)..(18): Xaa in position 18 is Cys or Val
  Variant (23)..(24): Xaa in position 23 to 24 is any amino acid
  Variant (25)..(25): Xaa in position 25 is Asp, Glu, Asn or Ser
  Variant (26)..(26): Xaa in position 26 is any amino acid
  Variant (27)..(27): Xaa in position 27 is Asp, Glu or Lys
  Variant (28)..(28): Xaa in position 28 is Cys, Ser or Thr
  Variant (29)..(30): Xaa in position 29 to 30 is any amino acid
  Variant (31)..(31): Xaa in position 31 is Lys or Arg
  Variant (32)..(32): Xaa in position 32 is any amino acid
  Variant (34)..(34): Xaa in position 34 is Asp, Asn, Ser or Thr
  Variant (35)..(35): Xaa in position 35 is Ile or Val
  Variant (37)..(37): Xaa in position 37 is Gln or Arg
  Variant (38)..(38): Xaa in position 38 is Phe or Tyr
  Variant (39)..(39): Xaa in position 39 is Ala, Pro or Ser
  Variant (40)..(41): Xaa in position 40 to 41 is any amino acid
  Variant (45)..(45): Xaa in position 45 is Pro, Gln or Thr
  Variant (46)..(46): Xaa in position 46 is any amino acid
  Variant (47)..(47): Xaa in position 47 is Ala, Ser, Thr or Val
  Variant (49)..(50): Xaa in position 49 to 50 is Ile or Leu
  Variant (53)..(53): Xaa in position 53 is Leu or Val
  Variant (54)..(54): Xaa in position 54 is Pro, Ser or Thr
  Variant (55)..(55): Xaa in position 55 is any amino acid
  Variant (56)..(56): Xaa in position 56 is Cys or Ser
  Variant (59)..(59): Xaa in position 59 is Phe, Ile or Leu
GHEDXRQDXXVMQLFGLXNTLLXXXXXXXXXXLXXQXXXXXPLSXXXGXXGWXXXXDTXH

SEQ ID NO: 2585 - protein, 38 aa, Artificial sequence
  protein pattern
  Variant (2)..(3): Xaa in position 2 to 3 is any amino acid
  Variant (7)..(7): Xaa in position 7 is Asn, Ser or Thr
  Variant (8)..(8): Xaa in position 8 is Phe or Tyr
  Variant (10)..(10): Xaa in position 10 is any amino acid
  Variant (12)..(12): Xaa in position 12 is any amino acid
  Variant (14)..(14): Xaa in position 14 is any amino acid
  Variant (17)..(17): Xaa in position 17 is any amino acid
  Variant (19)..(19): Xaa in position 19 is Ile or Leu
  Variant (20)..(20): Xaa in position 20 is His or Arg
  Variant (21)..(22): Xaa in position 21 to 22 is any amino acid
  Variant (23)..(23): Xaa in position 23 is Lys or Arg
  Variant (24)..(24): Xaa in position 24 is Asp, Glu or Gly
  Variant (26)..(26): Xaa in position 26 is Leu or Val
  Variant (27)..(27): Xaa in position 27 is any amino acid
  Variant (29)..(29): Xaa in position 29 is Ile, Met or Val
  Variant (30)..(30): Xaa in position 30 is Leu or Met
  Variant (34)..(34): Xaa in position 34 is Ala, Ile or Val
  Variant (35)..(35): Xaa in position 35 is any amino acid
VXXIEGXXRXTXEXVMXVXXXXXXSXXAXXEAFXXDPL

SEQ ID NO: 2586 - protein, 41 aa, Artificial sequence
  protein pattern
  Variant (5)..(5): Xaa in position 5 is any amino acid
  Variant (7)..(7): Xaa in position 7 is Ile or Val
  Variant (12)..(12): Xaa in position 12 is any amino acid
  Variant (14)..(14): Xaa in position 14 is His or Tyr
  Variant (16)..(16): Xaa in position 16 is Ala or Gly
  Variant (19)..(19): Xaa in position 19 is Asp or Glu
  Variant (23)..(23): Xaa in position 23 is any amino acid
  Variant (24)..(24): Xaa in position 24 is Phe or Tyr
  Variant (26)..(26): Xaa in position 26 is Gly, Thr or Val
  Variant (27)..(27): Xaa in position 27 is Asp or Glu
  Variant (28)..(28): Xaa in position 28 is any amino acid
  Variant (30)..(30): Xaa in position 30 is any amino acid
  Variant (31)..(31): Xaa in position 31 is Asp, Glu, Lys or Arg
  Variant (32)..(32): Xaa in position 32 is any amino acid
  Variant (34)..(34): Xaa in position 34 is Phe or Leu
  Variant (35)..(36): Xaa in position 35 to 36 is any amino acid
  Variant (38)..(38): Xaa in position 38 is any amino acid
  Variant (40)..(40): Xaa in position 40 is Phe or Leu
ELIRXAXLWHEXWXEXLEXASRXXFXXXNXXXMXXXLXPXH

SEQ ID NO: 2587 - protein, 41 aa, Artificial sequence
  protein pattern
  Variant (2)..(3): Xaa in position 2 to 3 is any amino acid
  Variant (6)..(6): Xaa in position 6 is Glu, Gly, Gln or Thr
  Variant (7)..(7): Xaa in position 7 is any amino acid
  Variant (9)..(9): Xaa in position 9 is Leu or Met
  Variant (10)..(11): Xaa in position 10 to 11 is any amino acid
  Variant (13)..(13): Xaa in position 13 is any amino acid
  Variant (15)..(15): Xaa in position 15 is any amino acid
  Variant (18)..(18): Xaa in position 18 is any amino acid
  Variant (19)..(19): Xaa in position 19 is Lys or Arg
  Variant (20)..(20): Xaa in position 20 is Ile, Leu or Val
  Variant (26)..(26): Xaa in position 26 is any amino acid
  Variant (27)..(27): Xaa in position 27 is any or no amino acid
  Variant (29)..(29): Xaa in position 29 is any or no amino acid
  Variant (31)..(31): Xaa in position 31 is any amino acid
  Variant (33)..(33): Xaa in position 33 is Phe or Leu
  Variant (34)..(34): Xaa in position 34 is Asp, Glu or Asn
  Variant (37)..(37): Xaa in position 37 is any amino acid
  Variant (38)..(38): Xaa in position 38 is Ala, Asn, Gln or Thr
  Variant (40)..(40): Xaa in position 40 is any amino acid
KXXVFXXAXXXTXGXDLXXXLWLKSXXSXEXWXXRRXXYXR

SEQ ID NO: 2588 - protein, 51 aa, Artificial sequence
  protein pattern
  Variant (2)..(5): Xaa in position 2 to 5 is any or no amino acid
  Variant (7)..(7): Xaa in position 7 is His, Lys or Arg
  Variant (8)..(8): Xaa in position 8 is Asp or Glu
  Variant (10)..(10): Xaa in position 10 is any amino acid
  Variant (11)..(11): Xaa in position 11 is Asp or Glu
  Variant (13)..(18): Xaa in position 13 to 18 is any amino acid
  Variant (19)..(19): Xaa in position 19 is Phe or Tyr
  Variant (20)..(20): Xaa in position 20 is Glu, Lys or Arg
  Variant (21)..(27): Xaa in position 21 to 27 is any amino acid
  Variant (29)..(30): Xaa in position 29 to 30 is any amino acid
  Variant (34)..(34): Xaa in position 34 is Ile or Leu
  Variant (37)..(37): Xaa in position 37 is any amino acid
  Variant (40)..(40): Xaa in position 40 is any amino acid
  Variant (41)..(41): Xaa in position 41 is Lys or Arg
  Variant (43)..(43): Xaa in position 43 is any amino acid
  Variant (44)..(44): Xaa in position 44 is Lys or Arg
  Variant (45)..(45): Xaa in position 45 is any amino acid
  Variant (46)..(46): Xaa in position 46 is Ile or Leu
  Variant (47)..(47): Xaa in position 47 is any amino acid
  Variant (48)..(48): Xaa in position 48 is Ala, Gln or Ser
  Variant (49)..(50): Xaa in position 49 to 50 is any amino acid
  Variant (51)..(51): Xaa in position 51 is Asn, Ser or Thr
FXXXXGXXLXXAXXXXXXXXXXXXXXXLXXAWDXYYXVFXXIXXXXXXXXX

SEQ ID NO: 2589 - protein, 53 aa, Artificial sequence
  protein pattern
  Variant (2)..(8): Xaa in position 2 to 8 is any amino acid
  Variant (9)..(9): Xaa in position 9 is any or no amino acid
  Variant (11)..(11): Xaa in position 11 is Asp or Glu
  Variant (12)..(12): Xaa in position 12 is any amino acid
  Variant (15)..(15): Xaa in position 15 is any amino acid
  Variant (16)..(16): Xaa in position 16 is Ile, Leu, Met or Val
  Variant (17)..(17): Xaa in position 17 is Ile or Leu
  Variant (18)..(18): Xaa in position 18 is any amino acid
  Variant (19)..(19): Xaa in position 19 is Ile, Leu or Val
  Variant (20)..(20): Xaa in position 20 is His or Arg
  Variant (21)..(21): Xaa in position 21 is Ala, Glu, Ser or Thr
  Variant (22)..(22): Xaa in position 22 is Ile or Leu
  Variant (24)..(25): Xaa in position 24 to 25 is any amino acid
  Variant (27)..(27): Xaa in position 27 is any amino acid
  Variant (28)..(28): Xaa in position 28 is Asp, Glu, Asn or Gln
  Variant (29)..(29): Xaa in position 29 is Asp or Asn
  Variant (30)..(32): Xaa in position 30 to 32 is any amino acid
  Variant (34)..(34): Xaa in position 34 is any amino acid
  Variant (35)..(35): Xaa in position 35 is Glu or Lys
  Variant (36)..(36): Xaa in position 36 is Phe or Tyr
  Variant (37)..(37): Xaa in position 37 is Ala or Ser
  Variant (38)..(38): Xaa in position 38 is any amino acid
  Variant (41)..(42): Xaa in position 41 to 42 is any amino acid
  Variant (43)..(43): Xaa in position 43 is Asn or Ser
  Variant (44)..(44): Xaa in position 44 is Asp, Gly or Asn
  Variant (45)..(45): Xaa in position 45 is Asn, Arg or Ser
  Variant (46)..(46): Xaa in position 46 is Ile, Leu or Met
  Variant (47)..(48): Xaa in position 47 to 48 is any amino acid
  Variant (49)..(49): Xaa in position 49 is Ala, Cys or Ser
  Variant (50)..(51): Xaa in position 50 to 51 is any amino acid
  Variant (52)..(52): Xaa in position 52 is Ala, Ser or Thr
RXXXXXXXXVXXWQXXXXXXXXVXXPXXXXXXWXXXXXLCXXXXXXXXXXXXL

SEQ ID NO: 2590 - protein, 29 aa, Artificial sequence
  protein pattern
  Variant (2)..(3): Xaa in position 2 to 3 is any amino acid
  Variant (5)..(5): Xaa in position 5 is Ile or Val
  Variant (6)..(6): Xaa in position 6 is Asp, Glu, Asn or Gln
  Variant (7)..(7): Xaa in position 7 is any amino acid
  Variant (9)..(9): Xaa in position 9 is Ile, Leu or Val
  Variant (10)..(10): Xaa in position 10 is any amino acid
  Variant (11)..(11): Xaa in position 11 is Asp, Glu or Gln
  Variant (14)..(15): Xaa in position 14 to 15 is any amino acid
  Variant (17)..(17): Xaa in position 17 is Asn, Arg or Ser
  Variant (18)..(18): Xaa in position 18 is Ile or Leu
  Variant (20)..(21): Xaa in position 20 to 21 is any amino acid
  Variant (22)..(22): Xaa in position 22 is Phe, Trp or Tyr
  Variant (23)..(23): Xaa in position 23 is Ile, Leu or Val
  Variant (27)..(27): Xaa in position 27 is Pro or Ser
VXXQXXXLXXXATXXEXXCXXXXGWCXFW

SEQ ID NO: 2591 - protein, 30 aa, Artificial sequence
  protein pattern
  Variant (2)..(6): Xaa in position 2 to 6 is any amino acid
  Variant (7)..(7): Xaa in position 7 is any or no amino acid
  Variant (9)..(9): Xaa in position 9 is any or no amino acid
  Variant (11)..(12): Xaa in position 11 to 12 is any amino acid
  Variant (14)..(14): Xaa in position 14 is any amino acid
  Variant (15)..(15): Xaa in position 15 is Glu, His, Lys or Arg
  Variant (16)..(16): Xaa in position 16 is any amino acid
  Variant (17)..(17): Xaa in position 17 is His or Arg
  Variant (18)..(18): Xaa in position 18 is Ala, Ser or Val
  Variant (19)..(19): Xaa in position 19 is Phe or Tyr
  Variant (26)..(26): Xaa in position 26 is any amino acid
  Variant (28)..(28): Xaa in position 28 is any amino acid
  Variant (29)..(29): Xaa in position 29 is Glu or Lys
  Variant (30)..(30): Xaa in position 30 is Phe or Tyr
LXXXXXXLXGXXAXXXXXXAKALHYXEXXX

SEQ ID NO: 2592 - protein, 40 aa, Artificial sequence
  protein pattern
  Variant (2)..(2): Xaa in position 2 is any or no amino acid
  Variant (4)..(5): Xaa in position 4 to 5 is any amino acid
  Variant (7)..(7): Xaa in position 7 is Ala, Asp or Val
  Variant (8)..(8): Xaa in position 8 is Asn, Pro, Ser or Thr
  Variant (10)..(10): Xaa in position 10 is Ile, Leu or Met
  Variant (11)..(11): Xaa in position 11 is Ala, Ser or Thr
  Variant (12)..(12): Xaa in position 12 is Ala or Thr
  Variant (13)..(13): Xaa in position 13 is Leu or Met
  Variant (14)..(15): Xaa in position 14 to 15 is any amino acid
  Variant (16)..(16): Xaa in position 16 is Asp or Glu
  Variant (19)..(19): Xaa in position 19 is Asp, Glu, Gly, Asn, Gln or Thr
  Variant (23)..(23): Xaa in position 23 is Asp, Gly, Asn, Gln or Ser
  Variant (24)..(25): Xaa in position 24 to 25 is any amino acid
  Variant (27)..(28): Xaa in position 27 to 28 is any amino acid
  Variant (30)..(30): Xaa in position 30 is any amino acid
  Variant (31)..(31): Xaa in position 31 is Ile, Leu or Val
  Variant (32)..(32): Xaa in position 32 is Ala, Ser or Thr
  Variant (34)..(34): Xaa in position 34 is Phe or Leu
  Variant (37)..(37): Xaa in position 37 is Ala, Ile, Leu or Val
  Variant (38)..(38): Xaa in position 38 is Ile, Leu or Met
  Variant (39)..(39): Xaa in position 39 is any amino acid
  Variant (40)..(40): Xaa in position 40 is Phe or Tyr
AXRXXLXXEXXXXXXXSYXRAYXXXVXXQXXXEXEEXXXX

SEQ ID NO: 2593 - protein, 20 aa, Artificial sequence
  protein pattern
  Variant (2)..(2): Xaa in position 2 is Asn, Ser or Thr
  Variant (9)..(9): Xaa in position 9 is Lys or Arg
  Variant (10)..(10): Xaa in position 10 is Phe, Ile or Leu
  Variant (11)..(13): Xaa in position 11 to 13 is any amino acid
  Variant (15)..(15): Xaa in position 15 is Gly, Asn or Ser
  Variant (16)..(16): Xaa in position 16 is Asp or Asn
  Variant (18)..(19): Xaa in position 18 to 19 is any amino acid
IXSKQRPRXXXXXGXXGXXY

SEQ ID NO: 2594 - protein, 59 aa, Artificial sequence
  protein pattern
  Variant (3)..(4): Xaa in position 3 to 4 is any amino acid
  Variant (7)..(7): Xaa in position 7 is any amino acid
  Variant (8)..(8): Xaa in position 8 is Ala, Pro or Ser
  Variant (9)..(10): Xaa in position 9 to 10 is any amino acid
  Variant (11)..(11): Xaa in position 11 is Ile, Leu, Met or Val
  Variant (12)..(13): Xaa in position 12 to 13 is any amino acid
  Variant (14)..(14): Xaa in position 14 is Ile, Leu or Val
  Variant (15)..(15): Xaa in position 15 is Phe or Leu
  Variant (16)..(16): Xaa in position 16 is any amino acid
  Variant (17)..(17): Xaa in position 17 is Ala, Ser or Thr
  Variant (18)..(18): Xaa in position 18 is Ile, Leu, Met or Val
  Variant (19)..(19): Xaa in position 19 is any amino acid
  Variant (22)..(28): Xaa in position 22 to 28 is any amino acid
  Variant (29)..(29): Xaa in position 29 is Ala or Thr
  Variant (30)..(30): Xaa in position 30 is Ile, Leu, Met or Val
  Variant (31)..(33): Xaa in position 31 to 33 is any amino acid
  Variant (37)..(37): Xaa in position 37 is Ala, Ser or Val
  Variant (38)..(39): Xaa in position 38 to 39 is any amino acid
  Variant (43)..(43): Xaa in position 43 is His or Tyr
  Variant (45)..(45): Xaa in position 45 is Phe, Ile, Leu, Met or Val
  Variant (47)..(47): Xaa in position 47 is any amino acid
  Variant (48)..(48): Xaa in position 48 is Ile or Leu
  Variant (50)..(51): Xaa in position 50 to 51 is any amino acid
  Variant (52)..(52): Xaa in position 52 is Ile, Leu or Met
  Variant (53)..(53): Xaa in position 53 is Ile, Leu or Val
  Variant (54)..(54): Xaa in position 54 is Glu, Asn, Gln or Ser
  Variant (55)..(55): Xaa in position 55 is Phe, Ile, Leu or Met
  Variant (56)..(56): Xaa in position 56 is Ile, Leu or Val
  Variant (57)..(57): Xaa in position 57 is Ser or Thr
  Variant (58)..(58): Xaa in position 58 is any amino acid
  Variant (59)..(59): Xaa in position 59 is Leu or Met
FDXXLAXXXXXXXXXXXXXDEXXXXXXXXXXXXGRLXXXNPAXVXPXXRXXXXXXXXXX

SEQ ID NO: 2595 - DNA, 1707 bp, Saccharomyces cerevisiae
  CDS (1)..(1707)
atgtttctggactattctggatatgaggctcttactgaaatcaactcttcctttggaaagtatgttcttctattgcaacaatttgaaggctgtcgaagtttgaaagatcggcttcaaatgcttaaggatctggggagggaatttatgatattcgagaacttgaatgtggaagatttcagagaatctaaaaatatgattcacagattttatactatggttatttctttaagacagattatggaaattgggcccttagtcaggcgtagccctgctgttttagttgtggaattcgattgtccggtagaggattgcctagatgaactggatccgttgcatccattgaacagggcctttatatttattcataaacaatggacctattatcatcaatattatatagttgaaaaggtaaaaaaggtgattcttgatatggccccggtaaaggaagatgattggagcatccttcacaaggttgtttattcagaaggttttgtcgaaagacgatataaaaagaagaaatacctcggtgatatttacattccacaaccattaatgaaaagcaataaaatcactactatctcaaatttttcccaacttaccaaaatttccaacgtcagagtttacagattcaacgctacagcagcgtgtgatccgcagaacttgaacaaaaaaaacttgagtatcaaagagcttaaagataaagaccttcctaatcttatttggactttagaaccagaaaaattctatgttgacatgagaccttacaaggaacacgaggaaaggaaaaaacggagagaagaagaagccaaggtgaggatgcaaggtgaggaacaggagaacattatgatagagagaaaaaaaatggatagtattgaagttgaagcgtcatcaggattgaaaaatatcataaaaacacctctcgctaatagggttgtcaatacttttaataactgcgctgctgtggtaataggctatgtaacagaagtggataaagtaaaggatgacaatgaagagaaaaataacgacagacctaaaattgcgaacgacggaatagctcaaaagtctagaagcgaaagtgaagataatgcaggaacaccgatggaaaacgcgtactttcaacctgaaccccaagataatgaccaaaacaacatatcttggaataccactatgaaagatattgatccaatttacatgagtgaaagatgtgctagagtttggagaaaggagcaacaaatgctaggattggagaaggctcagacatttgagaaaaaatattgtaaagatcagatggttatggacgaaaatcaggtcgaagaacctggtaagcactcggagagacatacaaaaaatcaggtagttagacctaggaccaaaatagcatcttccgccagtaaaaatgataatagtaataataaaaatagtaaatcatgcaaaaattgccataaagaggaagcgcacggtctagtgagagaataccttaagattaaactcaacatatcacctcatggagaaaggaatcagcgaacaaaggacaagagaaaatgtataatgaaatacaatgcgagcagtaacaacatcaacaaaatgcctggggagagtgaagtacttgggtcaactattttaacagatatccactttaaggatgtcgtaactgtgaaatttagggattttaaagccaaatttagaaaagtcaaaataaacgcttga

SEQ ID NO: 2596 - protein, 568 aa, Saccharomyces cerevisiae
MFLDYSGYEALTEINSSFGKYVLLLQQFEGCRSLKDRLQMLKDLGREFMIFENLNVEDFRESKNMIHRFYTMVISLRQIMEIGPLVRRSPAVLVVEFDCPVEDCLDELDPLHPLNRAFIFIHKQWTYYHQYYIVEKVKKVILDMAPVKEDDWSILHKVVYSEGFVERRYKKKKYLGDIYIPQPLMKSNKITTISNFSQLTKISNVRVYRFNATAACDPQNLNKKNLSIKELKDKDLPNLIWTLEPEKFYVDMRPYKEHEERKKRREEEAKVRMQGEEQENIMIERKKMDSIEVEASSGLKNIIKTPLANRVVNTFNNCAAVVIGYVTEVDKVKDDNEEKNNDRPKIANDGIAQKSRSESEDNAGTPMENAYFQPEPQDNDQNNISWNTTMKDIDPIYMSERCARVWRKEQQMLGLEKAQTFEKKYCKDQMVMDENQVEEPGKHSERHTKNQVVRPRTKIASSASKNDNSNNKNSKSCKNCHKEEAHGLVREYLKIKLNISPHGERNQRTKDKRKCIMKYNASSNNINKMPGESEVLGSTILTDIHFKDVVTVKFRDFKAKFRKVKINA

SEQ ID NO: 2597 - DNA, 25 bp, Artificial sequence
  primer
atgtttctggactattctggatatg

SEQ ID NO: 2598 - DNA, 27 bp, Artificial sequence
  primer
tcaagcgtttattttgacttttctaaa

SEQ ID NO: 2599 - DNA, 972 bp, SACCHAROMYCES CEREVISIAE
  CDS (1)..(972)
atgtcggggagcttctggacatctacacaaaggcatcattggcaatataccaaggcatcattggctaaagagaggcagaagttatggctattggagtgccagctgtttcctcaaggtttgaatattgtaatggattcgaagcaaaacggcatcgaacaatccatcacaaagaatataccaataactcaccgagacttacactatgataaagattataatctaaggatctactgctatttcctgataatgaagcttggaaggagactaaatataagacagtatgcactggctacagcacatatttatctatcaaggtttttaataaaggcttcagttagagaaataaacctatatatgctggttactacgtgtgtatatttagcatgcaaagttgaagaatgcccgcaatatatcagaactttggtaagtgaagcccgtaccttatggcccgaatttattcctcctgaccctactaaagttactgagtttgagttctacttactagaagaattggaaagttacttaattgtccaccacccttatcaatccttaaagcaaattgttcaagtcttaaagcaaccgccatttcaaataacactatcgtcagatgatctacaaaactgttggtccttaatcaacgacagttatataaatgatgttcatttgctttaccctcctcatattatcgctgttgcatgtttattcattacgatttccattcatgggaaaccaaccaaaggatcatcgttagcatctgcggcttctgaagccatcagagatcctaaaaattctagttctcctgttcaaatagcttttaatcgttttatggcagaatctcttgtagatcttgaggaggttatggatacgattcaagagcaaattacattatacgatcattgggacaagtaccacgaacaatggataaagtttctgctacatactttgtatcttagaccagcatctgcaatttaa

SEQ ID NO: 2600 - protein, 323 aa, SACCHAROMYCES CEREVISIAE
MSGSFWTSTQRHHWQYTKASLAKERQKLWLLECQLFPQGLNIVMDSKQNGIEQSITKNIPITHRDLHYDKDYNLRIYCYFLIMKLGRRLNIRQYALATAHIYLSRFLIKASVREINLYMLVTTCVYLACKVEECPQYIRTLVSEARTLWPEFIPPDPTKVTEFEFYLLEELESYLIVHHPYQSLKQIVQVLKQPPFQITLSSDDLQNCWSLINDSYINDVHLLYPPHIIAVACLFITISIHGKPTKGSSLASAASEAIRDPKNSSSPVQIAFNRFMAESLVDLEEVMDTIQEQITLYDHWDKYHEQWIKFLLHTLYLRPASAI

SEQ ID NO: 2601 - DNA, 909 bp, Aspergillus fumigatus
  CDS (1)..(909)
atggcggccaattattgggcgtcaacccagcgtcgacattggctgtttacaagagaaaaattggcggagattcgggaaatctttcgtgaaggcgataaagttgctcattcccagttccctctaccggaccagagactactcaatatctatttcagtcagcaacttataaagcttggaaagcgaatgtcaactagacagcaagctcttgcgactgctcaagtgtatatcaagcgattctatacgaagaatgagatcaggcatacaaatccgtacctagttcttacgactgccttctatctcgcttgcaaaatggaagagtgtccacaacatatccgttttgttgtcggtgaagcccggagcctctggccagaattcattaccccggatgtttcaaaactaggcgagtgtgaattttccttgatatcagaaatgaactcgcaactcattgtgcaccatccatatcgaacattatcagagcttcagcccgaactgtcactcacatcagatgaggttgctcttgcatggtctgtgatcaatgatcattacctgacggacctacctctcctatatgctcctcatgtcattgctgttatggcgatcattgttgcagttgtcttcaagccaaattccggaaatttccacgggtctgcggcgcctgtccttgccggcgcaatgagggatggtggaatgaatgtgctggctgcattaggagaccggactggttctgggcctcctctcaaaattcagaaactcatcaattggcttgctgagagtgaagttgacattaaaggtgtcattgagtgcacccaggaattggtgtcgctctatgaagtttgggagcagtacagtgagaagacttgcaaggagctacttgggcggatggtcaaagctaaaaatctggacaaatga

SEQ ID NO: 2602 - protein, 302 aa, Aspergillus fumigatus
MAANYWASTQRRHWLFTREKLAEIREIFREGDKVAHSQFPLPDQRLLNIYFSQQLIKLGKRMSTRQQALATAQVYIKRFYTKNEIRHTNPYLVLTTAFYLACKMEECPQHIRFVVGEARSLWPEFITPDVSKLGECEFSLISEMNSQLIVHHPYRTLSELQPELSLTSDEVALAWSVINDHYLTDLPLLYAPHVIAVMAIIVAVVFKPNSGNFHGSAAPVLAGAMRDGGMNVLAALGDRTGSGPPLKIQKLINWLAESEVDIKGVIECTQELVSLYEVWEQYSEKTCKELLGRMVKAKNLDK

SEQ ID NO: 2603 - DNA, 927 bp, Aedes aegypti
  CDS (130)..(927)
cgctcgccgcttcaacaagacaaaacaaaaatctaaacaaattttaatcagccaaagtgtctcagtttacttgcgtctagaattaaaaatttaaatttttatagtgaattcaattaattagtgttgaaaatggctggaaacttttggcaaagctcccaccatcagcagtggatattggacaagcaagacctcatccgcgagcgacagcacgatctgaaaaatctcaccgaagaggagtaccagaagatcttcatgtttttcgccaatgttattcaagtgctaggggagcagctaaagcttcgccagcaggtcattgccactgccacggtctatttcaagcggttctacgcccggaactcgctcaaatgtatagacccgttactgttggccccgacttgtattctgctggcctccaaagtggaagaattcggtgtcatttctaactcccggctcatcacaacctgccaaacggtgatcaagaacaaatttagctatgcctatcagcaggagttcccctacaggaccaaccacatcctggagtgtgagttttatttgctggagaacttggactgctgcctgatcgtgtatcaaccgtaccgtccgttgctgcagctgatccaggacattggccaggaggatcaattgctgacgcttacctggcgtctgatcaacgattccctgaggaccgatgtcagtctgctgtatccgccatatcaaattgcaataggctgcctgcagatagcatgtgtgatcctgcaaaaggaattgaaggcgtggtttgccgaactgaacgtagacatggagaaagtgcaggaaattgcccgggccattttgaacgttttcgagctgtggaaaagctacgacgaaaaggaaatacagggactgctggaaaagatgccaaaaccaaagccggcccctcaacggtga

SEQ ID NO: 2604 - protein, 265 aa, Aedes aegypti
MAGNFWQSSHHQQWILDKQDLIRERQHDLKNLTEEEYQKIFMFFANVIQVLGEQLKLRQQVIATATVYFKRFYARNSLKCIDPLLLAPTCILLASKVEEFGVISNSRLITTCQTVIKNKFSYAYQQEFPYRTNHILECEFYLLENLDCCLIVYQPYRPLLQLIQDIGQEDQLLTLTWRLINDSLRTDVSLLYPPYQIAIGCLQIACVILQKELKAWFAELNVDMEKVQEIARAILNVFELWKSYDEKEIQGLLEKMPKPKPAPQR

SEQ ID NO: 2605 - DNA, 1039 bp, Anopheles gambiae str. PEST
  CDS (17)..(817)
gcagcattcaacgaagatggcaggaaacttctggcaaagctcacaccaccagcagtggattctggacaagcaggatctgatccgggagcgtcagcacgacctgaaaacgctctccgaagaagagtaccagaaactcttcatgttctttgccaacatcatacaggtgctgggagagcagttgaagctgcgccagcaggtcattgctacggccaccgtgtacttcaagcggttctacgcgcgcaactcactgaagtgcatcgatccgctgctgctggcaccgacatgcatactgctctcgtccaaggtggaagagttcggtgtgatatcgaactcgcgactcatcaccacgtgccagacggtgatcaagaataagttcagctacgcctaccagcaggagttcccgtaccgcaccaaccacatcctggagtgtgaattctacctgctcgaaaatttggactgctgtttgattgtgtaccaaccgtaccgcccgctgctgcagctcatgcaggacattggccaggaggaacagttgctcactcttacctggcggctcatcaatgactccctacgcacggacgtgagtcttttgtatcccccgtatcagatcgctatcggttgtctgcagatagcgtgtgtcattctacagaaagagctaaaatcctggtttgccgagctaaacgtcgacatggacaaggtgcaggagatcgcacgcgcaatcgttaatctgttcgagctgtggaaaggatacgatgagaagaaggagatccaggcgttgttggaaaaaatgcccaaaccgaagccgcatcctcagcggtgatttggtgtcgaccctagcagcgatctcgtacggactggcctagactgaatgccagtcaatcgcgttcacctttccatactaaataatcacgcacgcccgctcgatagaggtaacagaactgattccgtacatcgtaccggtagcttgtaatgaaacttgtgattccgagacttctatgggggaaacacatccttgtatcaccttgaacgaataataatttat

SEQ ID NO: 2606 - protein, 266 aa, Anopheles gambiae str. PEST
MAGNFWQSSHHQQWILDKQDLIRERQHDLKTLSEEEYQKLFMFFANIIQVLGEQLKLRQQVIATATVYFKRFYARNSLKCIDPLLLAPTCILLSSKVEEFGVISNSRLITTCQTVIKNKFSYAYQQEFPYRTNHILECEFYLLENLDCCLIVYQPYRPLLQLMQDIGQEEQLLTLTWRLINDSLRTDVSLLYPPYQIAIGCLQIACVILQKELKSWFAELNVDMDKVQEIARAIVNLFELWKGYDEKKEIQALLEKMPKPKPHPQR

SEQ ID NO: 2607 - DNA, 1092 bp, Magnaporthe grisea 70-15
  CDS (1)..(1092)
atggcggccaatttttgggagtcaacccagcgtcggaactggctcttcaccaaagaggagctggcagccagacgacagcaactggaaaatgaggacccttccttggtgaccatgtatccattgcctgaatggagacatttatataactacttcaactaccaaatgctccgcctcgccaaaaacctctcgatccgtcaacaagccattgccacagcccaggtctacatgaagcgcttctacacgcgtgtcgagattcgaagcacgaacccaacccttgttctcgtcacggccgtctacctcgcctgcaagatggaggagatgccgctccacatacgcaacgtctcgctcgaggcgaagaaggtctggccaatggagacgccctcgctcgagatcgcaaagattggcgagtgtgagttctggctgatctcggagatgagcgcccagctcatcgtccaccagccctaccgcactctcaccgccctgcagcaggactttcagctcgctaatgacgaccacgtcctggctgtgtctttcctcaacgatcacttcatgaccgacttgccactgctgtatgccccccacaccatcgcgctggctgccatcatgctggctcttgtgcttaggttgtccaaggcctcaagcagcaataatgccgccgccgggcagcagggcggcgcacaagccggcccgctgggcatcaccctggcatctgggctgtccatgttccaacaggccgtagcggccaaagccatgacacctggcgggagcggctcccccgcaatgtcttcgcccatccagcagaatccaccaaaccaggcttaccagctcacgccgcagcaacaggagatgttccgccagcaacaaatgcagcagcagaacagacagccagaaacccaggccaaggactcgccgcagaaggagaagagcaaactccaacgttttgccgcatggctctcggagagcggtgtcgacatcgaggccatgatcgattgcacgcaggagctgatcgcgttttacgagtgccaagagtcgtacaacgaacagattacgcgtgaccaaatcaaccggttcgtcaaggctcggggcctttag

SEQ ID NO: 2608 - protein, 363 aa, Magnaporthe grisea 70-15
MAANFWESTQRRNWLFTKEELAARRQQLENEDPSLVTMYPLPEWRHLYNYFNYQMLRLAKNLSIRQQAIATAQVYMKRFYTRVEIRSTNPTLVLVTAVYLACKMEEMPLHIRNVSLEAKKVWPMETPSLEIAKIGECEFWLISEMSAQLIVHQPYRTLTALQQDFQLANDDHVLAVSFLNDHFMTDLPLLYAPHTIALAAIMLALVLRLSKASSSNNAAAGQQGGAQAGPLGITLASGLSMFQQAVAAKAMTPGGSGSPAMSSPIQQNPPNQAYQLTPQQQEMFRQQQMQQQNRQPETQAKDSPQKEKSKLQRFAAWLSESGVDIEAMIDCTQELIAFYECQESYNEQITRDQINRFVKARGL

SEQ ID NO: 2609 - DNA, 963 bp, Gibberella zeae PH-1
  CDS (1)..(963)
atgtccgccagttattggcagtcaacgcaatgtcgcttctggaccttcaccaaggaacagctggcgacaatgcgacagaagcttgaggaagacaatgcagagctcgtgcgcatgttcccgctcccgcagcaacgccatttaaacatatactttaaccagcgtttgataaggttggcgaaacgactgacgattcgacaacaatccatggccacggcgcaggtctacatgaaacgattctactcaaaagttgagatccgccgaacgaatccgtatctcgtaatagcgacagcaatatacctcgcgtgcaagatagaagagtcgccccagcacatccgacttatcgttacagaggcgcgacagatgtggggagaccttgtcgccatcgacacctctaaactgggagagtgcgagttcttcatgataagcgaaatgcggtcacaacttatcgtataccagccataccgaacggtcgtagccctgcgaagcgaacttggattgcaagaggacgaggtgcagcttgctcggtcggtgattaacgatcacttcatgacagatctcccgctgctatacccccctcacgttatcgcaatggtagccatgcttctggctttggttctcagacctaataattctggaccaggccagaacccctcaggagcagcggcggcagcaggactggcagcagctcaacaggcgctgatgcgtgcgcagggccagcagacttcagggggaggagctacagatgctgcaactgcagagcctaaggagcgacagcagcaagcacgagtgtctcgagtgcagaagtttgccaagtggttggttgatagtaacgtggaaatcgcatcgatggtggatgccacgcaggagattatctccttttacgaatgttacgagcattacaacgacaagctcacccgagaacaaattaacagatttgttaaggcgcgagggcttgataagtga

SEQ ID NO: 2610 - protein, 320 aa, Gibberella zeae PH-1
MSASYWQSTQCRFWTFTKEQLATMRQKLEEDNAELVRMFPLPQQRHLNIYFNQRLIRLAKRLTIRQQSMATAQVYMKRFYSKVEIRRTNPYLVIATAIYLACKIEESPQHIRLIVTEARQMWGDLVAIDTSKLGECEFFMISEMRSQLIVYQPYRTVVALRSELGLQEDEVQLARSVINDHFMTDLPLLYPPHVIAMVAMLLALVLRPNNSGPGQNPSGAAAAAGLAAAQQALMRAQGQQTSGGGATDAATAEPKERQQQARVSRVQKFAKWLVDSNVEIASMVDATQEIISFYECYEHYNDKLTREQINRFVKARGLDK

SEQ ID NO: 2611 - DNA, 804 bp, Apis mellifera
  CDS (1)..(804)
atggctggtaatttttggcaaagttcacatcatcaacaatggcttcttgataaacaagacttagtgcgagaacgacaacatgatctttcaatttttacagaagaagaatatcaaaaattattcatctttttctccaatttaatacaagtattgggggaacaattaaaactcagacaacaagttatagctactgcaactgtttattttaaaagattttatgctcgtaatagtttaaaatgtatagatccattattattagcacctacatctgttttcttagcttcaaaagtagaagaatttggagttatttctcataatagattaattgcagcatgtcaaactgtagtaaaaaataaattcaattatgcttattcacaagaatttccttatcgtggaagtcatatttccgaatgtgaattttatcttttggaacatttagattgttgtttaatagtatatcaaccatatcggcctttattaattcttattcaagatataggtccagatgaacaattacttacattggcatggcgtataattaatgatagtttacgtacagatgtatgtttattatatccaccacatcaaatagctattggatgtttgcaaatagcttgtgttatattacaaaaagatttaaaagcatggtttgctgaattaaatgctgatatggaaaaaattcaagaaatcgcacgatatatcattaatttatatgaactatggaaaacatatgatgaaaagaaagaaattcaaggtttattatccaaaatgccaaagcctacaccatcaccaccacagcactga

SEQ ID NO: 2612 - protein, 267 aa, Apis mellifera
MAGNFWQSSHHQQWLLDKQDLVRERQHDLSIFTEEEYQKLFIFFSNLIQVLGEQLKLRQQVIATATVYFKRFYARNSLKCIDPLLLAPTSVFLASKVEEFGVISHNRLIAACQTVVKNKFNYAYSQEFPYRGSHISECEFYLLEHLDCCLIVYQPYRPLLILIQDIGPDEQLLTLAWRIINDSLRTDVCLLYPPHQIAIGCLQIACVILQKDLKAWFAELNADMEKIQEIARYIINLYELWKTYDEKKEIQGLLSKMPKPTPSPPQH

SEQ ID NO: 2613 - DNA, 1020 bp, Candida glabrata CBS 138
  CDS (1)..(1020)
atgtctgggagttactggacttctatgcagcggcaaaagtggcagcacaccaagcctagcttggcgcgcgagcgacagaggctgtgggttatggagtgccagttatttccacaaggtctgaatattatagtggattccaagcccaactccgcagatagttccaacggaaatgctgctaataatggaggtggcaatggtaggtcacaattggtagccacgactaagaatatccctataacacatagagatttgcattacgataaggattataatttgaggatttactgttatttcctcataatgaaactgggcagacggttaaacatacggcaatatgccttggctactgcacatatatatctttcacgatttctattaaaagcttccgtcagagaggtcaatttatatctattggtcactacatgcgtttatttggcttgtaaagtggaagagtgtccacaatatatcaggacattagtaagcgaggcaagatcattatggccggagtttatacctcctgatcctacaaaggtaacagaattcgaattttacctgatagaagaactacaatgctacttaattgtacaccacccttataagtctatggaacagatagtggaagctttgaaagaagagcctttcaaactaacttttacgtcagatgagctacaaaactgctggtcacttataaatgatagctttatcaatgacgtacatttaacttacgcacctcacatcattgctatggcatgtctattcattaccgtctccatacagggttcaaatactaaggaattgtcattgacttctgcggtaactgagactttaacgtctcagtcctccttgacccctcaacaacaaacttttttcagatttttggctgaatcacacgttgacctagaagaagtaatggataccatccaacaacagatcattctttatgaccattgggatcgttaccatgagccatggattaagtatctcctacatacactttacctaagaccactatctgcctga

SEQ ID NO: 2614 - protein, 339 aa, Candida glabrata CBS 138
MSGSYWTSMQRQKWQHTKPSLARERQRLWVMECQLFPQGLNIIVDSKPNSADSSNGNAANNGGGNGRSQLVATTKNIPITHRDLHYDKDYNLRIYCYFLIMKLGRRLNIRQYALATAHIYLSRFLLKASVREVNLYLLVTTCVYLACKVEECPQYIRTLVSEARSLWPEFIPPDPTKVTEFEFYLIEELQCYLIVHHPYKSMEQIVEALKEEPFKLTFTSDELQNCWSLINDSFINDVHLTYAPHIIAMACLFITVSIQGSNTKELSLTSAVTETLTSQSSLTPQQQTFFRFLAESHVDLEEVMDTIQQQIILYDHWDRYHEPWIKYLLHTLYLRPLSA

SEQ ID NO: 2615 - DNA, 915 bp, Kluyveromyces lactis NRRL Y-1140
  CDS (1)..(915)
atgagcgcctcatactgggattcgagtcagaggcacaagtggaagtatactagggaatccttggctaaggagaagcagaaactctggctgttggaatgccaattattcccacaaggtttgaatgttacgattcacgattcgaaggcgaacaagcaggtgacgacaaacattccggttacacagcgagatctgcattatgatcgagactacaatttgaggatatactgctatttccttataatgaagttgggcaggaggctcaatatacggcagtgtgcacttgttacagcacatgtttatttgagccgatttttgcttcgagctagtgtcagggaagtgaacctgtatcttttaatcaccacctgcatctatttggcttgcaaagtggaagaatgtccgcagcatataagaacgctagtcaacgaggcgaggtctctatggccagagtttattccaccggatgtgacaaaagtgaccgagtttgagttttatttaatcgaggaattgcaatcatatttgattgtacaccatccgtaccggtctctagaacagatcgagaaggcattatcatccgaaaagtacaactataaactctcagacgatgagcttcagaaaatatggtcgttgattaacgatagttatacgaccgatgtccatttactctattcaccgcacgtgatcgccataagttgtctatttgcagtgtcttgcatcattcacaagccagaggacagtacaaagcgtgctaacatcaacatgttcatcgctgaaactcaagttaatttggaacaagtgatgtttatccttcaagaactcatatcactatacgaccattgggacaaatacaatgaactgcggatcagagcgctcctacacgagttatacctccgtcaacaaacaccagcaattcagtga

SEQ ID NO: 2616 - protein, 304 aa, Kluyveromyces lactis NRRL Y-1140
MSASYWDSSQRHKWKYTRESLAKEKQKLWLLECQLFPQGLNVTIHDSKANKQVTTNIPVTQRDLHYDRDYNLRIYCYFLIMKLGRRLNIRQCALVTAHVYLSRFLLRASVREVNLYLLITTCIYLACKVEECPQHIRTLVNEARSLWPEFIPPDVTKVTEFEFYLIEELQSYLIVHHPYRSLEQIEKALSSEKYNYKLSDDELQKIWSLINDSYTTDVHLLYSPHVIAISCLFAVSCIIHKPEDSTKRANINMFIAETQVNLEQVMFILQELISLYDHWDKYNELRIRALLHELYLRQQTPAIQ

SEQ ID NO: 2617 - DNA, 1038 bp, Debaryomyces hansenii CBS767
  CDS (1)..(1038)
atgtcagcagatttctggagctcatcacaacgtaacaggtggcaacttaccaggcattctttgttggaatcgaggcgaaaactcctcttgcttgagaaaaaaatgattcagaatggatttatcaaggattacccaaatgtcgaatatgatgccaatacaagaatatatttgcataatttacttattaaactaggcagaaggctcaatgtcagacaaattgcattagctacagcagaaatatacatgagcaggttcctcatcaaagtgctgttgaaggaaataaatgtatatttgctcgtaacaacgtgtctatatgctgcttgtaaaattgaagaatgtccccagcatatacggcttattacatcggaggcacggaatctatggccggaatacatcccccaggacgtaaccaagctagccgagtttgagttctatttgatcgaagagatggacctgttcttggttctacatcatccatatcgctcactcctacagatcagggactacttgaacgagaacttcgctctctacggattctcgttgtcagacgacgaattgcagaattcatggtcccttataaacgatagctacatcaccgacctccatctcctattaccaccgcacataatagccattgctaccatatatataaccatagtgctcaagaaaaatatcagttcgttgcgtcttggtgcaaattccatgtccaatgatacagtaggcatggacccgcatacaaaacccaactccaactccatccacgccgaagacctcatggccttggccactggtggctccgccatcaatgacattgggaacccatcctctggcacgaatggtttccacgacatagaactagacgaaaatacaatcaagatcaacaaattcatgacttttctagatcattcccatgtaaatttgaacgaagtcgttgaggctatacaggacatcatcaccttgtatgctatttggaacaggtacaatgaaatgtccgtgaaaaaagtgctacaagatatgctattaaatagatctgtataa

SEQ ID NO: 2618 - protein, 345 aa, Debaryomyces hansenii CBS767
MSADFWSSSQRNRWQLTRHSLLESRRKLLLLEKKMIQNGFIKDYPNVEYDANTRIYLHNLLIKLGRRLNVRQIALATAEIYMSRFLIKVLLKEINVYLLVTTCLYAACKIEECPQHIRLITSEARNLWPEYIPQDVTKLAEFEFYLIEEMDLFLVLHHPYRSLLQIRDYLNENFALYGFSLSDDELQNSWSLINDSYITDLHLLLPPHIIAIATIYITIVLKKNISSLRLGANSMSNDTVGMDPHTKPNSNSIHAEDLMALATGGSAINDIGNPSSGTNGFHDIELDENTIKINKFMTFLDHSHVNLNEVVEAIQDIITLYAIWNRYNEMSVKKVLQDMLLNRSV

SEQ ID NO: 2619 - DNA, 843 bp, Yarrowia lipolytica CLIB122
  CDS (1)..(843)
atgtcggcaaactactggacaagttcccagagactgcattggctattgaccaaggaaacgcttgcagagcgaagaaaaggcctggaagacatattcgacccagggaagctgcaaaccatcaaggcgctcaatccgtggcatgttcgtgtctacttgcacaccctgattcatcttttgggtcagaatctgtcgattcgacaacggattttggccacggcagaggtgtatctcactcgatttcatacaaaggtgccttttggcgaaatcaacccgtacctggtggtagccacggcggtctacgtggcatgcaaagtcgaggaacatccacagcatatccggactatcacctcagaggctcgatctttatggcccgactacatctcgcatgacccaacgaagattgccgaatgcgaattttacctgatcgaggagctgggaacgtacctggtgatttttcatccctacaagtcgctgatgcagatttcggatgccatggcaaggtccaacgctcagatcaccatggcaccagaggagatccaggtaacatggtccatgatcaacgacagctacatcaccgacctgcatctgctcaacccgccacacattgtcgccatggcttgcatctacatgacggtggtgctgcggtcgcacattatgcgcatgactatgccctcagaggcggtcaaaagccgaatcgaggcgttcatgacgttcttcggagagtcgaacgtggacttggaacagacgattgattgtgtgcaggaaatgatttcgctgtacgtcaactgggacacatattcggaaaagcagtgtcgggtggagattgccaaagtaattacataa

SEQ ID NO: 2620 - protein, 280 aa, Yarrowia lipolytica CLIB122
MSANYWTSSQRLHWLLTKETLAERRKGLEDIFDPGKLQTIKALNPWHVRVYLHTLIHLLGQNLSIRQRILATAEVYLTRFHTKVPFGEINPYLVVATAVYVACKVEEHPQHIRTITSEARSLWPDYISHDPTKIAECEFYLIEELGTYLVIFHPYKSLMQISDAMARSNAQITMAPEEIQVTWSMINDSYITDLHLLNPPHIVAMACIYMTVVLRSHIMRMTMPSEAVKSRIEAFMTFFGESNVDLEQTIDCVQEMISLYVNWDTYSEKQCRVEIAKVIT

SEQ ID NO: 2621 - DNA, 1182 bp, Ustilago maydis 521
  CDS (1)..(1182)
atgtcagccaactactgggcttctacacaatgcaacaactggctactggatcgaccgcagctcgagttggcgcgcaaggaagatctgcgctatgcgactcgactcgagtgtgctgctttgggcgtgttcttttccaacttgctatcgctcatctgcaagcggctcaatctgcgacaacgagtgacggcgtcggccaacgtcttcttccgacgcttctttgccaaaaactcgtactcggcgctcgaccccttcctcgtgtgcgccacgtgcgtctatgtggcagccaaggtggaagagtcgccgatccacatcaaatccgccgtggcagaagccacacgtagcttcacagaacacggcttccgaggcatgcccaccgaccattcgagcctggcagagatggaattttatctgctggaagagatggagtttgacatggtgctctttcacagttatcgaagtttgatcgtcatgtttgaggattatggctcaggtagcgcggtaggtagcggtaacagtatacatgagcgttccgctggcgccgctggcagcggaagcggaagcggcggtagtgggatgatgatagggttgggaatcgaagcagccgcatttggcgtcaccaaagggctagcgagtgtcgaggagggcgacgctgcctcagcgatcgccgaggaggacaaagtacaactcaacgagttcaacgacgaagtgctgctcatgtgttggttcatactcaacgacacgtacaagaccgacatcccactcatgtaccctccctacatggtggcgctcgcctcgatctggctcggtctaagccttcatcctccgtcgtttgacaagatcaccgcatcgctccacaccatgcagacgcgacgagacgaacaccacctctcgatccaacgaatcctggacaacccggcctcaacgcccgccgagctggcgtctgcaaagcgagaaccatcgccgccgagccaagacgccttgacgtttttcgcaagcctcaacgtgtccctaccactactcgccgagatcgtacaggagatggtgagcgcttacagcgtccagcaccaggtacagaggctcgtgtctgacggtccgggcatcgtcaagctgctcgagaggatgagggagagtagaagggtggctctgatcaaggatcgcgatcaaacgcgtacacacgcctga

SEQ ID NO: 2622 - protein, 393 aa, Ustilago maydis 521
MSANYWASTQCNNWLLDRPQLELARKEDLRYATRLECAALGVFFSNLLSLICKRLNLRQRVTASANVFFRRFFAKNSYSALDPFLVCATCVYVAAKVEESPIHIKSAVAEATRSFTEHGFRGMPTDHSSLAEMEFYLLEEMEFDMVLFHSYRSLIVMFEDYGSGSAVGSGNSIHERSAGAAGSGSGSGGSGMMIGLGIEAAAFGVTKGLASVEEGDAASAIAEEDKVQLNEFNDEVLLMCWFILNDTYKTDIPLMYPPYMVALASIWLGLSLHPPSFDKITASLHTMQTRRDEHHLSIQRILDNPASTPAELASAKREPSPPSQDALTFFASLNVSLPLLAEIVQEMVSAYSVQHQVQRLVSDGPGIVKLLERMRESRRVALIKDRDQTRTHA

SEQ ID NO: 2623 - DNA, 1320 bp, Cryptococcus neoformans var. neoformans B-3501A
  CDS (1)..(1320)
atgtcttccaacttctatacctcctctcataaccgctattggctcctgactcggccgtctcttctggaatctcggcaaacagacctcaaatactgcacctctcgccagctatattgcctcttcatcttcttctctcaactcatccaaaaactcggtaaacgactgctgctgaggcaaataccgatagccaccgcatgtgtgtttttcaagcggttctacttcaagaacagtttgtgcgaaacgaatccatatctggtgctcgcggcttgcatttatgtggcagccaaagtagaggagactccggtacatatcaagagtgtcgtaagtgaggccaagttggttttccatgaacacaacatcaaaatgttccctgctgagaccaataagcttggagaaatggagttttatctactggaggatctcgatttccacttagtggtcttccacccatatcgggcgctactccatctcaccgggagggagtctgcagacatgggaaaatttgagaagtccagagttcaagaagatatggaaatacgaaaaaaagaaggagatgccaaaaagatgcgagaagaagaggcgaagaaggcgagcagtaagggacagcaaccaacagttggacaggcacttgaaaaagagggggagcgcctcgaagaggctgaggaaaccaggataaggcgtctaatgagtagagggacaggcgaaggtatgatggaagtggacgagggtgttttgcaaatatcatggttcatcctcaacgactcctatcgcaccgatgcccctctgctatatcctccttatataatcgctctctcggcaatatatatcgccttctgcctaacatccatgtcgaattcctctgcccgcacccgtgcgtcttccactcagcgaccggaactcttgcagtcggcttcgattaatgaaggattgaatttgcttccaccgcctaaaaatgccgcagaatttctggctgggtttcaagtcagtttaccaatgctgtttggttgcgtgcaagagattattggactgtatcccgtatgggaggcatttgagccaacggtgatgaggaattcccaagcacaagccaaaacggggaatgcagcagcacctgtcccggctgcaactgggacaaaaaccgggcagaacaacgatttagtccaagacaaaaaggacaagttcggtttggaggaggctgaatctctggtacggaaaatgatcgaggaaaggatgatagatttaggtcatccagataatgcgggtgttgaaaaggcttcaggtaccggcccctccaatgtagcgggtaaaaagcgcgcaagatag

SEQ ID NO: 2624 - protein, 439 aa, Cryptococcus neoformans var. neoformans B-3501A
MSSNFYTSSHNRYWLLTRPSLLESRQTDLKYCTSRQLYCLFIFFSQLIQKLGKRLLLRQIPIATACVFFKRFYFKNSLCETNPYLVLAACIYVAAKVEETPVHIKSVVSEAKLVFHEHNIKMFPAETNKLGEMEFYLLEDLDFHLVVFHPYRALLHLTGRESADMGKFEKSRVQEDMEIRKKEGDAKKMREEEAKKASSKGQQPTVGQALEKEGERLEEAEETRIRRLMSRGTGEGMMEVDEGVLQISWFILNDSYRTDAPLLYPPYIIALSAIYIAFCLTSMSNSSARTRASSTQRPELLQSASINEGLNLLPPPKNAAEFLAGFQVSLPMLFGCVQEIIGLYPVWEAFEPTVMRNSQAQAKTGNAAAPVPAATGTKTGQNNDLVQDKKDKFGLEEAESLVRKMIEERMIDLGHPDNAGVEKASGTGPSNVAGKKRAR

SEQ ID NO: 2625 - DNA, 955 bp, Tribolium castaneum
  CDS (44)..(844)
agttattgcctgtgatttaattcaactcagattagtttgtgcaatggctggaaatttttggcaaagctcacaccaccagcagtggcttttggacaaacaagatttaattagggagcgccaacatgatctccaactcctcacggaggaggagtaccaaaaaatatttatattttttgctagcgtcattcaaacactaggcgaacagttgaagctacgccagcaagttatagcaaccgcaacggtttattttaagaggttttatgcaaaaaactcacttaagtgcatcgatccgttattgttagcccccacttgcatttttctagcctccaaagtagaagaatttggggtgatttccaattctaggttaattacaacgtgtcagacagtcattaaaaataagtttagttacgcctatagtcaggaatttccatatcgtacgaaccacatcctagagtgtgaattctacttgttagaaaacctcgactgttgcttgatcgtctatcagccttatagacctctcttacaactagtgcaagacatgggtcaagaagatcaacttttgactctcgcctggaggatagtgaacgattctcttaggactgatgtgtgtttgctttatccaccatatcaaattgcaattggctgtcttcaaatagcttgtgtcatcttgcaaaaggaccacaaggcttggtttgccgaactgaacgtggacatagaacgaattcaagaaattgcaagatacgttattaatttattcgagctgtggaagacttacgacgagaagaaagaaattcaaggactgttgaataaaatgcctaaaccaaaacctgcccctcaaagatagaaatcggacgatttctacgtgactttacgcttataactatcacttaaatatttattctttgattcaattcaacataactgtgctaatttcagaataaagttcctagattta

SEQ ID NO: 2626 - protein, 266 aa, Tribolium castaneum
MAGNFWQSSHHQQWLLDKQDLIRERQHDLQLLTEEEYQKIFIFFASVIQTLGEQLKLRQQVIATATVYFKRFYAKNSLKCIDPLLLAPTCIFLASKVEEFGVISNSRLITTCQTVIKNKFSYAYSQEFPYRTNHILECEFYLLENLDCCLIVYQPYRPLLQLVQDMGQEDQLLTLAWRIVNDSLRTDVCLLYPPYQIAIGCLQIACVILQKDHKAWFAELNVDIERIQEIARYVINLFELWKTYDEKKEIQGLLNKMPKPKPAPQR

SEQ ID NO: 2627 - DNA, 930 bp, Oryza sativa subsp
  CDS (1)..(930)
atggccgccaacttctggacgtcgtcgcactgcgagggcagcaagcagctgctggaccaggaggacgtggacaaggtcccccaggcggacagcgaccggggcatcacgccggaggagttccgcctcgtcaagatccacatgtccttcctcctacaaattaaggcaaatcatttgatgatttcagatatctggcgattggcacaacaggtgaaagttagacaaagggtgatagctactgctgttacttatttcaggcgtgtatacacaagatggccttactttcccattaagctaattaatgccctaagaattatgtggaacatcaagctattagaattttgttctgatgctggatatgtttacagaaagagcatgactgaatatgatcctcgtctggtagcaccaacctgtttgtatttggcatcaaaggtggaagagagcacagtgcaagcaagacttcttgtcttttacataaaaaagatgtgtgcttctgatgagaagtaccggtttgaaatcaaggatatccttgaaatgggaatgaagctcctggaggcacttgactattatttagttgtttaccacccatatcgtcctcttttacaatgctttgattttaggttattgcaggatgctggcataacagatctgacacaatttgcctggggaattgtcaatgatacttacaagatggatcttattctcatacacccaccatatatgatagcattagcctgcatctacattgcaagcgttcttaaagacaaggacataactctgtggtttgaagagctccgtgttgacatgaacattgtcaagaatatctcgatggaaattttggacttctatgacacctacaagattgatcctcaaagagggctcccagaggacaaaatagcccctgtgatgaacaaactgccttcaaaggcctaa

SEQ ID NO: 2628 - protein, 309 aa, Oryza sativa subsp
MAANFWTSSHCEGSKQLLDQEDVDKVPQADSDRGITPEEFRLVKIHMSFLLQIKANHLMISDIWRLAQQVKVRQRVIATAVTYFRRVYTRWPYFPIKLINALRIMWNIKLLEFCSDAGYVYRKSMTEYDPRLVAPTCLYLASKVEESTVQARLLVFYIKKMCASDEKYRFEIKDILEMGMKLLEALDYYLVVYHPYRPLLQCFDFRLLQDAGITDLTQFAWGIVNDTYKMDLILIHPPYMIALACIYIASVLKDKDITLWFEELRVDMNIVKNISMEILDFYDTYKIDPQRGLPEDKIAPVMNKLPSKA

SEQ ID NO: 2629 - DNA, 948 bp, Aspergillus oryzae
  CDS (1)..(948)
atggctgccaattattgggcgtcgactcaacgtcgacattggttgtttacgaaagaaagattggcagacattcgggagtcttttagagagagagataaggccgcgcattcgcagtttcctctgccggatcagaggctgctaaacatctacttcagccaacaactcataaaacttgggaagaggatgtcaactagacaacaagcactcgctacggctcaagtatacatcaaacggttttatactaagaacgagataagacataccaacccgtatctggtagtcaccactgcattctatctcgcctgtaagatggaagaatgtcctcaacatatccggtttgtggtcgcagaggcccgaaacttttggcccgaattcattgctccggatgtgtcaaagctaggcgaatgcgagttcgctttgatatccgaaatgaactcacagctcatcgttcatcatccatatcggactttatccgagctccaaccggagctatcgcttacatcagatgaagtagccctggcatggtccgtcatcaatgatcattatcttaccgatctaccattactatacccacctcatgtgattgcggtcatggcaatcatcgttgctgttgtctttaaaccaagccagacgagcttccatgggactgccgccccactggccggagcgatgcgagatggagggatgaatatcctcgcagctttgggagataagaatggcgctggtccgcctccccgaattcagaaacttgtcggctggcttgccgagagtgaggttgatattcgagctgttattgaatgcacccaggagctggtgtctctgtatgagatctgggagaattatagcgaaaagcactgtaaggaactactcggccgaatggtgaagagcaagaatctggacaaaatcggggcagtttgcttttgcgttgcattcagggagtttgggtag

SEQ ID NO: 2630 - protein, 315 aa, Aspergillus oryzae
MAANYWASTQRRHWLFTKERLADIRESFRERDKAAHSQFPLPDQRLLNIYFSQQLIKLGKRMSTRQQALATAQVYIKRFYTKNEIRHTNPYLVVTTAFYLACKMEECPQHIRFVVAEARNFWPEFIAPDVSKLGECEFALISEMNSQLIVHHPYRTLSELQPELSLTSDEVALAWSVINDHYLTDLPLLYPPHVIAVMAIIVAVVFKPSQTSFHGTAAPLAGAMRDGGMNILAALGDKNGAGPPPRIQKLVGWLAESEVDIRAVIECTQELVSLYEIWENYSEKHCKELLGRMVKSKNLDKIGAVCFCVAFREFG

SEQ ID NO: 2631 - DNA, 960 bp, Gibberella moniliformis
  CDS (1)..(960)
atgtcagccaattattggcactcgacacaatgtcgcttctggagcttcaccaaggagcagctcgtgacaatgcgacagaagcttgaagaggacaatgccgaattggtgcgaatgtttccgcttccgcagcaacggcgtttatacatatactttaatcaacaactgatacggctggcgaaacgattaacgatccgacaacaatccatggccacggcgcaggtctacatgaagcgattctactccaaagtcgagattcgtcgaacgaacccatacctcgtcatagcgaccgctatatacttagcctgcaaaatagaagagtctcctcaacacattcgactcatcgtgacagaggcgcgacagatgtggggagatctcgtggccatcgacacgtccaagctgggcgagtgtgagttcttcatgataagcgagatgcgatcacagttgattgtattccaaccgtatcgaacgatcacagcattgcgaaatgaactatcgttggtggacgacgaagtgcaactggctcgctcggtcatcaacgatcacttcatgacagaccttccgctcctataccctccacatattatcgccatggttgccatcctactggccttggtgttgaggcctaacaactcaggtcctggccagagcacttcaggagcagccgccgcagcaggactggcagccgctcaacaggcgctgatgcgagcacagggccaacaagcacaaggcggaatgcccgagcccgctgctgcagaacctaaggagaagcggcaacaagatcgggtgtcgcgggtgcaaaagtttgcgaaatggctggttgacagcaacgtggagattgcatctatggtggatgctactcaggagataatatcattctatgagtgctatgaacattacaacgacaagctcactcgcgaacagatcaacaggtttgttaaggcaagaggcttagataagtga

SEQ ID NO: 2632 - protein, 319 aa, Gibberella moniliformis
MSANYWHSTQCRFWSFTKEQLVTMRQKLEEDNAELVRMFPLPQQRRLYIYFNQQLIRLAKRLTIRQQSMATAQVYMKRFYSKVEIRRTNPYLVIATAIYLACKIEESPQHIRLIVTEARQMWGDLVAIDTSKLGECEFFMISEMRSQLIVFQPYRTITALRNELSLVDDEVQLARSVINDHFMTDLPLLYPPHIIAMVAILLALVLRPNNSGPGQSTSGAAAAAGLAAAQQALMRAQGQQAQGGMPEPAAAEPKEKRQQDRVSRVQKFAKWLVDSNVEIASMVDATQEIISFYECYEHYNDKLTREQINRFVKARGLDK

SEQ ID NO: 2633 - DNA, 804 bp, Drosophila melanogaster
  CDS (1)..(804)
atggcgggcaatttttggcagagttcgcactcgcagcagtggattttggacaaacccgatctgctccgggagcgtcagcacgatttgttggcccttaacgaggatgaataccaaaaggtgtttattttcttcgcaaatgtgatccaggtgctcggcgagcagctaaagctgaggcaacaggtcatcgccacggcgacggtttacttcaagagattctatgcgaggaactccctgaagaacatcgatcctctgctgctggcgcccacttgcatcttgctggcctcgaaggtggaggagttcggtgtcatttccaattcacgactgatctcgatctgccagtcggccattaagacaaagttcagctatgcgtacgctcaggagtttccctaccgcaccaatcacatcctggagtgcgagttttacctgctggagaacctggattgctgcttgattgtctaccagccgtacagaccgctgctgcagctggttcaggacatgggccaggaggaccagttgctcaccctgagctggcgtatcgtaaacgattccctgcgcaccgatgtctgcctgctctatcctccttaccagatcgctatagcctgccttcaaatcgcctgcgtcatcctgcaaaaggacgccacgaagcagtggttcgcagaattgaatgttgatttagacaaggtccaggagatcgtgcgcgccattgtaaatctgtacgagttgtggaaggactggaaggaaaaggacgagattcagatgctgctgtccaagattccgaaaccgaaaccaccgcctcagcgttag

SEQ ID NO: 2634 - protein, 267 aa, Drosophila melanogaster
MAGNFWQSSHSQQWILDKPDLLRERQHDLLALNEDEYQKVFIFFANVIQVLGEQLKLRQQVIATATVYFKRFYARNSLKNIDPLLLAPTCILLASKVEEFGVISNSRLISICQSAIKTKFSYAYAQEFPYRTNHILECEFYLLENLDCCLIVYQPYRPLLQLVQDMGQEDQLLTLSWRIVNDSLRTDVCLLYPPYQIAIACLQIACVILQKDATKQWFAELNVDLDKVQEIVRAIVNLYELWKDWKEKDEIQMLLSKIPKPKPPPQR

SEQ ID NO: 2635 - DNA, 762 bp, Glycine max
  CDS (1)..(762)
atggctgccaatttctggacatcatctcattacaagcatcttctggatcaggaagatgtggatgtggtgaatacactcgacaaggaaaagggtattacactggaggattttaagcttattaagatgcacatggctaattatattttgaaattggctcaacaagtaaaagtgaggcagagggttgtggccacagcagttacatacatgaggcgtgtttacaccaggaagagtatggctgaatatgatccacgcttggtagctccaacatgcttgtacctggcatcaaaagcagaagaaagcacagtgcaggctcggcttcttgtattttacattaaaaaattatacactgatgacaagtatagatatgaaatcaaggacatacttgaaatggaaatgaagattttagaagctcttaattattacctggttgtataccatccataccgttcactatctccgttgcttcaggatgcaggtctgaatgatctaaacatgactcaactaacttgggggcttgtaaatgacacatacaagatggacctaattcttgtacatcctccgcatttgattgctttagcttgcatatacattgctagtgtgctcagggagaaagacaccactgcttggtttgaagaacttcgtgttgatatgaatgtggttaaaaacatatcaatggagatacttgatttttatgaaagcaatagaatgttcactgatgagagaatcaatgctgctcttcagaagttgagcctgagaccctag

SEQ ID NO: 2636 - protein, 253 aa, Glycine max
MAANFWTSSHYKHLLDQEDVDVVNTLDKEKGITLEDFKLIKMHMANYILKLAQQVKVRQRVVATAVTYMRRVYTRKSMAEYDPRLVAPTCLYLASKAEESTVQARLLVFYIKKLYTDDKYRYEIKDILEMEMKILEALNYYLVVYHPYRSLSPLLQDAGLNDLNMTQLTWGLVNDTYKMDLILVHPPHLIALACIYIASVLREKDTTAWFEELRVDMNVVKNISMEILDFYESNRMFTDERINAALQKLSLRP

SEQ ID NO: 2637 - DNA, 762 bp, Glycine max
  CDS (1)..(762)
atggctgccaatttctggacatcatctcattacaagcatcttctggatcaggaagatgtggatatggtgaatccacttgacaaggaaaagggtatcacactggaggattttaagcttattaagatgcacatggctaattatattttgaaattggctcaacaagtaaaagtgaggcagagggttgtggccacagcaattacatacatgaggcgtgtttacaccaggaagagtatggctgaatatgatccacgcttggtagctccaacatgcttgtacctggcatcaaaagcagaagaaagcacagtgcaggctcggcttcttgtattttacattaaaaaattatacactgatgacaagtatagatatgaaatcaaggacatacttgaaatggaaatgaagattttagaagctcttaattattacctgggtgtataccatccataccgttcactatctccgttgcttcaggatgcaggtctgaatgatctaaacatgactcaactaacttgggggcttgtaaatgacacatacaagatggacctaattcttgtacatcctccgcatttgattgctttagcttgcatatacattgctagtgtgctcagggagaaagacaccactgcttggtttgaagaacttcgtgttgatatgaatgtggttaaaaacatatcaatggagatacttgatttttatgaaagcaatagaatgttcactgatgagagaatcaatgctgctcttcagaagttgagcctgagaccctag

SEQ ID NO: 2638 - protein, 253 aa, Glycine max
MAANFWTSSHYKHLLDQEDVDMVNPLDKEKGITLEDFKLIKMHMANYILKLAQQVKVRQRVVATAITYMRRVYTRKSMAEYDPRLVAPTCLYLASKAEESTVQARLLVFYIKKLYTDDKYRYEIKDILEMEMKILEALNYYLGVYHPYRSLSPLLQDAGLNDLNMTQLTWGLVNDTYKMDLILVHPPHLIALACIYIASVLREKDTTAWFEELRVDMNVVKNISMEILDFYESNRMFTDERINAALQKLSLRP

SEQ ID NO: 2639 - DNA, 22 bp, Artificial sequence
  primer
atgtcggggagcttctggacat

SEQ ID NO: 2640 - DNA, 25 bp, Artificial sequence
  primer
ttaaattgcagatgctggtctaaga

SEQ ID NO: 2641 - protein, 503 aa, Artificial sequence
  consensus sequence
  Variant (2)..(5): Xaa in position 2 to 5 is any amino acid
  Variant (7)..(7): Xaa in position 7 is any amino acid
  Variant (9)..(12): Xaa in position 9 to 12 is any amino acid
  Variant (13)..(15): Xaa in position 13 to 15 is any or no amino acid
  Variant (17)..(22): Xaa in position 17 to 22 is any amino acid
  Variant (24)..(26): Xaa in position 24 to 26 is any amino acid
  Variant (28)..(52): Xaa in position 28 to 52 is any amino acid
  Variant (53)..(104): Xaa in position 53 to 104 is any or no amino acid
  Variant (106)..(111): Xaa in position 106 to 111 is any amino acid
  Variant (114)..(116): Xaa in position 114 to 116 is any amino acid
  Variant (120)..(121): Xaa in position 120 to 121 is any amino acid
  Variant (123)..(124): Xaa in position 123 to 124 is any amino acid
  Variant (127)..(136): Xaa in position 127 to 136 is any amino acid
  Variant (137)..(168): Xaa in position 137 to 168 is any or no amino acid
  Variant (170)..(170): Xaa in position 170 is any amino acid
  Variant (172)..(174): Xaa in position 172 to 174 is any amino acid
  Variant (176)..(178): Xaa in position 176 to 178 is any amino acid
  Variant (181)..(181): Xaa in position 181 is any amino acid
  Variant (183)..(183): Xaa in position 183 is any amino acid
  Variant (186)..(213): Xaa in position 186 to 213 is any amino acid
  Variant (214)..(222): Xaa in position 214 to 222 is any or no amino acid
  Variant (224)..(224): Xaa in position 224 is any amino acid
  Variant (227)..(227): Xaa in position 227 is any amino acid
  Variant (229)..(235): Xaa in position 229 to 235 is any amino acid
  Variant (237)..(237): Xaa in position 237 is any amino acid
  Variant (239)..(240): Xaa in position 239 to 240 is any amino acid
  Variant (244)..(244): Xaa in position 244 is any amino acid
  Variant (246)..(262): Xaa in position 246 to 262 is any amino acid
  Variant (263)..(339): Xaa in position 263 to 339 is any or no amino acid
  Variant (341)..(343): Xaa in position 341 to 343 is any amino acid
  Variant (346)..(349): Xaa in position 346 to 349 is any amino acid
  Variant (351)..(352): Xaa in position 351 to 352 is any amino acid
  Variant (354)..(355): Xaa in position 354 to 355 is any amino acid
  Variant (358)..(359): Xaa in position 358 to 359 is any amino acid
  Variant (362)..(384): Xaa in position 362 to 384 is any amino acid
  Variant (385)..(486): Xaa in position 385 to 486 is any or no amino acid
  Variant (488)..(502): Xaa in position 488 to 502 is any amino acid
MXXXXWXSXXXXXXXWXXXXXXLXXXRXXXXXXXXXXXXXXXXXXXXXXXXXXXXXXXXXXXXXXXXXXXXXXXXXXXXXXXXXXXXXXXXXXXXXXXXXXXXXLXXXXXXRQXXXATAXXYXXRFXXXXXXXXXXXXXXXXXXXXXXXXXXXXXXXXXXXXXXXXXXPXLXXXTXXXLAXKXEEXXXXXXXXXXXXXXXXXXXXXXXXXXXXXXXXXXXXXEXEFXLXXXXXXXLXVXXPYRXLXXXXXXXXXXXXXXXXXXXXXXXXXXXXXXXXXXXXXXXXXXXXXXXXXXXXXXXXXXXXXXXXXXXXXXXXXXXXXXXXXXXXXXXXXXXXXXWXXXNDXXXXDXXLXXPPXXIAXXXXXXXXXXXXXXXXXXXXXXXXXXXXXXXXXXXXXXXXXXXXXXXXXXXXXXXXXXXXXXXXXXXXXXXXXXXXXXXXXXXXXXXXXXXXXXXXXXXXXXXXXXXXXXXXXXXXXXXXXXXXXVXXXXXXXXXXXXXXXY

SEQ ID NO: 2642 - protein, 30 aa, Artificial sequence
  protein pattern
  Variant (2)..(2): Xaa in position 2 is any amino acid
  Variant (3)..(3): Xaa in position 3 is Ile, Leu, Met or Val
  Variant (4)..(4): Xaa in position 4 is Ile, Leu or Val
  Variant (7)..(10): Xaa in position 7 to 10 is any amino acid
  Variant (12)..(12): Xaa in position 12 is Ala, Leu or Val
  Variant (13)..(13): Xaa in position 13 is any amino acid
  Variant (15)..(16): Xaa in position 15 to 16 is any amino acid
  Variant (17)..(17): Xaa in position 17 is Ala, Pro or Ser
  Variant (19)..(19): Xaa in position 19 is any amino acid
  Variant (20)..(20): Xaa in position 20 is any or no amino acid
  Variant (22)..(22): Xaa in position 22 is any or no amino acid
  Variant (24)..(24): Xaa in position 24 is Ile, Leu, Met or Val
  Variant (25)..(25): Xaa in position 25 is any amino acid
  Variant (26)..(26): Xaa in position 26 is Ala, Cys or Thr
  Variant (27)..(27): Xaa in position 27 is Ile or Leu
  Variant (28)..(29): Xaa in position 28 to 29 is any amino acid
  Variant (30)..(30): Xaa in position 30 is Ala, Thr or Val
WXXXNDXXXXDXXLXXXPXXIXAXXXXXXX

SEQ ID NO: 2643 - protein, 24 aa, Artificial sequence
  protein pattern
  Variant (2)..(2): Xaa in position 2 is any amino acid
  Variant (5)..(7): Xaa in position 5 to 7 is any amino acid
  Variant (8)..(8): Xaa in position 8 is any or no amino acid
  Variant (10)..(13): Xaa in position 10 to 13 is any amino acid
  Variant (14)..(14): Xaa in position 14 is any or no amino acid
  Variant (16)..(16): Xaa in position 16 is Ile or Val
  Variant (17)..(17): Xaa in position 17 is Ile, Leu or Val
  Variant (18)..(18): Xaa in position 18 is Phe, His or Tyr
  Variant (19)..(19): Xaa in position 19 is any amino acid
  Variant (22)..(22): Xaa in position 22 is any amino acid
  Variant (23)..(23): Xaa in position 23 is Ala, Pro, Ser or Thr
  Variant (24)..(24): Xaa in position 24 is Ile, Leu, Met or Val
EXEFXXXXEXXXXXLXXXXPYXXX

SEQ ID NO: 2644 - protein, 25 aa, Artificial sequence
  protein pattern
  Variant (2)..(2): Xaa in position 2 is any amino acid
  Variant (3)..(3): Xaa in position 3 is any or no amino acid
  Variant (5)..(5): Xaa in position 5 is Ala or Gly
  Variant (6)..(6): Xaa in position 6 is any amino acid
  Variant (7)..(7): Xaa in position 7 is Asn, Gln or Arg
  Variant (8)..(8): Xaa in position 8 is Leu, Met or Val
  Variant (9)..(10): Xaa in position 9 to 10 is any amino acid
  Variant (13)..(14): Xaa in position 13 to 14 is any amino acid
  Variant (15)..(15): Xaa in position 15 is Ile, Leu, Met or Val
  Variant (19)..(20): Xaa in position 19 to 20 is any amino acid
  Variant (22)..(22): Xaa in position 22 is Phe, Ile, Leu or Met
  Variant (23)..(23): Xaa in position 23 is any amino acid
  Variant (25)..(25): Xaa in position 25 is Phe or Val
IXXLXXXXXXRQXXXATAXXYXXRX

SEQ ID NO: 2645 - DNA, 969 bp, Saccharomyces cerevisiae
  CDS (1)..(969)
atgtctatggagcctcctgtggggcttacggctatgcccgtcaccaagctagccatgatcacgacgcttgtggttcccttagttgcctcgattgcaagttacaaacatatatttctattgcaatatgatccttttctgcagacctaccatcaatactaccgtctgctcatattccagttctgcgccatcaatgaatccgatacagtaatactggcgttgatatggtatctgtttaggcatttagaacggctactaggatcccacaagtacttgaccttgattgttttgtcatgggcctacaccaccttaggaatttggggattgaatctgatctggaacgcatttattggacagtacaagtggcttcaatggaacaattttagtacaggttcactgcccattgttttaagcttagtacatttttacaaagaatacacccctcagatttacgaatggaatataagattactaggacctcgaggaggagcatcaagtcacaatgataacaagcgagaagacaagagcgccgtagagtggaaaatcaacgatcagtttcttttaaatgggttaattctcctgcttatattaaatcaggggtttgcaggaatactatgcggattcataagctggatgtgtggtattttcatcgataagggcctgttaccgggattagaccattggagaataccgtttgtatcctatttcatctctcaaggcccacccacgagggctaacgttgctatagcggccaatgcggccacgaatacagcagcagcaagagccactgtagaagcagctactgctgctacaggaaatggaaatacaggcaactctgggcctacaagcctaccgcttcgtggttcaagcaccacccctacaaatacctctagcgctggtgatgacgagcctggtgccgatgaacctgcaagaccactgggagtccaatttttggatacctttaggagatga

SEQ ID NO: 2646 - protein, 322 aa, Saccharomyces cerevisiae
MSMEPPVGLTAMPVTKLAMITTLVVPLVASIASYKHIFLLQYDPFLQTYHQYYRLLIFQFCAINESDTVILALIWYLFRHLERLLGSHKYLTLIVLSWAYTTLGIWGLNLIWNAFIGQYKWLQWNNFSTGSLPIVLSLVHFYKEYTPQIYEWNIRLLGPRGGASSHNDNKREDKSAVEWKINDQFLLNGLILLLILNQGFAGILCGFISWMCGIFIDKGLLPGLDHWRIPFVSYFISQGPPTRANVAIAANAATNTAAARATVEAATAATGNGNTGNSGPTSLPLRGSSTTPTNTSSAGDDEPGADEPARPLGVQFLDTFRR

SEQ ID NO: 2647 - DNA, 912 bp, Candida glabrata CBS 138
  CDS (1)..(912)
atgtcgctggagactcctgttggactgagacggtttcccgtcacgaagctgtgtatggttactggtatagttgtgcctgtggtggcggcgcttacggagacgaagtatgtgtttaaggcgacctacgatccgtttatcaaagagtatgggcagtactaccggtacctgacgtaccagctcagcagtgtcaatgagacagatgtggcgctgatagtgttgctgttctaccagtatcggcagctagagaggttatttgggaacgagaagtatctgagcatgctggccatgttgatcttctaccaagggttagccacagtttccgtgcacctactgtttaacaacttggtggggccctggcttgggacgcagtggaatgagctcgcgagtggtgcgtttggagtggtgataggactgttccatttctacaagcagtatacgcctatcgtttatgagtttgacattgtgctgggtgcgccattgtggtcgcagttgttccacaagggcgtgatacgaaggtttgataacgagaacaagagtatgaaagtgcggttgaatgaccagttcatggtgaatgtgctagtgataatactgatatgcaaccagggggcctgggggcccttacaagcgcttgtggcgtggttatcggggctgttcctggatatcgggatcttgcccggcctggacaagtggagagtgccctttgcgcactacatgttgtttggagaggtcaaaagactggaagtgggcagcacgagcgctaacacgagtgcatcactgggcgggaacagcgtcacgcagctggcaaacaactctgcgtcgtcgcaacttgaagaggacaatgagaacgacgagcccaacgacgagcccgccaggccacttggtgtgcaattcctagacgcattcagacgttag

SEQ ID NO: 2648 - protein, 303 aa, Candida glabrata CBS 138
MSLETPVGLRRFPVTKLCMVTGIVVPVVAALTETKYVFKATYDPFIKEYGQYYRYLTYQLSSVNETDVALIVLLFYQYRQLERLFGNEKYLSMLAMLIFYQGLATVSVHLLFNNLVGPWLGTQWNELASGAFGVVIGLFHFYKQYTPIVYEFDIVLGAPLWSQLFHKGVIRRFDNENKSMKVRLNDQFMVNVLVIILICNQGAWGPLQALVAWLSGLFLDIGILPGLDKWRVPFAHYMLFGEVKRLEVGSTSANTSASLGGNSVTQLANNSASSQLEEDNENDEPNDEPARPLGVQFLDAFRR

SEQ ID NO: 2649 - DNA, 837 bp, Kluyveromyces lactis NRRL Y-1140
  CDS (1)..(837)
atgccgtcaacaaatagtgtaggtgtggaaataccaactggattggttcaattcccaataacaaagatactgatgatttgttgtgtaggggttgccctaacagcatcattattcaatatgaagtatctgttccttttacaatatgacccatttatcgttgaatatggacaatattggaggtattttacgtttcagttagggagtttaaatgaaagcgatgttgccataatgaccttgatttggtatcagtttagatcgttagagaggctatttggatcaaggaagtaccttaatatcgtgatattatcatgggcttatacaacagtggtaatatttttgatttcgaatctacttaacaagcttttgcctggaatttggtgggatcaatacacaaatggcccactaccagtaatattgtgtttgactcatttctacaaacagtatacaccaaggttatacgaattcaatataataatcaaccaaccttttcttcttcattctaacacgatcgtttggaagctgacagatcaatttttcatccatggcctgttattccttgccatggtaaatcaaggcgcaacagggttggtaatcggactaataagttggatttgtgctatcttgatggataatgggctactaccaggtactgactccttccaattggcgcctttcaaagacagctggaacagaagttctagcacattaaacagaccaagcgcagttatgacaaacgatatgacatcggaagatctaaatgaggaagaggccgaagaacctcaagatgaacctcagcgcactttaggggtccagttcttggatacttttagaaggtga

SEQ ID NO: 2650 - protein, 278 aa, Kluyveromyces lactis NRRL Y-1140
MPSTNSVGVEIPTGLVQFPITKILMICCVGVALTASLFNMKYLFLLQYDPFIVEYGQYWRYFTFQLGSLNESDVAIMTLIWYQFRSLERLFGSRKYLNIVILSWAYTTVVIFLISNLLNKLLPGIWWDQYTNGPLPVILCLTHFYKQYTPRLYEFNIIINQPFLLHSNTIVWKLTDQFFIHGLLFLAMVNQGATGLVIGLISWICAILMDNGLLPGTDSFQLAPFKDSWNRSSSTLNRPSAVMTNDMTSEDLNEEEAEEPQDEPQRTLGVQFLDTFRR

SEQ ID NO: 2651 - DNA, 987 bp, Debaryomyces hansenii CBS767
  CDS (1)..(987)
atggcccaattaacaccgataagagggtttaataataccccagtatccaagacaatatgtatagtcagcacgttggtggcattggggctttctatattccagatgaaacattatgttcggttatcgatagatccatatatattggagtatgcgcagtactggagggtgctaacttatgagatgtcggtgatcaatgagtctgattacatgttgtgtgtgctactctggttccagtacaagaacttggagaggttctatgggtcgcggaaatacgtgtcgttgatagtggtgtttgcgttgtacaattcgatagtgtgttttcttatcatgaatttggggcaattgggggtgaattttgtggtgtacttagtatcgttaattgctagtgggggaaagggggatattgaatataatacaaccgtgttcaaccaggtggcactgggcccattgggcattttgtcgtcgttctacatttgctatggggcaaatatacctacgtcgtataagtttaaaatattgttatcgaagcctacgttactggacgatggggaggtacatccatctaattcaagcaaggaactagttcttacgaaccatttccagatccatattatttatacgttattgcttctcaataatggattgggatcaataataccgtgtttggtaggtatagtcatagggaaattgtattcaaacgagttacttccgggtgccaagaactggctaattcccgtacgtgtctttgaggcattcatgcatcctcgcaagtttggaagcagcttattatcatccaccaggggaatacgcagtggtggctaccagaccatcaacaatgctaacgctaatgcaaatgagctgattgccgatgaggatgcagaggaagttctagatgaaggcaggagcaataaccgtgcccatgaaatcagagcagaaacccctgttaggccattgggcagccagttcttggacacattcagaacgtga

SEQ ID NO: 2652 - protein, 328 aa, Debaryomyces hansenii CBS767
MAQLTPIRGFNNTPVSKTICIVSTLVALGLSIFQMKHYVRLSIDPYILEYAQYWRVLTYEMSVINESDYMLCVLLWFQYKNLERFYGSRKYVSLIVVFALYNSIVCFLIMNLGQLGVNFVVYLVSLIASGGKGDIEYNTTVFNQVALGPLGILSSFYICYGANIPTSYKFKILLSKPTLLDDGEVHPSNSSKELVLTNHFQIHIIYTLLLLNNGLGSIIPCLVGIVIGKLYSNELLPGAKNWLIPVRVFEAFMHPRKFGSSLLSSTRGIRSGGYQTINNANANANELIADEDAEEVLDEGRSNNRAHEIRAETPVRPLGSQFLDTFRT

SEQ ID NO: 2653 - DNA, 1002 bp, Candida albicans SC5314
  CDS (1)..(1002): transl_table=12
atggctcaactaactcctatacgagggtttaccaacactcctgtaacacgatcgatatgtatgatatcgactgttgtgccgataatgctatcggtgttggctataaaatatgttgtcaagtttgctatcgatccttacatcattcaatacaaccaattctggagagtggtgacttaccaattatcagtagtcaatgaatcagactacttgattacagtattattatggtttcagttcaaagttttagagagattctacggatcacggaagtatttaagtattataacattgttcactgtttataatgcggttgcatgcctatttatcatgagtttagggcaattattgctttattacatattatttgttatcaaggttttcattatggggtatgatcaaggtagcattcattataatgtaacttttttaaatgagataataccaggaccattgggtatactttcgtctttgtatgtgtgttacggagcaaacatcccggtatcatactatttcaagatattattgaaggatccaagaaatgcagatcaacctgagacaagctctccaagtaaggaattaaatttgaccaatctttttcctatacacatattatacactattttgatactaaacaacgggttgcgttcaataattccatgtctagttggtttattgattggaaagttgtatgtttacgaattgctccctggtggatcatcgtggttgttatcaaatacagtattccggttgtttataaacccagttaaaagagcaggcgtatggctagaggctgtaaggagaagactttctatcagatacgaaagattgagcagtggcgactcgcaagaagcacttgaagaagaagaacttaatgaaaacaacgacgagcctgatgataatgatgaaattttggatgagacaagacaacaagagaaccaaatcagagcagaaactccggttcgacctttgggtagtcaatttctcgacaccttcagaacgtaa

SEQ ID NO: 2654 - protein, 333 aa, Candida albicans SC5314
MAQLTPIRGFTNTPVTRSICMISTVVPIMLSVLAIKYVVKFAIDPYIIQYNQFWRVVTYQLSVVNESDYLITVLLWFQFKVLERFYGSRKYLSIITLFTVYNAVACLFIMSLGQLLLYYILFVIKVFIMGYDQGSIHYNVTFLNEIIPGPLGILSSLYVCYGANIPVSYYFKILLKDPRNADQPETSSPSKELNLTNLFPIHILYTILILNNGLRSIIPCLVGLLIGKLYVYELLPGGSSWLLSNTVFRLFINPVKRAGVWLEAVRRRLSIRYERLSSGDSQEALEEEELNENNDEPDDNDEILDETRQQENQIRAETPVRPLGSQFLDTFRT

SEQ ID NO: 2655 - DNA, 22 bp, Artificial sequence
  primer
atgtctatggagcctcctgtgg

SEQ ID NO: 2656 - DNA, 26 bp, Artificial sequence
  primer
tcatctcctaaaggtatccaaaaatt

SEQ ID NO: 2657 - protein, 335 aa, Artificial sequence
  consensus sequence
  Variant (2)..(5): Xaa in position 2 to 5 is any amino acid
  Variant (10)..(17): Xaa in position 10 to 17 is any amino acid
  Variant (19)..(22): Xaa in position 19 to 22 is any amino acid
  Variant (24)..(27): Xaa in position 24 to 27 is any amino acid
  Variant (29)..(35): Xaa in position 29 to 35 is any amino acid
  Variant (38)..(38): Xaa in position 38 is any amino acid
  Variant (40)..(41): Xaa in position 40 to 41 is any amino acid
  Variant (43)..(43): Xaa in position 43 is any amino acid
  Variant (46)..(46): Xaa in position 46 is any amino acid
  Variant (48)..(49): Xaa in position 48 to 49 is any amino acid
  Variant (51)..(51): Xaa in position 51 is any amino acid
  Variant (53)..(56): Xaa in position 53 to 56 is any amino acid
  Variant (61)..(65): Xaa in position 61 to 65 is any amino acid
  Variant (67)..(67): Xaa in position 67 is any amino acid
  Variant (69)..(69): Xaa in position 69 is any amino acid
  Variant (71)..(73): Xaa in position 71 to 73 is any amino acid
  Variant (77)..(78): Xaa in position 77 to 78 is any amino acid
  Variant (81)..(81): Xaa in position 81 is any amino acid
  Variant (85)..(92): Xaa in position 85 to 92 is any amino acid
  Variant (94)..(103): Xaa in position 94 to 103 is any amino acid
  Variant (105)..(114): Xaa in position 105 to 114 is any amino acid
  Variant (115)..(135): Xaa in position 115 to 135 is any or no amino acid
  Variant (137)..(140): Xaa in position 137 to 140 is any amino acid
  Variant (142)..(142): Xaa in position 142 is any amino acid
  Variant (144)..(148): Xaa in position 144 to 148 is any amino acid
  Variant (150)..(152): Xaa in position 150 to 152 is any amino acid
  Variant (154)..(157): Xaa in position 154 to 157 is any amino acid
  Variant (159)..(160): Xaa in position 159 to 160 is any amino acid
  Variant (162)..(162): Xaa in position 162 is any amino acid
  Variant (164)..(164): Xaa in position 164 is any amino acid
  Variant (166)..(166): Xaa in position 166 is any amino acid
  Variant (168)..(169): Xaa in position 168 to 169 is any amino acid
  Variant (171)..(181): Xaa in position 171 to 181 is any amino acid
  Variant (182)..(194): Xaa in position 182 to 194 is any or no amino acid
  Variant (196)..(198): Xaa in position 196 to 198 is any amino acid
  Variant (200)..(203): Xaa in position 200 to 203 is any amino acid
  Variant (205)..(207): Xaa in position 205 to 207 is any amino acid
  Variant (209)..(210): Xaa in position 209 to 210 is any amino acid
  Variant (212)..(212): Xaa in position 212 is any amino acid
  Variant (214)..(220): Xaa in position 214 to 220 is any amino acid
  Variant (222)..(226): Xaa in position 222 to 226 is any amino acid
  Variant (228)..(233): Xaa in position 228 to 233 is any amino acid
  Variant (238)..(240): Xaa in position 238 to 240 is any amino acid
  Variant (242)..(279): Xaa in position 242 to 279 is any amino acid
  Variant (280)..(315): Xaa in position 280 to 315 is any or no amino acid
  Variant (317)..(320): Xaa in position 317 to 320 is any amino acid
  Variant (321)..(321): Xaa in position 321 is any or no amino acid
  Variant (323)..(323): Xaa in position 323 is any amino acid
  Variant (328)..(328): Xaa in position 328 is any amino acid
GXXXXPVTKXXXXXXXXVXXXXSXXXXKXXXXXXXDPXIXXYXQYXRXXTXQXXXXNESDXXXXXLXWXQXXXLERXXGSXKYLXXXXXXXXYXXXXXXXXXXLXXXXXXXXXXXXXXXXXXXXXXXXXXXXXXXNXXXXGXLXXXXXLXXXYXXXXPXXYXFXIXLXXPXXXXXXXXXXXXXXXXXXXXXXXXLXXXFXXXXLXXXLXXNXGXXXXXXXLXXXXXGXXXXXXLLPGXXXWXXXXXXXXXXXXXXXXXXXXXXXXXXXXXXXXXXXXXXXXXXXXXXXXXXXXXXXXXXXXXXXXXXXXXXXXXXEXXXXXPXRPLGXQFLDTFR

SEQ ID NO: 2658 - protein, 21 aa, Artificial sequence
  protein pattern
  Variant (2)..(2): Xaa in position 2 is Asp or Glu
  Variant (3)..(3): Xaa in position 3 is Glu or Thr
  Variant (5)..(5): Xaa in position 5 is any amino acid
  Variant (6)..(9): Xaa in position 6 to 9 is any or no amino acid
  Variant (11)..(11): Xaa in position 11 is Pro or Thr
  Variant (14)..(14): Xaa in position 14 is Ser or Val
AXXPXXXXXRXLGXQFLDTFR

SEQ ID NO: 2659 - protein, 35 aa, Artificial sequence
  protein pattern
  Variant (2)..(2): Xaa in position 2 is Glu, Asn or Gln
  Variant (3)..(3): Xaa in position 3 is Phe, Ile, Leu or Val
  Variant (4)..(5): Xaa in position 4 to 5 is any amino acid
  Variant (7)..(7): Xaa in position 7 is Ala, Pro or Ser
  Variant (8)..(8): Xaa in position 8 is Phe or Leu
  Variant (9)..(9): Xaa in position 9 is Gly or Pro
  Variant (10)..(10): Xaa in position 10 is Ile or Val
  Variant (11)..(11): Xaa in position 11 is Leu or Val
  Variant (12)..(12): Xaa in position 12 is any amino acid
  Variant (13)..(13): Xaa in position 13 is Gly or Ser
  Variant (14)..(14): Xaa in position 14 is Phe or Leu
  Variant (15)..(17): Xaa in position 15 to 17 is any amino acid
  Variant (19)..(19): Xaa in position 19 is any amino acid
  Variant (20)..(20): Xaa in position 20 is Ala, Glu or Gln
  Variant (21)..(22): Xaa in position 21 to 22 is any amino acid
  Variant (24)..(25): Xaa in position 24 to 25 is any amino acid
  Variant (27)..(27): Xaa in position 27 is any amino acid
  Variant (28)..(28): Xaa in position 28 is Phe or Trp
  Variant (29)..(29): Xaa in position 29 is any amino acid
  Variant (31)..(31): Xaa in position 31 is any amino acid
  Variant (33)..(34): Xaa in position 33 to 34 is any amino acid
NXXXXGXXXXXXXXXXXYXXXXPXXYXXXIXLXXP

SEQ ID NO: 2660 - protein, 15 aa, Artificial sequence
  protein pattern
  Variant (2)..(2): Xaa in position 2 is any amino acid
  Variant (3)..(3): Xaa in position 3 is Phe or Leu
  Variant (4)..(4): Xaa in position 4 is any amino acid
  Variant (5)..(5): Xaa in position 5 is Asp, Ser or Val
  Variant (6)..(6): Xaa in position 6 is any amino acid
  Variant (7)..(7): Xaa in position 7 is Glu or Gly
  Variant (8)..(8): Xaa in position 8 is Ile or Leu
  Variant (12)..(12): Xaa in position 12 is Ala, Gly or Leu
  Variant (13)..(14): Xaa in position 13 to 14 is any amino acid
GXXXXXXXLPGXXXW

SEQ ID NO: 2661 - DNA, 4515 bp, SACCHAROMYCES CEREVISIAE
  CDS (1)..(4515)
atgtcgagggagtcgaacgacacaatacagagcgatacggttagatcatcctctaaatcagactattttagaatccagctaaataatcaagactactatatgtcaaaacccacctttttggacccatcgcacggtgaaagcctgcccttaaaccagttttcacaggtcccaaacatcagggtgtttggtgctttacccacagggcatcaagtattgtgccacgtccatggcattctaccttacatgttcatcaagtatgatggacaaataactgacacgagtacattgagacaccaaagatgtgcccaagttcataaaacgctggaagtaaaaattagggcatcctttaaaaggaaaaaagatgataaacacgatttagccggcgacaaacttggaaatctcaattttgtcgctgatgtctctgttgtaaagggtataccattttatggttaccacgttggctggaatctgttttacaaaatttctttgcttaatccttcttgtctaagtaggatttcggaattgattagagatggcaagattttcggaaagaaattcgaaatttatgaatcacatattccttacttgctacaatggaccgcagattttaacttatttggatgttcatggataaacgtggataggtgttattttcgctctcctgttttaaatagtatactggacatagataagctgacaattaatgatgatcttcagttgttactagatcgattttgtgacttcaagtgtaacgtactcagtagaagggattttccacgggttggaaatggattgattgagatagatatactaccgcaattcatcaaaaatagagaaaagttacagcatagagatatacatcacgactttttggaaaaactgggagatatttctgacatacctgtcaaaccatatgtatcctctgctagggacatgataaatgaacttaccatgcaacgagaggagttgtccttgaaggaatataaagaaccaccagaaacaaagcgccatgtgagtggtcatcaatggcaatcttctggagagttcgaagcgttttataagaaagcacaacataaaacaagtacttttgatggtcaaataccaaattttgagaactttatagataagaatcaaaaattctcagccataaatacgccctatgaagcattaccgcaattgtggccaaggcttccacagattgaaataaacaataatagtatgcaagataaaaagaacgacgaccaagttaatgcatcgttcaccgaatacgagatatgtggtgttgataatgagaacgaaggtgtaaaaggaagcaatataaagtctcggtcttattcatggttaccggaaagcattgcgtctccgaaagattctactatactattagatcatcaaacaaaatatcacaatacgataaatttttcaatggattgtgctatgacgcaaaatatggcaagtaaacgaaaacttagatcatctgtttctgctaataaaacatcgttgctgtctcggaaaagaaagaaggttatggctgcgggattacgctatggaaaaagagcctttgtttatggtgagcctcctttcggttatcaagatattctgaataaattggaagacgagggattcccaaaaatagactataaggaccctttcttttcgaatccagttgatctagaaaataaaccttacgcgtacgcaggtaagaggtttgaaataagctcgacacatgtatcaacgagaatacccgtccaatttgggggagagaccgtatcagtttataacaagccaactttcgacatgttttcctcctggaaatatgcgttaaaaccacctacgtatgatgctgttcaaaaatggtacaataaagtaccctcgatgggaaacaaaaaaactgagtctcagataagcatgcacacccctcatagtaagtttttatacaaatttgctagtgacgtttctggaaaacaaaaaagaaaaaaaagtagcgttcacgattctcttactcatctgacacttgagattcatgcaaacacgagaagtgataaaattccagaccctgcaatagatgaagtttccatgattatatggtgtcttgaagaagaaactttccctttagatttggatatcgcttacgaagggattatgatagtccacaaagcttctgaggatagtacatttcctactaaaattcaacattgtattaacgaaattcccgtgatgttctatgaaagtgaatttgaaatgtttgaggctctaactgatttggtattacttcttgatcctgatattctttccggtttcgaaatacataatttttcgtggggttatataattgaaaggtgtcaaaaaatacatcaatttgacattgtcagggaacttgccagagtcaaatgccaaattaagacgaagttgtcagatacttggggatatgcccattcctcaggaattatgattaccggaagacatatgattaatatatggagagcgttgaggtccgacgtaaatttaacgcaatatactattgaaagtgctgcgttcaatatcctccataaacgattacctcacttttcatttgagtcattaactaatatgtggaacgctaaaaagagcacaaccgaattaaagactgtgttaaattattggttatcaagagctcagataaatatacaactattaagaaagcaggattacattgctcgaaatatcgaacaggcaagattgataggaatagatttccattctgtatattacagaggatcacaatttaaagttgagtcttttttaatccgaatatgcaagtccgaaagttttatccttctttctccaggcaaaaaggatgttcgtaagcaaaaagcacttgaatgtgtgcctttggttatggagccagaatctgctttctacaaaagtcctttaattgtgctggatttccaatcattgtatccatccattatgattggatacaactattgctattcgactatgataggaagagtgcgagaaataaacttaacggaaaataaccttggagtatctaagttttcattaccaagaaacattttagctttattaaaaaatgatgtaactatcgctccaaatggtgttgtttatgccaagacctctgttagaaaatcaacgttatccaaaatgttaacagatatccttgatgtcagagtgatgataaagaaaacaatgaacgaaataggtgatgacaacactaccctaaaaaggcttttgaataacaaacagttagcactaaaattattggcgaatgtcacctacggttatacatcagcttcattttctggacgaatgccatgctctgatttagctgatagcattgtacaaacaggcagagaaacattggagaaagcaatagatattattgagaaagatgaaacttggaacgccaaagttgtctatggagacacagatagtttatttgtatatctacctggaaaaactgctattgaggctttttctataggacatgctatggcagaaagagttactcaaaacaatccaaaaccaatctttttgaagtttgaaaaagtataccatccctccatattaattagcaaaaaaaggtacgtaggattttcctatgaaagtccttcgcagacccttcctatttttgatgctaagggtattgaaactgttagaagggatggtatcccagcccagcagaagattattgaaaaatgtattcgattactttttcaaaccaaagacctgtcaaaaataaaaaagtatcttcaaaatgaattttttaagattcaaataggaaaggtatctgcccaagatttttgttttgcaaaagaagttaaattaggagcgtataaaagcgaaaagacagcccctgcaggtgccgtggttgtaaaaagaagaataaatgaagaccatagagcagaaccccaatacaaggagcgtataccttaccttgttgttaaaggaaagcaaggacaactgcttcgggaaagatgcgtatcaccagaagagttcttagaaggtgagaatttagagttagattcggagtattatataaacaaaattctgatacctcctcttgatagattgttcaatttgattggtataaatgttggcaactgggctcaggaaatagtaaaatccaaaagggcgagcacaactactacaaaagtggaaaacataacaagagtaggaacttctgcaacatgttgtaattgtggtgaagaattgactaaaatatgttcacttcagttatgtgatgactgtttagagaaaagaagcaccacaaccttatcatttctcataaagaaattaaagagacaaaaagaataccaaacactaaagaccgtgtgcaggacgtgcagttatcgttacacttccgatgcaggcatcgaaaatgaccatatagctagtaaatgcaattcatatgactgtccagtattttactctcgtgtcaaagcagaaagatacttgagagataatcaatctgttcaaagggaagaagcattaatatctctaaatgattggtaa

SEQ ID NO: 2662 - protein, 1504 aa, SACCHAROMYCES CEREVISIAE
MSRESNDTIQSDTVRSSSKSDYFRIQLNNQDYYMSKPTFLDPSHGESLPLNQFSQVPNIRVFGALPTGHQVLCHVHGILPYMFIKYDGQITDTSTLRHQRCAQVHKTLEVKIRASFKRKKDDKHDLAGDKLGNLNFVADVSVVKGIPFYGYHVGWNLFYKISLLNPSCLSRISELIRDGKIFGKKFEIYESHIPYLLQWTADFNLFGCSWINVDRCYFRSPVLNSILDIDKLTINDDLQLLLDRFCDFKCNVLSRRDFPRVGNGLIEIDILPQFIKNREKLQHRDIHHDFLEKLGDISDIPVKPYVSSARDMINELTMQREELSLKEYKEPPETKRHVSGHQWQSSGEFEAFYKKAQHKTSTFDGQIPNFENFIDKNQKFSAINTPYEALPQLWPRLPQIEINNNSMQDKKNDDQVNASFTEYEICGVDNENEGVKGSNIKSRSYSWLPESIASPKDSTILLDHQTKYHNTINFSMDCAMTQNMASKRKLRSSVSANKTSLLSRKRKKVMAAGLRYGKRAFVYGEPPFGYQDILNKLEDEGFPKIDYKDPFFSNPVDLENKPYAYAGKRFEISSTHVSTRIPVQFGGETVSVYNKPTFDMFSSWKYALKPPTYDAVQKWYNKVPSMGNKKTESQISMHTPHSKFLYKFASDVSGKQKRKKSSVHDSLTHLTLEIHANTRSDKIPDPAIDEVSMIIWCLEEETFPLDLDIAYEGIMIVHKASEDSTFPTKIQHCINEIPVMFYESEFEMFEALTDLVLLLDPDILSGFEIHNFSWGYIIERCQKIHQFDIVRELARVKCQIKTKLSDTWGYAHSSGIMITGRHMINIWRALRSDVNLTQYTIESAAFNILHKRLPHFSFESLTNMWNAKKSTTELKTVLNYWLSRAQINIQLLRKQDYIARNIEQARLIGIDFHSVYYRGSQFKVESFLIRICKSESFILLSPGKKDVRKQKALECVPLVMEPESAFYKSPLIVLDFQSLYPSIMIGYNYCYSTMIGRVREINLTENNLGVSKFSLPRNILALLKNDVTIAPNGVVYAKTSVRKSTLSKMLTDILDVRVMIKKTMNEIGDDNTTLKRLLNNKQLALKLLANVTYGYTSASFSGRMPCSDLADSIVQTGRETLEKAIDIIEKDETWNAKVVYGDTDSLFVYLPGKTAIEAFSIGHAMAERVTQNNPKPIFLKFEKVYHPSILISKKRYVGFSYESPSQTLPIFDAKGIETVRRDGIPAQQKIIEKCIRLLFQTKDLSKIKKYLQNEFFKIQIGKVSAQDFCFAKEVKLGAYKSEKTAPAGAVVVKRRINEDHRAEPQYKERIPYLVVKGKQGQLLRERCVSPEEFLEGENLELDSEYYINKILIPPLDRLFNLIGINVGNWAQEIVKSKRASTTTTKVENITRVGTSATCCNCGEELTKICSLQLCDDCLEKRSTTTLSFLIKKLKRQKEYQTLKTVCRTCSYRYTSDAGIENDHIASKCNSYDCPVFYSRVKAERYLRDNQSVQREEALISLNDW

SEQ ID NO: 2663 - DNA, 5610 bp, DROSOPHILA
  CDS (1)..(5610)
atggcagccgcaggagaggcaatcgatggagtctactccgtccggctggtcatcgcggatttctatatggagaagccgcagttcggaatggatccgtgctattcggagctgcgcggcaaagaaatcaagcgggtgccagtgattcgagtgtttggcggcaactccagaggccagaagacctgcatgcatgtacacggagttttcccctatctatacattccgtatgacaagaaggattttgagtccctggagcggggcatcctgcagatggccatgcacctggacaaggccatcaacatatccttgggtcaaggcagctccaacgcccagcatgtgttcaaaattcagctggtcaagggcatacccttctatggctaccatcgagtggaacaccagttcctcaagatctacatgttcaatccccggttcgtacgccgcgccgccaaccttctccaaagcggcgccattctgagcaagaacttcagtccgcacgagtcgcatgtgccctacattctgcagtttatgatcgactacaatctgtacggtatgagctatgtgcatgtcccgctggagcaagcgcagcttctggacatcacaaccgctaagaaagtggcctgcagtgctttagaggtggatgtcagctcgaacttcatactgaatcggttccagctggtggcgaagagtaagagcaaccacactaaccccggcatcgaggccatctggaatgatgagaaattgcgccgacagaaacttgtcgagaagcacaccgatgctggcgatgaggagaaggctgaagcggtgccagtattggagttaccgccaacacaggagcggcatcaaattgaaatcgccgaaagcgatatcttctaccgcaccgctctggagagcaagctgatgacactggagcagtccacactgtccgagcaaacgttgtcggatcagacaatccttccccaagcaaccatgcagaccaccatgcccggcacaaaggcacagaaacgcaggtttaacttgcaaaaacttctagccaacgccgtttatccggaggaatgctcacaggatcagcagcaactgctggttaatgcttccttcatacaaaaccatgttacctgcggctacagcagcagtgtcagtttgtcaacctccaaggatgagtccgatgacttggacgaaactgtagtggatgaggaactaatactgagcctcacacagcctcatggagcgataccccatgatgccaccttgagggaggaggatttggaacttttggacgcgttgcagctgttggaggagcagaatgaaagtgaatcgcatgtggacttagacagttcgttggctccattgtcgcaacataaaaagttcgaacttacacccgaattgttggacaaggagaccgcagctactgctgctcttttcgacgaagatgttgactccgacgaggatgccgaccaagaaacccgacatgacttctctaccgtcctagacgatgtcgatgagttgttgcttaagttaacacaaagtcagcctgcggaatcgaaggaactgaaagcatctagtaaactgccccaaattgatggtgctgatgatcgcctacaaaggacccccattaaatcgatcagctctaagtcaaagtcaagtccttcaaagactccaacaacgccaataggtcagaaaagtcttcccaaatcgccacgtactccgaaaaccagtgcagccaagaaatatgcgccgctggctttgacaattggaagcagttcatcaaagaagagtccgcatcagcaggaaaactctgtttctgaacaaatcgaatatctcgaaagtaaaccaaaaaagtctgatgaaactgcacgaagctgtgacgaaaagttacaacgtgagctaattccacaggaaccagctggtatttcgcctggagattcagcaaactccacggaggagatcacatttagtccatgccatgatgaggctatcgaatccgacacggaaagcgattatatagtcaccaaacttcgtaaaacacccaacttgaaacgccttcgatggagcattcggtcggagttgctgaacaaacaatttactcccagttcaggcataagaccccctgagactgagaccactcctcagctaagtcccaaaagcaatgagagcaacacaccggagctgatgcgaagtttctatgagcattcgctgattgtgaacagtccgtcggtcttcagtgacttcttggatagccccgagatacatatggattctcctaggtctgctcctccatctcccgatagcaactcgttcgtgattgcccccttggagctgcctccatcctacgatgaagtggttagcggtagccgtaaaatggacatacccgagtacgagttccaaaagccatactacagcaatccctccgatgtgagcaaggtgacggaggtgggcttcctggtgctccacattccggggaacaagctaaatgactgtgatcccttccagagcatactgggcaatgatcgtggcctggcctcctggcgtcgtcggcaactgatagccattggtggcctggcaatgttgcagcgacatcggggagaacaaaaagtacgggagtatttcagcacgcaacaaagaatagcaatcgagccagcacaactagcacccacctggcaggaagccaagatctggttgaaagccaaggaactccttcgtcaacgagaggaaccaaaaaagtcctctgatgacatagacagccccatcaagatcaagcggcagaagatcactatgatgctgcaggctgaggaaggcgatggcggaagtggcgatgaagatgctggtgaggaactcgattgcagtctaagtctaacgcccttgtcccaagctaaggataaatgcaaggcaacccctaccagtagcaaagccagagaaacaggaaagagtcgccttaagcgcggaactaggctcagcttcataggaagccaggacgaggaaccaccaagctcgcagtccagcgaacagagcgtctccagtagtgcggcccaggcggagctagatcgtagttcctttctgcgccagttagagggcagtagccaggataggcagcacgacctcagctttggacttagccacgctaccttggacaacacgttcgggttcaaggttaatttggagaatctgcagcaggccaaagccgacattgattgcaaccacctgacaatcataacgttagaggtgtttgtgtccacgcgaggtgatctccaaccagatccgatgcacgacgagattcggtgtttgttttatgctatcgaacacagtttgccggatgaaaagctgcctagcaaagcctgcggctatataatggtgaacactgtccaggatttgctaagtgaaggaccttttcatggtatagatcgcgatattgaggtgcaagtagtgaccagtgaagcggaggcatttgaggcgttgctggctttgtgtgaacggtgggatgcggacatatacgcagggtacgaaatcgagatgtcctcttggggctatgtgattgatcgggccaagcatctgtgcttcaacatcgctcctctgctgtcccgagtgcccacacagaaggtccgggactttgtggacgaggatcgggagcagttcaccgatttggatgtggaaatgaagctctgcggccgcattctgctggacagatgtccctggcacactgccaaatccctcaccgaatggttcggctcaccctgcacccgctggatagtaatggaatattacttggagcgtgtgcgtggcaccttaactctcctggatcagctggacttactgggacggactagcgaaatggccaagctcattggcattcagttctacgaggtgctgtcgcgcggctcacagtttcgcgtggaaagcatgatgctgagaatcgccaagccaaagaacctggtgccactttcacccagcgtccaggctcgcgctcatatgagagctcccgagtacttggcgctaataatggaaccgcagtcacgattctatgccgatcccctaatcgtgcttgattttcagagcttgtaccccagcatgatcatcgcctacaactactgcttctccacgtgcttgggtagagtagagcacctgggtggaagttcgccctttgaatttggcgcgtcgcagctccgagtttcgcggcagatgctgcagaagttgctggagcacgatctggttactgtttcgccatgcggcgttgtgttcgtgaagcgtgaagtgcgcgagggcatcctgccgcgcatgctcaccgagatcttggacacgcgccaaatggtcaaacagtcgatgaagctccataaggacagctctgcacttcagcggatccttcactcacggcagctgggccttaagctgatggccaatgttacctatggctacaccgccgctaacttcagtggccgaatgccttcagtggaagtgggcgattctgtagtttccaaaggacgggagaccctggagcgtgctatcaaactagtggagaacaacgaggagtggaaggtgcgtgtcgtctatggcgacacggactccatgttcgttcttgtgccgggtcgaaatcgagctgaagcttttcgaatcggcgaggagatcgccaaggcggtcaccgaaatgaatccacagccagtgaagctaaaactggagaaggtctaccaaccttgcatgctgcagaccaagaagcgctacgtgggttacatgtatgagacagccgatcaggagcagcccgtttacgaggcgaagggaatagaaactgtgcggcgagatggttgtccggcggtggccaagatgctggaaaaggtgctgcgcatattgttcgagacgcaagacgtcagcaagatcaaggcgtacgtgtgccggcagttcaccaagctgctgtcgggcagggccaatctgcaggacctgattttcgccaaggagttcaggggtctcaatggctacaagcccacggcttgtgtgccagcactggagctcacgcgtaaatggatgcaaaaagacccacgacatgtgccgcgtcgtggcgaacgcgtccccttcataatagtcaacggcccgccgggcatgcagctaatccgcctggtgcgcagcccgcacgacatcctggccaacgagggtcacaagataaacgccatctactacattaccaaggcgattattccgccgctgaatcgctgcctgctgctcataggcgccaatgtgcacgactggtttgccagtctgccgaggaagttgctcatgacgccggccgttggaaccgccaacgaattggcgggtgcacgcggtgccaagtccaccatctcccagtatttctctaccaccagctgcgtgatcgactgtggccgccaaaccaaggcgggcatttgcccagactgcctgaaaaacgccaccacgtgcgtagttgtgctctcagataagacagcgcgtctggagaggggctaccaactaactcggcagatatgccaggcttgttgcggacgcctgggtagcctacagtgtgattccctcgactgcccagtgctgtatgtcttggagggaaagcgaagggaactccagcaaatcgagcactggaacaaactccttgaacaccacttctaa

SEQ ID NO: 2664 - protein, 1869 aa, DROSOPHILA
MAAAGEAIDGVYSVRLVIADFYMEKPQFGMDPCYSELRGKEIKRVPVIRVFGGNSRGQKTCMHVHGVFPYLYIPYDKKDFESLERGILQMAMHLDKAINISLGQGSSNAQHVFKIQLVKGIPFYGYHRVEHQFLKIYMFNPRFVRRAANLLQSGAILSKNFSPHESHVPYILQFMIDYNLYGMSYVHVPLEQAQLLDITTAKKVACSALEVDVSSNFILNRFQLVAKSKSNHTNPGIEAIWNDEKLRRQKLVEKHTDAGDEEKAEAVPVLELPPTQERHQIEIAESDIFYRTALESKLMTLEQSTLSEQTLSDQTILPQATMQTTMPGTKAQKRRFNLQKLLANAVYPEECSQDQQQLLVNASFIQNHVTCGYSSSVSLSTSKDESDDLDETVVDEELILSLTQPHGAIPHDATLREEDLELLDALQLLEEQNESESHVDLDSSLAPLSQHKKFELTPELLDKETAATAALFDEDVDSDEDADQETRHDFSTVLDDVDELLLKLTQSQPAESKELKASSKLPQIDGADDRLQRTPIKSISSKSKSSPSKTPTTPIGQKSLPKSPRTPKTSAAKKYAPLALTIGSSSSKKSPHQQENSVSEQIEYLESKPKKSDETARSCDEKLQRELIPQEPAGISPGDSANSTEEITFSPCHDEAIESDTESDYIVTKLRKTPNLKRLRWSIRSELLNKQFTPSSGIRPPETETTPQLSPKSNESNTPELMRSFYEHSLIVNSPSVFSDFLDSPEIHMDSPRSAPPSPDSNSFVIAPLELPPSYDEVVSGSRKMDIPEYEFQKPYYSNPSDVSKVTEVGFLVLHIPGNKLNDCDPFQSILGNDRGLASWRRRQLIAIGGLAMLQRHRGEQKVREYFSTQQRIAIEPAQLAPTWQEAKIWLKAKELLRQREEPKKSSDDIDSPIKIKRQKITMMLQAEEGDGGSGDEDAGEELDCSLSLTPLSQAKDKCKATPTSSKARETGKSRLKRGTRLSFIGSQDEEPPSSQSSEQSVSSSAAQAELDRSSFLRQLEGSSQDRQHDLSFGLSHATLDNTFGFKVNLENLQQAKADIDCNHLTIITLEVFVSTRGDLQPDPMHDEIRCLFYAIEHSLPDEKLPSKACGYIMVNTVQDLLSEGPFHGIDRDIEVQVVTSEAEAFEALLALCERWDADIYAGYEIEMSSWGYVIDRAKHLCFNIAPLLSRVPTQKVRDFVDEDREQFTDLDVEMKLCGRILLDRCPWHTAKSLTEWFGSPCTRWIVMEYYLERVRGTLTLLDQLDLLGRTSEMAKLIGIQFYEVLSRGSQFRVESMMLRIAKPKNLVPLSPSVQARAHMRAPEYLALIMEPQSRFYADPLIVLDFQSLYPSMIIAYNYCFSTCLGRVEHLGGSSPFEFGASQLRVSRQMLQKLLEHDLVTVSPCGVVFVKREVREGILPRMLTEILDTRQMVKQSMKLHKDSSALQRILHSRQLGLKLMANVTYGYTAANFSGRMPSVEVGDSVVSKGRETLERAIKLVENNEEWKVRVVYGDTDSMFVLVPGRNRAEAFRIGEEIAKAVTEMNPQPVKLKLEKVYQPCMLQTKKRYVGYMYETADQEQPVYEAKGIETVRRDGCPAVAKMLEKVLRILFETQDVSKIKAYVCRQFTKLLSGRANLQDLIFAKEFRGLNGYKPTACVPALELTRKWMQKDPRHVPRRGERVPFIIVNGPPGMQLIRLVRSPHDILANEGHKINAIYYITKAIIPPLNRCLLLIGANVHDWFASLPRKLLMTPAVGTANELAGARGAKSTISQYFSTTSCVIDCGRQTKAGICPDCLKNATTCVVVLSDKTARLERGYQLTRQICQACCGRLGSLQCDSLDCPVLYVLEGKRRELQQIEHWNKLLEHHF

SEQ ID NO: 2665 - DNA, 5673 bp, Arabidopsis thaliana
  CDS (1)..(5673)
atggctgattctcaatccggttccaatgttttcagtttacggatagtttcaatcgattattacatggcttctccaatccctggttataatatttgctacagtagcttccaaggtagtgaggtaaatgaagtccctgttataaggatatacggctctacacctgctggtcagaagacttgcttgcacattcatcgtgctttaccatatctctatattccgtgctcagaaattccacttgagcatcataaaggagtggatggaagtacacttgctttatcccttgagttagagaaggctctaaagcttaagggaaatgctgcttcaaaaaggcaacatatccatgattgtgagattgtaagagcaaagaagttttatgggtaccactcaacagaggaggcttttgtgaagatttatcttagctaccatccacccgatgtggctcgtgctgccagtcttcttctggcaggtgctgttcttggtaaaagtttgcagccttacgagtctcatattccctttattctccagtttctggttgattataatttgtatggaatgggtcatgtgcatatatcaaagatgaagttccgtagcccagtgcctcaccatttccggccaaggagatttgatttggatgattgtccgggacaaaggattgacgaagtggctattacaaaggcaaattcaagtgctgctgcaagcgtcagttttcctgtttggagcttgtcaacaatcccaggtcagtggatgtggaatctctctgaagaatctgatacaccgttgagccagagccagcataggcaccaacaccattacagacgtcagagtctctgtgaacttgagggagatgctactagtagtgatattctcaatcaacagtttaaaatgtacaactccctttcacaagcccagtctgatactaacatggttcagtcgcttgtggcaatttgggaggaggagtatgaaaggactggtgtgcatgatgcacctatacctcctgatcctggtaaaccctctgcagctgatgtgttgcagactatgtcagattatgttgggtttgggaatatgcttaaagaaatgctaaacaaagttgaattgtctccgcctggtatgaagcctactgcagtatcttcagctggtccagatatgcatgccaaacctgaaattactgatctacaggctttgaatcatatggttggtacatgcagtgagtttcctgcatcagaacagctttctccacttggcgagaagagtgaagaagcatcaatggaaaatgatgaatatatgaaaacacccacggacagagatacacctgctcaaatacaagatgctgaagccttgggtctctttaagtggtttgcctcatctcaggctgcagaggacataaactcagatgatgagattctccgggaaactatccttagtcctcttttgcctttagcgtctattaacaaggttcttgaaatggctagtacagattatgtgagccaatcccaaaaggaatgtcaagacattcttgattctcaggaaaatcttccagactttgggagttcgactaagagagctttacctagtaatcctgatagccagaatcttagaacttcatccgacaaacaatctcttgaaatagaagtcgctagtgatgttccagatagctccacttcaaatggagcaagcgaaaattcattccggagatacagaaagagtgatttacatacgagtgaagtaatggagtataagaacaggagcttctctaagagcaacaagcctagcaactcagtatggggacctttaccttttacactgaccaaaaatcttcagaaggactttgacagtacaaatgctagtgataaacttggtttaacaaagattagttcttaccccatgaatgagatgacagacaattatattgttccagtcaaagaacatcaagcagatgtttgtaatacaattgacagaaacgttttggctggatgttctctgcgggacttgatgagaaaaaaacggttatgccatggagaatcgcctgtttcacagcatatgaagtctaggaaggttagagattcccgacacggggaaaaaaatgagtgcaccttgagatgtgaggccaaaaaacaaggtcctgctctttctgcagaatttagcgaatttgtttgtggcgatactccaaatttatctcctatagattctggaaattgcgagtgtaatatatccactgagtcatctgaacttcattctgttgatagatgttcagctaaagagacagcaagtcaaaacagtgatgaagttttaaggaatttgtcatctaccactgttccatttggtaaggatccacaaactgtggaatcaggaacactagtgtctagcaatatacatgttgggattgaaatagatagtgtccaaaaatcggggagggagcaagagtcaactgccaatgaaactgatgagacgggaagattaatatgcctaaccttaagcaagaagcctccttctctcgattgcctaagtgctggactgcaggattctgcacattctcatgaaattcatgccagggaaaaacagcatgatgaatatgagggaaattccaacgacatcccgttttttcccttggaggacaacaaggaggaaaagaaacactttttccaaggaacttcccttggtattcccttgcatcatctcaatgacggctccaatctttacctactgacccctgccttttcacccccttctgtggattctgttttacaatggatatcgaatgacaaaggagactctaatattgattcagaaaaacaaccattacgagataatcataatgatcgtggagcaagtttcactgatcttgcttctgcatctaatgtggtgtctgtgtctgagcacgtggagcagcataataacctttttgtgaattcagaatcaaatgcttatacagagtcggagatagatctgaaacccaaaggaacgtttcttaatcttaacttgcaggccagtgtttcccaagagctgtctcagatttcaggccctgatgggaaatctgggcccactcccttaagtcaaatgggattccgagatcctgcgagcatgggtgcggggcaacagcttacaattctgagtatagaggttcatgcagagtctagaggggacctgcgacctgatccacgatttgattctgtcaatgttatagctctcgtcgtgcagaatgacgatagttttgtagctgaagtatttgtgcttttatttagtccagatagcattgatcagagaaatgttgatggcctatctggatgcaagttgtctgtattccttgaagagaggcaactattcagatattttattgagactttatgtaaatgggatccagatgttcttctgggctgggatatacagggcggatccattggttttctagctgaaagagctgcacagcttggtataagatttctcaataatatatctaggacgccatctccgaccacaacaaacaattcagataataagagaaaacttggtaataatctgctgccagatccgttggtagctaatcctgctcaagtagaagaagtggtaattgaggacgagtggggccgcacacatgctagtggtgttcatgttggaggtagaattgttctcaatgcatggcgtttgattcgcggggaagttaaactcaacatgtacacgattgaagctgtgtcagaggctgttttgaggcagaaggttccatcaatcccctataaggtattgacagaatggttttcaagtggtcctgcgggtgcaagatatagatgcatagaatatgtgattcggcgagcaaatttgaaccttgagataatgagccaacttgacatgataaatcgtacgtcagaacttgctcgtgtttttggtatagactttttctcagttctctcccgaggttcacagtacagagtggaatccatgcttctgagattagcacatacacaaaattatcttgctatttctccaggaaaccaacaggttgcctctcagccagctatggaatgtgtacctcttgtgatggaaccagaatctgccttttacgatgatcctgttattgtgttggattttcaatctctttacccttcaatgattatagcatataatctgtgcttttctacatgtctcggaaaacttgcacatttgaagatgaacacccttggggtcagctcatactctctagacctcgatgttcttcaggatttaaatcagatcctacagaccccaaacagtgtgatgtacgtgccaccagaggtgcgtagaggaattttacctaggctgctagaggagattctgtctacaagaataatggtgaaaaaagcaatgaaaaagttgactccttcagaagcagttcttcaccggatatttaatgcgaggcagcttgctttaaagctgatagcaaatgtgacttatggttatactgctgctggcttcagtggtcgaatgccttgtgcagagctggcagatagtattgtccagtgtggtcgtagcacacttgagaaggctatttcattcgtcaatgccaatgataattggaacgctagagttgtatatggtgacactgatagtatgtttgtcctcctaaaaggacgaactgtaaaagaagcttttgtagtcggacaagagattgcatctgcaataactgaaatgaacccacacccagtcactttaaagatggagaaagtctatcacccttgtttccttcttacgaagaagcgttatgttgggtacagttatgaaagtcccaatcagagagagcctatatttgatgcaaaaggtattgaaactgttcgaagagacacttgtgaagctgttgcgaaaactatggagcaatcgttgagactcttttttgaacagaagaacatctctaaggttaagtcgtacttgtatagacagtggaagcggatactatcagggagagtgtctcttcaagattttatctttgcaaaagaagttcggttgggtacttacagcacaagagactcttcactccttcctccagcagctattgtggcaaccaaatcaatgaaagcagaccctcggacagagccacgctatgctgaacgagtgccttatgttgtgattcatggggagccaggagctcgacttgttgatatggttgttgatccactggttcttttggacgtcgatacaccctaccgactgaatgacttatactacatcaacaaacaaattataccagctttgcaaagggtatttggactcgtgggtgcagacttaaaccagtggtttttggagatgccccgtctcaccagaagctcccttggtcaacgtcccttaaactctaaaaactcacacaaaacaaggattgattatttttatctatcgaaacattgcatcttgtgtggggaagttgttcaagaatctgctcaactatgcaaccggtgccttcaaaataaaagtgctgctgctgcaaccattgtttggaagacttcaaagttggagagagagatgcaacacctagccacgatatgcagacactgtggtgggggagactgggtggtgcaaagcggagtgaaatgcaattcccttgcgtgctcagtcttttacgagagacggaaagttcagaaagagcttcgtggcctctcctccattgctactgagagtgagctttaccctaaatgcatggctgagtggttctaa

SEQ ID NO: 2666 - protein, 1890 aa, Arabidopsis thaliana
MADSQSGSNVFSLRIVSIDYYMASPIPGYNICYSSFQGSEVNEVPVIRIYGSTPAGQKTCLHIHRALPYLYIPCSEIPLEHHKGVDGSTLALSLELEKALKLKGNAASKRQHIHDCEIVRAKKFYGYHSTEEAFVKIYLSYHPPDVARAASLLLAGAVLGKSLQPYESHIPFILQFLVDYNLYGMGHVHISKMKFRSPVPHHFRPRRFDLDDCPGQRIDEVAITKANSSAAASVSFPVWSLSTIPGQWMWNLSEESDTPLSQSQHRHQHHYRRQSLCELEGDATSSDILNQQFKMYNSLSQAQSDTNMVQSLVAIWEEEYERTGVHDAPIPPDPGKPSAADVLQTMSDYVGFGNMLKEMLNKVELSPPGMKPTAVSSAGPDMHAKPEITDLQALNHMVGTCSEFPASEQLSPLGEKSEEASMENDEYMKTPTDRDTPAQIQDAEALGLFKWFASSQAAEDINSDDEILRETILSPLLPLASINKVLEMASTDYVSQSQKECQDILDSQENLPDFGSSTKRALPSNPDSQNLRTSSDKQSLEIEVASDVPDSSTSNGASENSFRRYRKSDLHTSEVMEYKNRSFSKSNKPSNSVWGPLPFTLTKNLQKDFDSTNASDKLGLTKISSYPMNEMTDNYIVPVKEHQADVCNTIDRNVLAGCSLRDLMRKKRLCHGESPVSQHMKSRKVRDSRHGEKNECTLRCEAKKQGPALSAEFSEFVCGDTPNLSPIDSGNCECNISTESSELHSVDRCSAKETASQNSDEVLRNLSSTTVPFGKDPQTVESGTLVSSNIHVGIEIDSVQKSGREQESTANETDETGRLICLTLSKKPPSLDCLSAGLQDSAHSHEIHAREKQHDEYEGNSNDIPFFPLEDNKEEKKHFFQGTSLGIPLHHLNDGSNLYLLTPAFSPPSVDSVLQWISNDKGDSNIDSEKQPLRDNHNDRGASFTDLASASNVVSVSEHVEQHNNLFVNSESNAYTESEIDLKPKGTFLNLNLQASVSQELSQISGPDGKSGPTPLSQMGFRDPASMGAGQQLTILSIEVHAESRGDLRPDPRFDSVNVIALVVQNDDSFVAEVFVLLFSPDSIDQRNVDGLSGCKLSVFLEERQLFRYFIETLCKWDPDVLLGWDIQGGSIGFLAERAAQLGIRFLNNISRTPSPTTTNNSDNKRKLGNNLLPDPLVANPAQVEEVVIEDEWGRTHASGVHVGGRIVLNAWRLIRGEVKLNMYTIEAVSEAVLRQKVPSIPYKVLTEWFSSGPAGARYRCIEYVIRRANLNLEIMSQLDMINRTSELARVFGIDFFSVLSRGSQYRVESMLLRLAHTQNYLAISPGNQQVASQPAMECVPLVMEPESAFYDDPVIVLDFQSLYPSMIIAYNLCFSTCLGKLAHLKMNTLGVSSYSLDLDVLQDLNQILQTPNSVMYVPPEVRRGILPRLLEEILSTRIMVKKAMKKLTPSEAVLHRIFNARQLALKLIANVTYGYTAAGFSGRMPCAELADSIVQCGRSTLEKAISFVNANDNWNARVVYGDTDSMFVLLKGRTVKEAFVVGQEIASAITEMNPHPVTLKMEKVYHPCFLLTKKRYVGYSYESPNQREPIFDAKGIETVRRDTCEAVAKTMEQSLRLFFEQKNISKVKSYLYRQWKRILSGRVSLQDFIFAKEVRLGTYSTRDSSLLPPAAIVATKSMKADPRTEPRYAERVPYVVIHGEPGARLVDMVVDPLVLLDVDTPYRLNDLYYINKQIIPALQRVFGLVGADLNQWFLEMPRLTRSSLGQRPLNSKNSHKTRIDYFYLSKHCILCGEVVQESAQLCNRCLQNKSAAAATIVWKTSKLEREMQHLATICRHCGGGDWVVQSGVKCNSLACSVFYERRKVQKELRGLSSIATESELYPKCMAEWF

SEQ ID NO: 2667 - DNA, 6393 bp, Drosophila melanogaster
  CDS (1)..(6393)
atggcagccgcaggagaggcaatcgatggagtctactccgtccggctggtcatcgcggatttctatatggagaagccgcagttcggaatggatccgtgctattcggagctgcgcggcaaagaaatcaagcgggtgccagtgattcgagtgtttggcggcaactccagaggccagaagacctgcatgcatgtacacggagttttcccctatctatacattccgtatgacaagaaggattttgagtccctggagcggggcatcctgcagatggccatgcacctggacaaggccatcaacatatccttgggtcaaggcagctccaacgcccagcatgtgttcaaaattcagctggtcaagggcatacccttctatggctaccatcgagtggaacaccagttcctcaagatctacatgttcaatccccggttcgtacgccgcgccgccaaccttctccaaagcggcgccattctgagcaagaacttcagtccgcacgagtcgcatgtgccctacattctgcagtttatgatcgactacaatctgtacggtatgagctatgtgcatgtcccgctggaggttctcaagttccggcgcaaccatgacgatgacgtaatcccctatgcaaatgtcaagcaagcgcagcttctggacatcacaaccgctaagaaagtggcctgcagtgctttagaggtggatgtcagctcgaacttcatactgaatcggttccagctggtggcgaagagtaagagcaaccacactaaccccggcatcgaggccatctggaatgatgagaaattgcgccgacagaaacttgtcgagaagcacaccgatgctggcgatgaggagaaggctgaagcggtgccagtattggagttaccgccaacacaggagcggcatcaaattgaaatcgccgaaagcgatatcttctaccgcaccgctctggagagcaagctgatgacactggagcagtccacactgtccgagcaaacgttgtcggatcagacaatccttccccaagcaaccatgcagaccaccatgcccggcacaaaggcacagaaacgcaggtttaacttgcaaaaacttctagccaacgccgtttatccggaggaatgctcacaggatcagcagcaactgctggttaatgcttccttcatacaaaaccatgttacctgcggctacagcagcagtgtcagtttgtcaacctccaaggatgagtccgatgacttggacgaaactgtagtggatgaggaactaatactgagcctcacacagcctcatggagcgataccccatgatgccaccttgagggaggaggatttggaacttttggacgcgttgcagctgttggaggagcagaatgaaagtgaatcgcatgtggacttagacagttcgttggctccattgtcgcaacataaaaagttcgaacttacacccgaattgttggacaaggagaccgcagctactgctgctcttttcgacgaagatgttgactccgacgaggatgccgaccaagaaacccgacatgacttctctaccgtcctagacgatgtcgatgagttgttgcttaagttaacacaaagtcagcctgcggaatcgaaggaactgaaagcatctagtaaactgccccaaattgatggtgctgatgatcgcctacaaaggacccccattaaatcgatcagctctaagtcaaagtcaagtccttcaaagactccaacaacgccaataggtcagaaaagtcttcccaaatcgccacgtactccgaaaaccagtgcagccaagaaatatgcgccgctggctttgacaattggaagcagttcatcaaagaaaagcaacgatgaattcgcagggagaccatctaatccacgcctcagtttgcagctagaccaaggaaccggaacgggaacacttcggccagaaatctcattgcgcaaaaaactagccatgtcggagatgcgacggaaaagtttcgaggacagttttgtgctcttaaagaacgattgtactccagttaggagtaccagacgatcaactagcaatctggacaaaacacacattatttgttcccttacgccgagggacagaaatcctggcttgagcgacatgttcgaaacagaggacggcaagcaattaccaccaaagaaagtagtaagaaagacgcgatggagcactcggaatcaagatatagaaagtctacccaaggccggttgtgagatagagagaccccacaggtcagaaggaagtgccttggatgagctgaagccgcgtcgcagtgctcgccataaggttaattcggcaaatccagatgagtgttccagcgaaatacaaacaactgggccacgagtgacgactacaagtttggatagacctcaaaagaaagccagactatcccaaagtcccaaagaaaatactaaaacaagcatgaatggaactgttgcattggaaaaagcaacaaaagatagttcatctaactcagagagtccgcatcagcaggaaaactctgtttctgaacaaatcgaatatctcgaaagtaaaccaaaaaagtctgatgaaactgcacgaagctgtgacgaaaagttacaacgtgagctaattccacaggaaccagctggtatttcgcctggagattcagcaaactccacggaggagatcacatttagtccatgccatgatgaggctatcgaatccgacacggaaagcgattatatagtcaccaaacttcgtaaaacacccaacttgaaacgccttcgatggagcattcggtcggagttgctgaacaaacaatttactcccagttcaggcataagaccccctgagactgagaccactcctcagctaagtcccaaaagcaatgagagcaacacaccggagctgatgcgaagtttctatgagcattcgctgattgtgaacagtccgtcggtcttcagtgacttcttggatagccccgagatacatatggattctcctaggtctgctcctccatctcccgatagcaactcgttcgtgattgcccccttggagctgcctccatcctacgatgaagtggttagcggtagccgtaaaatggacatacccgagtacgagttccaaaagccatactacagcaatccctccgatgtgagcaaggtgacggaggtgggcttcctggtgctccacattccggggaacaagctaaatgactgtgatcccttccagagcatactgggcaatgatcgtggcctggcctcctggcgtcgtcggcaactgatagccattggtggcctggcaatgttgcagcgacatcggggagaacaaaaagtacgggagtatttcagcacgcaacaaagaatagcaatcgagccagcacaactagcacccacctggcaggaagccaagatctggttgaaagccaaggaactccttcgtcaacgagaggaaccaaaaaagtcctctgatgacatagacagccccatcaagatcaagcggcagaagatcactatgatgctgcaggctgaggaaggcgatggcggaagtggcgatgaagatgctggtgaggaactcgattgcagtctaagtctaacgcccttgtcccaagctaaggataaatgcaaggcaacccctaccagtagcaaagccagagaaacaggaaagagtcgccttaagcgcggaactaggctcagcttcataggaagccaggacgaggaaccaccaagctcgcagtccagcgaacagagcgtctccagtagtgcggcccaggcggagctagatcgtagttcctttctgcgccagttagagggcagtagccaggataggcagcacgacctcagctttggacttagccacgctaccttggacaacacgttcgggttcaaggttaatttggagaatctgcagcaggccaaagccgacattgattgcaaccacctgacaatcataacgttagaggtgtttgtgtccacgcgaggtgatctccaaccagatccgatgcacgacgagattcggtgtttgttttatgctatcgaacacagtttgccggatgaaaagctgcctagcaaagcctgcggctatataatggtgaacactgtccaggatttgctaagtgaaggaccttttcatggtatagatcgcgatattgaggtgcaagtagtgaccagtgaagcggaggcatttgaggcgttgctggctttgtgtgaacggtgggatgcggacatatacgcagggtacgaaatcgagatgtcctcttggggctatgtgattgatcgggccaagcatctgtgcttcaacatcgctcctctgctgtcccgagtgcccacacagaaggtccgggactttgtggacgaggatcgggagcagttcaccgatttggatgtggaaatgaagctctgcggccgcattctgctggacgtatggcgcctgatgcgctccgagattgcactgacgtcgtacaccttcgaaaacgtaatgtaccacattttgcataagagatgtccctggcacactgccaaatccctcaccgaatggttcggctcaccctgcacccgctggatagtaatggaatattacttggagcgtgtgcgtggcaccttaactctcctggatcagctggacttactgggacggactagcgaaatggccaagctcattggcattcagttctacgaggtgctgtcgcgcggctcacagtttcgcgtggaaagcatgatgctgagaatcgccaagccaaagaacctggtgccactttcacccagcgtccaggctcgcgctcatatgagagctcccgagtacttggcgctaataatggaaccgcagtcacgattctatgccgatcccctaatcgtgcttgattttcagagcttgtaccccagcatgatcatcgcctacaactactgcttctccacgtgcttgggtagagtagagcacctgggtggaagttcgccctttgaatttggcgcgtcgcagctccgagtttcgcggcagatgctgcagaagttgctggagcacgatctggttactgtttcgccatgcggcgttgtgttcgtgaagcgtgaagtgcgcgagggcatcctgccgcgcatgctcaccgagatcttggacacgcgccaaatggtcaaacagtcgatgaagctccataaggacagctctgcacttcagcggatccttcactcacggcagctgggccttaagctgatggccaatgttacctatggctacaccgccgctaacttcagtggccgaatgccttcagtggaagtgggcgattctgtagtttccaaaggacgggagaccctggagcgtgctatcaaactagtggagaacaacgaggagtggaaggtgcgtgtcgtctatggcgacacggactccatgttcgttcttgtgccgggtcgaaatcgagctgaagcttttcgaatcggcgaggagatcgccaaggcggtcaccgaaatgaatccacagccagtgaagctaaaactggagaaggtctaccaaccttgcatgctgcagaccaagaagcgctacgtgggttacatgtatgagacagccgatcaggagcagcccgtttacgaggcgaagggaatagaaactgtgcggcgagatggttgtccggcggtggccaagatgctggaaaaggtgctgcgcatattgttcgagacgcaagacgtcagcaagatcaaggcgtacgtgtgccggcagttcaccaagctgctgtcgggcagggccaatctgcaggacctgattttcgccaaggagttcaggggtctcaatggctacaagcccacggcttgtgtgccagcactggagctcacgcgtaaatggatgcaaaaagacccacgacatgtgccgcgtcgtggcgaacgcgtccccttcataatagtcaacggcccgccgggcatgcagctaatccgcctggtgcgcagcccgcacgacatcctggccaacgagggtcacaagataaacgccatctactacattaccaaggcgattattccgccgctgaatcgctgcctgctgctcataggcgccaatgtgcacgactggtttgccagtctgccgaggaagttgctcatgacgccggccgttggaaccgccaacgaattggcgggtgcacgcggtgccaagtccaccatctcccagtatttctctaccaccagctgcgtgatcgactgtggccgccaaaccaaggcgggcatttgcccagactgcctgaaaaacgccaccacgtgcgtagttgtgctctcagataagacagcgcgtctggagaggggctaccaactaactcggcagatatgccaggcttgttgcggacgcctgggtagcctacagtgtgattccctcgactgcccagtgctgtatgtcttggagggaaagcgaagggaactccagcaaatcgagcactggaacaaactccttgaacaccacttctaa

SEQ ID NO: 2668 - protein, 2130 aa, Drosophila melanogaster
MAAAGEAIDGVYSVRLVIADFYMEKPQFGMDPCYSELRGKEIKRVPVIRVFGGNSRGQKTCMHVHGVFPYLYIPYDKKDFESLERGILQMAMHLDKAINISLGQGSSNAQHVFKIQLVKGIPFYGYHRVEHQFLKIYMFNPRFVRRAANLLQSGAILSKNFSPHESHVPYILQFMIDYNLYGMSYVHVPLEVLKFRRNHDDDVIPYANVKQAQLLDITTAKKVACSALEVDVSSNFILNRFQLVAKSKSNHTNPGIEAIWNDEKLRRQKLVEKHTDAGDEEKAEAVPVLELPPTQERHQIEIAESDIFYRTALESKLMTLEQSTLSEQTLSDQTILPQATMQTTMPGTKAQKRRFNLQKLLANAVYPEECSQDQQQLLVNASFIQNHVTCGYSSSVSLSTSKDESDDLDETVVDEELILSLTQPHGAIPHDATLREEDLELLDALQLLEEQNESESHVDLDSSLAPLSQHKKFELTPELLDKETAATAALFDEDVDSDEDADQETRHDFSTVLDDVDELLLKLTQSQPAESKELKASSKLPQIDGADDRLQRTPIKSISSKSKSSPSKTPTTPIGQKSLPKSPRTPKTSAAKKYAPLALTIGSSSSKKSNDEFAGRPSNPRLSLQLDQGTGTGTLRPEISLRKKLAMSEMRRKSFEDSFVLLKNDCTPVRSTRRSTSNLDKTHIICSLTPRDRNPGLSDMFETEDGKQLPPKKVVRKTRWSTRNQDIESLPKAGCEIERPHRSEGSALDELKPRRSARHKVNSANPDECSSEIQTTGPRVTTTSLDRPQKKARLSQSPKENTKTSMNGTVALEKATKDSSSNSESPHQQENSVSEQIEYLESKPKKSDETARSCDEKLQRELIPQEPAGISPGDSANSTEEITFSPCHDEAIESDTESDYIVTKLRKTPNLKRLRWSIRSELLNKQFTPSSGIRPPETETTPQLSPKSNESNTPELMRSFYEHSLIVNSPSVFSDFLDSPEIHMDSPRSAPPSPDSNSFVIAPLELPPSYDEVVSGSRKMDIPEYEFQKPYYSNPSDVSKVTEVGFLVLHIPGNKLNDCDPFQSILGNDRGLASWRRRQLIAIGGLAMLQRHRGEQKVREYFSTQQRIAIEPAQLAPTWQEAKIWLKAKELLRQREEPKKSSDDIDSPIKIKRQKITMMLQAEEGDGGSGDEDAGEELDCSLSLTPLSQAKDKCKATPTSSKARETGKSRLKRGTRLSFIGSQDEEPPSSQSSEQSVSSSAAQAELDRSSFLRQLEGSSQDRQHDLSFGLSHATLDNTFGFKVNLENLQQAKADIDCNHLTIITLEVFVSTRGDLQPDPMHDEIRCLFYAIEHSLPDEKLPSKACGYIMVNTVQDLLSEGPFHGIDRDIEVQVVTSEAEAFEALLALCERWDADIYAGYEIEMSSWGYVIDRAKHLCFNIAPLLSRVPTQKVRDFVDEDREQFTDLDVEMKLCGRILLDVWRLMRSEIALTSYTFENVMYHILHKRCPWHTAKSLTEWFGSPCTRWIVMEYYLERVRGTLTLLDQLDLLGRTSEMAKLIGIQFYEVLSRGSQFRVESMMLRIAKPKNLVPLSPSVQARAHMRAPEYLALIMEPQSRFYADPLIVLDFQSLYPSMIIAYNYCFSTCLGRVEHLGGSSPFEFGASQLRVSRQMLQKLLEHDLVTVSPCGVVFVKREVREGILPRMLTEILDTRQMVKQSMKLHKDSSALQRILHSRQLGLKLMANVTYGYTAANFSGRMPSVEVGDSVVSKGRETLERAIKLVENNEEWKVRVVYGDTDSMFVLVPGRNRAEAFRIGEEIAKAVTEMNPQPVKLKLEKVYQPCMLQTKKRYVGYMYETADQEQPVYEAKGIETVRRDGCPAVAKMLEKVLRILFETQDVSKIKAYVCRQFTKLLSGRANLQDLIFAKEFRGLNGYKPTACVPALELTRKWMQKDPRHVPRRGERVPFIIVNGPPGMQLIRLVRSPHDILANEGHKINAIYYITKAIIPPLNRCLLLIGANVHDWFASLPRKLLMTPAVGTANELAGARGAKSTISQYFSTTSCVIDCGRQTKAGICPDCLKNATTCVVVLSDKTARLERGYQLTRQICQACCGRLGSLQCDSLDCPVLYVLEGKRRELQQIEHWNKLLEHHF

SEQ ID NO: 2669 - DNA, 4443 bp, Schizosaccharomyces pombe 972h-
  CDS (1)..(4443)
atgcgattttcaatcgagtatatagattgggaattaagtccttgtgatccagcttatgatttcgtagggaaagatttgccgactgcaaatgaagagttaaccactgttccagttattcgagtttttggattgaatgaagaagcagaaactgtttgctgctttatccacaacgttttcccatatatttatgtcgaatactctagttttgcagaaacgttagatcttgaagttccagattttttaagccaattacaaacatcaattaattatgctttagcattagcggcaagagcaaatccagaaacttacaaacctgctgtacaaagcgttcagcttgtgaagggaattccgttttatgggtactccttctgttttcagaaattcttaaagatctgtctttttagtccgaaaaacagagatagactagtcgatttattcaggcaaggtgctatattaaacaaagttattcaagtttacgaatcccatcttccttacttactacaatttatggtcgatcataatctatatggttgtgctccaatagatttagatgactccattataaagagagacgatctcttgagtttttgtaacgtcgaggttcacgtgtctccaaatgctattctcaatgcctgctggttgagtgaacgtaatatccatactgatttatatgaaactcatgcttcaagtccaaattcactattggtaactagtttagctgaaatttggaaatcggaagcttctcggaggaatttaaccagtagcgatgagactaatagtttttctaaattgcaccaaagtcagttcggtctcaaagaagagagtagccatgaaccgcgaagttcccagcactggaaaaatgaagttgccatgaaagatctgttaaaaaacttgatcaaaagtaaattagaatcttcttccgatgtcaatactccactcatctttgatccgtggcctgagctgcctaccatttattctgcaatccacaccaaagattacgtacgcccatcccaaaatgatatttcagtttctcaaatatctgtagatgagaaaatctgtacttcttatgaaagcctgccaaagattcaacttgaacaaaacactgcacccgtcatagaatcttcttttgaacaactggactctgagctcgagcgtatattgggagatacactttttgattcatttccttatgtagaacccaatgttgatagatctaaatttcccaaaagtcctcttaattcttctcaagaagttaccattcactcttcacaagatagacaatcacctccctcttcgcccttaaaagatgtaccttctcaaataaatccattttcccccagccttagattaaaagggggttcacccataactaaaagggaaattgaattttgtcgagatctgccgaatcgtcccaccagctctgaaccgaatcaaggggatactagaaaagcaggaaagagactaaaatattctagaaatcttgatgattatcatatttgtactcaaattcctgaagactactccccaaaattcttatctcaacatgaatcttttgtttacaaacaacaacctccttcgacggatgatctttatgggactatgaaaaaattgaaaatcccattttcaataccgacaaatgttcactatagttcggagaaggacattccctcttactcccaagaatatttaggaaaatctcattatccgatcggtgtttcttctagatatttgccagaatttcaatcagatggatcggtaagcgaaaaagttcgactaaatccacttaagcttagtaattttcacggagaacggacgtggcaatatataaaacctgcaccacttgctgtagatttatcaaatcttgaatcgaaagaagccgtttcagaggaaatacaaagcccacaaaggttatccagaagtaaggtttttagaaaagatccttattcatgtgtgcgcatcttagcgcttgaattgttttgctgtagccatgggggattgaccccagatcccactaaagactctatagagtgttgtttctgggcatatcaagaagatgtaaacagcagtatgattgacagagttggttttattgtggtcgacaaatctgcgtcgaactcttcttttgggcgaagttttccaagctgcaccgttttagttgtaaattccgaacttgaacttattaatgaagttataggattaaatcgccagcttgatccgaccatcgtatgtggttacgaagttcataatagctcatggggttatttaatagaacgagcatcttatcgatttaattatgacttgcctgaacaattgtcccgacttaagtgcacttcgaaagcaaattttgcaaagaaagagaatgcatggaaatatacaactacttcatccatcaatattgtgggccggcatgttttgaatatatggagaattctccgtggtgaagttaatttacttaactattccctcgaaaatgttgttcttaacatttttaaaaagcagaccccttattataatcaagctgataaagtgcatctttggcagagctctcgttttcatgagaagcaaatccttttaaattatatgttaaacaggactagatattgtttggaaatattatcagcctgtgccattgtcactaaaattcgtgaacaagcaagaattatcggaattgacttcatgtcagtaatttctagggggtcccagtttaaagttgaatctattatgtttcgaattgcaaagcctgaaaattacatatttccatcacctagcgctaagcaagttgctgagcaaaatgctttagaagcgttacctcttgttatggagccgaagtctgatttatacaataatccggtagttgtactagattttcagtcactatacccctctattataattgcatataatctttgttattccacatgtcttggacctgtgaaaatagtcaatggaaaagttaagcttggatttatgtttcattcaagcaatccaaacattgtgaatttaataaaaaatgatgtatatatctcccctaatggttatgcatacgttaaagagaatgttagaaagtctttgctcgctaaaatgctagaggaacttattgaaaccagaaatatggtgaaaagaggcatgaaagattgtgactcggactatgtcaacaaagtattgaatagtcggcaactggccctaaaattgattgcaaacgtaacttacggatatacttcagcgtcattttcaggaagaatgccgtgttcagaaatcgcagatactattgtggaaacaggacgtgagatacttagctattcactagaatacataaatactttagatttttgtcatgcaaaggtcgtttatggtgataccgatagcttatttgttgaattacctggagcgactaaagagcaagctttcgacatcggacagcagctagcaaacaacattacttccagatttccttctccaattcgacttaaatttgaaaaaatttactttccttgtttcttgttagcgaaaaaaagatatgtagggttcaaatttgaatcagttagtcaaaaagctccaatttttgaagcgaaaggcattgagacagttcgaagggatggtactcctgttcaacagcagctccttcgtcgttgccttgaaatactttttaagacaaaggatttgtcaacggtcaaaaaagaatttcagaacgtatgttatcaaattatgagtggaaacgttcctgttatggatttttgtttttcaaaagaagttcgtctagaaaaatataaagaattaagtactgctcctcctggagcagttatggctagacggttgatgaccaaagatcctaggagggaacctcaatatggagaacgtgttccatatttgattatcgctgctgctcctggtaccaccttggcgaaccgctcagttgcacccgaagaatttctgtcttcgagtttttctcaacttgatataaattattatatcaacaatagtttgatacctccattagatcgatttctaaacttgttaggggctagtgcccagtcatggtatcatgaaatgcccaaaccacgtaccagtttaaaattgactgaaacagtgaaaggaggtattcaaaaaaagactttggacacttttctgatggagaagctttgctcttcttgcttgaagaataatattgaaattattcctgataaaattaactccctctgcagtgattgcttaaaaaatccttgtgctactatttctaaagctgttacgcagcacaatgcttataacaaaaaactttccttgctatttgatatttgtcgaggctgcagtaagctttcatctagtgatccagttctttgcaagtcaaatagctgtaaggtgtactatgatagggcgaaaactgagaattatgcgaaagtacaggcagaaatgttaacgaagactcttggttctttagactggtaa

SEQ ID NO: 2670 - protein, 1480 aa, Schizosaccharomyces pombe 972h-
MRFSIEYIDWELSPCDPAYDFVGKDLPTANEELTTVPVIRVFGLNEEAETVCCFIHNVFPYIYVEYSSFAETLDLEVPDFLSQLQTSINYALALAARANPETYKPAVQSVQLVKGIPFYGYSFCFQKFLKICLFSPKNRDRLVDLFRQGAILNKVIQVYESHLPYLLQFMVDHNLYGCAPIDLDDSIIKRDDLLSFCNVEVHVSPNAILNACWLSERNIHTDLYETHASSPNSLLVTSLAEIWKSEASRRNLTSSDETNSFSKLHQSQFGLKEESSHEPRSSQHWKNEVAMKDLLKNLIKSKLESSSDVNTPLIFDPWPELPTIYSAIHTKDYVRPSQNDISVSQISVDEKICTSYESLPKIQLEQNTAPVIESSFEQLDSELERILGDTLFDSFPYVEPNVDRSKFPKSPLNSSQEVTIHSSQDRQSPPSSPLKDVPSQINPFSPSLRLKGGSPITKREIEFCRDLPNRPTSSEPNQGDTRKAGKRLKYSRNLDDYHICTQIPEDYSPKFLSQHESFVYKQQPPSTDDLYGTMKKLKIPFSIPTNVHYSSEKDIPSYSQEYLGKSHYPIGVSSRYLPEFQSDGSVSEKVRLNPLKLSNFHGERTWQYIKPAPLAVDLSNLESKEAVSEEIQSPQRLSRSKVFRKDPYSCVRILALELFCCSHGGLTPDPTKDSIECCFWAYQEDVNSSMIDRVGFIVVDKSASNSSFGRSFPSCTVLVVNSELELINEVIGLNRQLDPTIVCGYEVHNSSWGYLIERASYRFNYDLPEQLSRLKCTSKANFAKKENAWKYTTTSSINIVGRHVLNIWRILRGEVNLLNYSLENVVLNIFKKQTPYYNQADKVHLWQSSRFHEKQILLNYMLNRTRYCLEILSACAIVTKIREQARIIGIDFMSVISRGSQFKVESIMFRIAKPENYIFPSPSAKQVAEQNALEALPLVMEPKSDLYNNPVVVLDFQSLYPSIIIAYNLCYSTCLGPVKIVNGKVKLGFMFHSSNPNIVNLIKNDVYISPNGYAYVKENVRKSLLAKMLEELIETRNMVKRGMKDCDSDYVNKVLNSRQLALKLIANVTYGYTSASFSGRMPCSEIADTIVETGREILSYSLEYINTLDFCHAKVVYGDTDSLFVELPGATKEQAFDIGQQLANNITSRFPSPIRLKFEKIYFPCFLLAKKRYVGFKFESVSQKAPIFEAKGIETVRRDGTPVQQQLLRRCLEILFKTKDLSTVKKEFQNVCYQIMSGNVPVMDFCFSKEVRLEKYKELSTAPPGAVMARRLMTKDPRREPQYGERVPYLIIAAAPGTTLANRSVAPEEFLSSSFSQLDINYYINNSLIPPLDRFLNLLGASAQSWYHEMPKPRTSLKLTETVKGGIQKKTLDTFLMEKLCSSCLKNNIEIIPDKINSLCSDCLKNPCATISKAVTQHNAYNKKLSLLFDICRGCSKLSSSDPVLCKSNSCKVYYDRAKTENYAKVQAEMLTKTLGSLDW

SEQ ID NO: 2671 - DNA, 5349 bp, Magnaporthe grisea 70-15
  CDS (1)..(5349)
atggacgtgttcaaggtgcgtctgaactgcatcgatcactaccaagccacgcccacgcaatatgacccctgtctccgaaacgatgttcggcattcccaactattcaaggagcccaaggttccggtgattcgcgtctttggctcaacccagactggtcaaaaagtctgcgcgcatatacatggcgcgtttccctatctcttcattgagtataatgggaagttggatcaagaagaagttggcgcattttcataccgactgcatctgtcgattgaccatgccctcgctgtcagctataggcaggatgcctatgctcgggacacgcccaagtatgtggcgcgtataacgctcgttaagggcgttcccttctatggcttccatgttggctacaagtattatctcaagatttatatgctcaaccccgttgtcatgacgcgactggccgatctgctgcaccaaggtgtcattatgaaacgaaaatttcaaccatacgaggctcatttgcagtacatcttgcaattcatgaccgactacaacctttatggctgcgggtacatcgaggccagcagtgtcaaattccgtgccccagtgcctcagatagacgacgatgacatggacagcgtcatgactccccatatctggcacaaccagtcgatatcccaaaagcagatcacagatcatcactctctgcctagggccagtcattgccccatcgaagttgatatatgcgtacaggacatcctcaatcgtaaagatgtcaaggaacgcagacttcatcatgattttgtcgagcggctgaaccccttacctaccgatatgaagctggtagctagcatggcagggctgtggagggacgaaacgaaacgtcgaaaaagacagctgggcatctccgatccgaaaagcagtccatttcctgctgaggcgcttgtctccatgtcgcacgatccgcgagactcgcagcctgccggctggctacacgaggaagagttccgtgcagagattgaagagctcataacaaccgagagagccaatgacgacacagacatcacattcgactcgtttgtgccagaaccgcctcctcttgattcggccatcaagactgtacttgagtctgtcgaggatctctaccctcaacacttggaggcatccttgggggagatgtcgactatttcggttgattttgaccctgcaagcagtattgacgttgatgagagaggtgcgcgccggctaggcagaccggagactatggacgaagacccttgtccggatgattctgatgaagaaagactgcgagaagcccagcgtttggaggaggcaaagaaagaaaaggctttgcaggactatcccaccacagcttcgataaacggactggttggacttgataccagtagtctgattactggaaagcgaccagagatacccataacacaggagctcatcgatgctgctattgaggaagatctgttgagcgaggttccagctcctttgcaaacgccaatcttgcgagagggattgaagcgacatgcccacccaaaatatgaggatcatccttcaaaacgaccaaggatacgaccagctcgcataaacaacttgacatttgtcccccctgaggacggtctacgagcccggtatgaacgccgtgctgcgaatgtggccaaagccgaaagccaacccccatcgtcttcccaacgacagacagtggatgaggccgccccgttccgtacgcctttgccgcgcaagtcatctatgatgcacaactcggcatccaagtctgttaatcgtaagctcagttttgctgtcgtcaaagatccgaatgaccctgagacaaagcttcgattgagccaaaattccaactcgcaaggcagcgacacatctgaaaccccgaagcttctttcttttgattcgtcgttgccagatccggaggaggcctcaccgcagaaggaagaaaaccaagaattctaccaggtgggccagttgccaaatccctttggaccctccgacaagtctcaggaacatgaccactcagaagatgaagtctttgcacatacctcaatggtacctgttagccatgttctccccccgaccgcagaggaggtctgcgcaactatggcggactacggaatacccgatgttgtataccgggacgcatattacagtaaagagaaagatgtgccacttcgtccaagagagtttgctgggcgtcaatttcggctccggggtaacacgttaccatacctacccgagttcactgctgatagggctgcaccggatgcatgggccgttccagaggcacgactaccagacaaatcaaaacttaaaattgaggaggagatacgccggaataaatgtacaatcaagacatgggaaattgcacaaccacctccgacgtttgaagaagtatcgggctggtgggaggaaaaggagattaagaagaaagagtccggatcgaggccaaagagccatccggcctctccacagtcgacacagttggctcgtcgccagctttcacagatcgaaggagcgacgcccaagaacaaacatggcttcaggtactcgcagaagcaaaagactaccagcgttcagcatgaggttgcttacatgagcacaatgagtatcgagatccatgttaacaccaggggaaaacttgtccctgatccggagaaggacgaggtcaagtgcatattctggtgcgttaggtcagatgataaatctaacgaggctagcagccaggctcctgatggtttacaatcgggcgtcgtggttctatctgaagaaggcaccctggctgaacgcatcaagcaccaaataaagggtgagctattggaagaaacatccgagctcgacctcatggttcgtatggttgagattgttcgaacgcacgacccagatatcctgacaggctacgaggtccatggtggctcttggggctatttgattgagcgcgcaagatgcatgtacgactataatctctgtgacgagttctcccgtatgaagtcgcagtctcatggaagatatggcaaagacgcagaccgatggggtttcaacactacttcgacaatccgagtgacgggtagacacatgatcaacatctggcgtgcgatgcgaggagagctcaacctacttcaatatacaatggaaaatgtcgtctggcatctgctacaccgtcggataccacactactcgtggcagacgctcaccacgtggtatggtagtggacggcacggcgatcttgataaactactacgctactaccaaacaaggacgaggcttgatattgagatccttgaggagaatgggctgatctcgcgaacgagcgagcaggcaagattgcttggcgtcgacttcttttcagtgttctcacgtggatcacagttcaaggttgagtctatcatgtttcggatcgccaagcccgaaaactttatgctcgtatcaccgagtcgaaagcaggttggcgggcaaaatgcattagagtgtttgccgctggtgatggagccacaaagtgcattttataacagtccagtgctggtgctagacttccagagtttgtatcccagcgtcatgattgcctacaactactgctactcgacgttcctggggcggatcgtggattggcgtggaaccaacaagatgggatttgccgagtatagaaggcgaaagcggctactcgagttgttgcaagagcacatcaacattgcaccaaacggcgtcatgtataccaaacctgagatcaggaagtcgctgcttgccaagatgttgacagagattctggaaacaagagtcatggtcaagagtggcatgaaacaagacaaagacgacaaaaccctccagcaattgctaaacaataggcaactggctctcaagctgctggcaaacgtcacatatggctacacgtctgcgtcattctcgggcaggcttccgtgttcggagattgccgatagcattgtacagacaggccgtgaaactctggagcgagccattgccttcattcactctgtcccgagatggggcgctgaagttgtctacggggacacagacagcctttttatccacctcaagggtcgcacaaaagagcaggcctttgagattggaaacgaaatggccaaggcaattactgacatgaacccgcggcccatgaagctcaagtttgagaaggtctacctaccatgcgttttgctagccaaaaagcgctacgttgggtacaagtacgaacacgtcgatcaacaagttcccgattttgatgccaagggcatagagacagtccgccgtgacgggacgccagcggagcaaaagatcgaggaaaaggcgctgcggctgctctttgagacggcggacctaagccaaatcaaggagtactttcaacgacaatgcaacaaaatcatgcgtggtcaagtgtcaatccaagacttttgcttcgccaaggaggtcaagctgggcacatatagcgaccgcaacggtgtaggccccgcaccgcctggcgcgctcattagcacaaagaagatgctggccgatccgcgagcggaaccacaatacggcgaacgtgttctttatgtcgtcgtcacaggcgcccctggcgcgaggcttgccgacaggtgcgtcccgcccgaagacatgctatcgcccgccggtgcgcacctacgacttgatgccgactactacatatccaagaacctgattccgccgctggagcgcatcttcaacttggtcggagcgcacatcagaggttggtacgatgagcttcccaaagtgcagcaggtaaggcgcgtcgtggtcgattctgggaacgggcacaacagctggttcgggagcatcatggggaacaatggcgcacaaaaggccaaaaaggtcacgcttgaaagctatctgcaagtgatgaactgtgcagtatgcaatgtccgcatccgccccgctacccagaaaaagaaaacgccggcaccccggcagcaactaccaccagtacagtaccaccccctgtttgggttcggccgttttgggccgcgacctccacctcaaccggcacccaagaagaagaagaagaagaaccctgcaaacgatgtcgtggtatgcggacgatgcacgcgccacgctcaggaatcgctcctcaagctccacagtaggctggcgcacgagcgcaagcggttttccgaggtggcagatgtgtgtcggagctgtgccggcttggcaccgggcgacgtcgcaagtgtacatgactgcgatagcaaggactgtccggtcttttacacgcgggtcaaacaggccacgaagcttcgaacggaaatgagtattgtcgagccggtgatcaagcaattggaagcgagggttgccaaaatgaggaaacaggcttgggaatggtag

SEQ ID NO: 2672 - protein, 1782 aa, Magnaporthe grisea 70-15
MDVFKVRLNCIDHYQATPTQYDPCLRNDVRHSQLFKEPKVPVIRVFGSTQTGQKVCAHIHGAFPYLFIEYNGKLDQEEVGAFSYRLHLSIDHALAVSYRQDAYARDTPKYVARITLVKGVPFYGFHVGYKYYLKIYMLNPVVMTRLADLLHQGVIMKRKFQPYEAHLQYILQFMTDYNLYGCGYIEASSVKFRAPVPQIDDDDMDSVMTPHIWHNQSISQKQITDHHSLPRASHCPIEVDICVQDILNRKDVKERRLHHDFVERLNPLPTDMKLVASMAGLWRDETKRRKRQLGISDPKSSPFPAEALVSMSHDPRDSQPAGWLHEEEFRAEIEELITTERANDDTDITFDSFVPEPPPLDSAIKTVLESVEDLYPQHLEASLGEMSTISVDFDPASSIDVDERGARRLGRPETMDEDPCPDDSDEERLREAQRLEEAKKEKALQDYPTTASINGLVGLDTSSLITGKRPEIPITQELIDAAIEEDLLSEVPAPLQTPILREGLKRHAHPKYEDHPSKRPRIRPARINNLTFVPPEDGLRARYERRAANVAKAESQPPSSSQRQTVDEAAPFRTPLPRKSSMMHNSASKSVNRKLSFAVVKDPNDPETKLRLSQNSNSQGSDTSETPKLLSFDSSLPDPEEASPQKEENQEFYQVGQLPNPFGPSDKSQEHDHSEDEVFAHTSMVPVSHVLPPTAEEVCATMADYGIPDVVYRDAYYSKEKDVPLRPREFAGRQFRLRGNTLPYLPEFTADRAAPDAWAVPEARLPDKSKLKIEEEIRRNKCTIKTWEIAQPPPTFEEVSGWWEEKEIKKKESGSRPKSHPASPQSTQLARRQLSQIEGATPKNKHGFRYSQKQKTTSVQHEVAYMSTMSIEIHVNTRGKLVPDPEKDEVKCIFWCVRSDDKSNEASSQAPDGLQSGVVVLSEEGTLAERIKHQIKGELLEETSELDLMVRMVEIVRTHDPDILTGYEVHGGSWGYLIERARCMYDYNLCDEFSRMKSQSHGRYGKDADRWGFNTTSTIRVTGRHMINIWRAMRGELNLLQYTMENVVWHLLHRRIPHYSWQTLTTWYGSGRHGDLDKLLRYYQTRTRLDIEILEENGLISRTSEQARLLGVDFFSVFSRGSQFKVESIMFRIAKPENFMLVSPSRKQVGGQNALECLPLVMEPQSAFYNSPVLVLDFQSLYPSVMIAYNYCYSTFLGRIVDWRGTNKMGFAEYRRRKRLLELLQEHINIAPNGVMYTKPEIRKSLLAKMLTEILETRVMVKSGMKQDKDDKTLQQLLNNRQLALKLLANVTYGYTSASFSGRLPCSEIADSIVQTGRETLERAIAFIHSVPRWGAEVVYGDTDSLFIHLKGRTKEQAFEIGNEMAKAITDMNPRPMKLKFEKVYLPCVLLAKKRYVGYKYEHVDQQVPDFDAKGIETVRRDGTPAEQKIEEKALRLLFETADLSQIKEYFQRQCNKIMRGQVSIQDFCFAKEVKLGTYSDRNGVGPAPPGALISTKKMLADPRAEPQYGERVLYVVVTGAPGARLADRCVPPEDMLSPAGAHLRLDADYYISKNLIPPLERIFNLVGAHIRGWYDELPKVQQVRRVVVDSGNGHNSWFGSIMGNNGAQKAKKVTLESYLQVMNCAVCNVRIRPATQKKKTPAPRQQLPPVQYHPLFGFGRFGPRPPPQPAPKKKKKKNPANDVVVCGRCTRHAQESLLKLHSRLAHERKRFSEVADVCRSCAGLAPGDVASVHDCDSKDCPVFYTRVKQATKLRTEMSIVEPVIKQLEARVAKMRKQAWEW

SEQ ID NO: 2673 - DNA, 6021 bp, Nasonia vitripennis
  CDS (1)..(6021)
atgtattcggttaggctgatttgcgccgatagttatcaagctacaccgattccagaggtcgatccaaccttctcacaatttcggggtagcgacatcaaacaggttcctgttttacgaatttttggaaccacacaaaatggtgaaaaagtttgcttgcacattcacggagtctttccttacttgtacgtgccttactcaggtcaaatcaaagcagatattttagcatatcgtcttgctgctgcattagatacagctatcaatatatcattaggttcggctaaagcaaacactcaacatgtttacaaagttcatcaagtttctggaatacctttttatgggtaccacaggaagaatcaccatttcttcaagatttatttctacaatcctgccatgataaaacgagccacagatttattacagaatggatgtattctggatcaagtatttcaaccacacgaagctcacataccatttacaatgcaattcatgattgactataacatatatggcatgagcatgataaatttaaggaatgttaaacatcgtcacagtgccacagtttctcaaactgaagagaaattatccaataattcaaacaatctttctgatttcgagtcagaagttaaagaatatttgccttattcagtcaaaaagcaaagtgtttgtaaattggaaatagatgcttgggcttctgatattctgaatcgagaagttatagacaaaggaatggatctaaatccaggcattgatgcaatttgggaagaagaaaaagctagaagggctcaagctggtttggttggggaatctcaattaacacatcctagtagccctgagaggtctcaagcagcacgtattttaacagataatgatatttatcaccaaaaacgtttagctcagcgtttatgtgtgattgaatcacagggtgatgaaagttcattgtcacctaattcacaaaattcttcgtatcctttacctgtaccagatgatagtaatttattaaatgcttcacggttagaaatacatgctgggcccctaggtacaagtgctatccaacaaagtattaatcaatcagattcagatttgaataatgagtccatcatgctatcttggcaatctcaagcatcattcagcgatatatctttgaacagcagtgaccttgaagttgtggatttattagcaaatttagccaaagatcaagaagatattcctagttcgattgattcaaatagtattctgggatcacaaaaatcgcaacgaaatttggaagaccttggtgttgaacaagacaaccctgctgatgtagaagatgagggagaagaagtgacagatttaaatctcacaaatttagagttggatcttctgaatttcagttcgtgggaaactaatgtagataaatcacaaccgccaagtaaaactaatgaatcccaaattgagcttgttctcgagtctctgaatcctcatacaccgtcacgtaccgataatattccacagctcgatggtcctatagacgatgaaaacgctcggacgagcgctgaggatccagatatgaccatagaaagacgagaattcgtcatctgcgagtatagacaaggaagaggtggtagacgttcaaccgcagtgacgcctggtaaaagaaaacgcgtttccagcagtgacgatgacgattctcgtggaagtgaaaagaaaactaaaacgaaagattcactacctaaaacaccccgtagatcgccgtcgaaacgaatgaacaaactaacgagcccgagctgtccaaacaggacttattcaccgttaagcttagaaatatcctgtggtcagaagactcccaaaagctcaccacttaaatcaccgaccacaagaccatttgatagacgaaaaatgagagaagcttttcggcgcaaacgaatattttcgccggttaaagaatcgaatctcgaagaggaacacgacgaaggaacttcaaatgcctcaaagaaaccatcagcttctatttttgacgaaaaattaaatttgccgattccttcaaataaatcgccttcaagcgaatcagacgaacaacttactccaatcatagaacaaatacacaattctaatgaatctccttcagaagctttacatgatcaagcatcgcctcttcttttagagcaaccacatatttcaccacttgatttcgcatctatcaaagcaccatcagaagcttcagaggaacaatctcccctcaaaacacccgtggatcaaccgctcgtttctccaattgatttggcatctatcaaagcactatccgaaacatcagaaccatcatctcctactatagagcaacggcgtatttcgccagtttttggttctatgaaaaaatcttcaaaaactcctttgaagctatttatctccaatctggaacaacagcacacctcatcgtctgattctataccaccttctaatcagctgggccaagaaatattcacattcgatatgaaaactcccgatagtgaccgtactttggtagaagattcagatgagtcattagaaacgctgacaccttcatcgcctgaaaatcctgcgatcataaacgagagcgacaccaacgatacagagggctctcaggaaaagaagagcaccctttcttcttacaattttcctcacgatgtactacacaccgtagcagaaaaagaagagggatcatctctagaatttcaagtctcgtttacgcaggtggaggaagtctctgagtttatgatgacttttacgcctacgagcatcgagcacatcgagaacagttcaaagtctcagaagatacctaagcctaaagaagaagagctgtctgatagtagcgaagatgatgaaaacctggataacaaagaggaacccaaaactccacctggattcggaagttggcgtaacatggaatttactgataatcgccagctgggagaaaatcaaaagacctcggaccaaggctgttcgtcatcatcaaaaggtaccgagtttgtaatgacttttaagcctccaagcttcgaacacatcaagaacagtgcaaagtctcaggagatacctaaatctaaagaagaagagctgtctgatagtagcgaagatgatgaaaacctgaataacaaagaggatcccaaaactccacctggattcggaagttggcgtaaattcacgggtaatgcagatacagtgttccagttcgatgagcacgaagaaggccttatagcgattagaccgttatattcgccgcctagcagagaaagtgtggaatcttggttgaaagctaaagagaaaagagaacaaaaagaaaaagaagagaaagagaaagtagagaaggaaatggagaaaagcagtatagcaacgccggacgtttcgctaagtttgtcaaagatatttcatcctgaagatttctcacatcacttgggtgtatcttgtggacaaattgagtttaattcaaggtcgagtgtagttgatattgaagatggtaatctcggaaaggcaaaggctttgacaacgtatcaatttttgacggttctctgcttggacgtacatcccatcacgagaccaaatttgttgcctgatcctcgacaagatcgaattgcggctgtcttctacgctatacacaatgacgtacctccagactggaatcaagcaaaacctctggactgtggtgtgattatcgtggatccagaaaaagtcaactccaaaataaaaaagcttaacggcggaactgaacaagaacagtcattgatctatgtggaaaaagaagaggacgtatttgaagaagtagtgtcgcttatacaacgttgtgatccagaaattttaatcggctgggatatcgagtttctgtcgtggggctacctatttcaacgagcatctgttttcggaaaaaatttgagcggaaaaatttcccgcattccaagcgctaaatgcaattgggaaactagagcacacgatgagtctacaacggagctacacttggagactttggtagaggtaaagctacctgggcggatcgttttggatatctggagaataatgaggagtgaaatcgctttaacaggttacacgtacgagaatgtcatgtataatgttatgaatgaaagaatcccaaatccaagttttgataccttaacaaagtggtggaatagtagcaatactcagtggagagtaatagacaactacagtaacaaggtcataggtgtccacagacttcttcatcatttggatatcattaatcgaacgagtgagcatgctagactatacggcatccagttttacgaggtcttctctcgaggctcacagtttcgagtcgagtcgatgatgttgcgtctagccaaacccatgaactacatagctgtttcaccgtcggcacatcaacggggctgtatgcgagcacccgagtcgttgcctctcatcatggaaccggaatcaacaatgtatctcgatcccgttgtcgtacttgacttccaaagtttatatccaagcatcatcatcgcttacaattactgcttctccacttgtcttgggcgcatcgaacacattggctctccccatccatttgaatttggcgcaacgactcttaaagtacaaaagaatctggcaaagaagctacaaaataaaatgaatttcgctccttgtggtgttgcatttgtaaaatcggatgttcgtcggggaattttacctcgtatgcttactgaaatacttgagacccgattaatggtgaagaaggccataaaggatcattcaaaggaagatcgcgctttgcaaagagctctgcattcgaggcagcttggactcaagttgatcgcgaatgtaacttatggttacacggctgcaaattttagtggaaggatgccttgcattgaagttggcgatagcgttgttagtaaaggaaaggaaactttagaacgagccataaaaatggtagaatcgactccggaatggggagcgcgagttgtttacggtgataccgactcgttgtttattttattaaaaggtaagaccagagaagaggcatttgcaatcggagcagaaatggctgatgcagttacagcagcgaatccaaagccggtgaaactaaagtttgaaaaagttatgcagccttgcatactccagacaaagaaaaggtattgtggatatatgtacgaaaatttgaacgacaaaccagtatatttggccaagggtatcgaaactgttcgccgagacggctgccctgctgtagccaagatccttgaaaaaagtctaaggatactattcgatactaacaatatgtcgatggttaaacaatatgtcacccgacagttggacaaagttcttagtggaagagcatctatacaagatttgacatttgctaaggagtttcgcggtatgaaaggatacaaagctgcagcttgtgtaccggctttagaacttacaaaaagactgattcagaaagatccgcgcgccgttccgagaacaggtgccagagtgccttacattatcgttgcaggtgctcctaatgaagcacttattcggtgtgtacgagcgccgatggaattgattctggaccctggtttgaggccgaatgctacgtattatgttacgaaagttatcattccacctctaaacagatgtctcaagttgattggagttgacgcttacacttggtacatggaaatgccacaccgtcaagctcttaatagattgcaaggtccagcattattaaatgctaatcgcaagcaaaaaacgacgatttctcagtatttatgcaatgcaacttgtccatcctgtgggcaatcatgtgatagaggtatatgtgctgagtgcgttaataatcaaagtcaaacacttgttgtacttcatgaaaaatgtagacaatacgaaagaatttattctaatattaagatgctctgcgaatcttgtattggtgtgaaggacgctgatagttgcacttctctcgactgtccaatattttatcgaagaagccaggcacagagagacaatacacaaacttcatatttatataatttaatgcagtgcatggaacatttgaactga

SEQ ID NO: 2674 - protein, 2006 aa, Nasonia vitripennis
MYSVRLICADSYQATPIPEVDPTFSQFRGSDIKQVPVLRIFGTTQNGEKVCLHIHGVFPYLYVPYSGQIKADILAYRLAAALDTAINISLGSAKANTQHVYKVHQVSGIPFYGYHRKNHHFFKIYFYNPAMIKRATDLLQNGCILDQVFQPHEAHIPFTMQFMIDYNIYGMSMINLRNVKHRHSATVSQTEEKLSNNSNNLSDFESEVKEYLPYSVKKQSVCKLEIDAWASDILNREVIDKGMDLNPGIDAIWEEEKARRAQAGLVGESQLTHPSSPERSQAARILTDNDIYHQKRLAQRLCVIESQGDESSLSPNSQNSSYPLPVPDDSNLLNASRLEIHAGPLGTSAIQQSINQSDSDLNNESIMLSWQSQASFSDISLNSSDLEVVDLLANLAKDQEDIPSSIDSNSILGSQKSQRNLEDLGVEQDNPADVEDEGEEVTDLNLTNLELDLLNFSSWETNVDKSQPPSKTNESQIELVLESLNPHTPSRTDNIPQLDGPIDDENARTSAEDPDMTIERREFVICEYRQGRGGRRSTAVTPGKRKRVSSSDDDDSRGSEKKTKTKDSLPKTPRRSPSKRMNKLTSPSCPNRTYSPLSLEISCGQKTPKSSPLKSPTTRPFDRRKMREAFRRKRIFSPVKESNLEEEHDEGTSNASKKPSASIFDEKLNLPIPSNKSPSSESDEQLTPIIEQIHNSNESPSEALHDQASPLLLEQPHISPLDFASIKAPSEASEEQSPLKTPVDQPLVSPIDLASIKALSETSEPSSPTIEQRRISPVFGSMKKSSKTPLKLFISNLEQQHTSSSDSIPPSNQLGQEIFTFDMKTPDSDRTLVEDSDESLETLTPSSPENPAIINESDTNDTEGSQEKKSTLSSYNFPHDVLHTVAEKEEGSSLEFQVSFTQVEEVSEFMMTFTPTSIEHIENSSKSQKIPKPKEEELSDSSEDDENLDNKEEPKTPPGFGSWRNMEFTDNRQLGENQKTSDQGCSSSSKGTEFVMTFKPPSFEHIKNSAKSQEIPKSKEEELSDSSEDDENLNNKEDPKTPPGFGSWRKFTGNADTVFQFDEHEEGLIAIRPLYSPPSRESVESWLKAKEKREQKEKEEKEKVEKEMEKSSIATPDVSLSLSKIFHPEDFSHHLGVSCGQIEFNSRSSVVDIEDGNLGKAKALTTYQFLTVLCLDVHPITRPNLLPDPRQDRIAAVFYAIHNDVPPDWNQAKPLDCGVIIVDPEKVNSKIKKLNGGTEQEQSLIYVEKEEDVFEEVVSLIQRCDPEILIGWDIEFLSWGYLFQRASVFGKNLSGKISRIPSAKCNWETRAHDESTTELHLETLVEVKLPGRIVLDIWRIMRSEIALTGYTYENVMYNVMNERIPNPSFDTLTKWWNSSNTQWRVIDNYSNKVIGVHRLLHHLDIINRTSEHARLYGIQFYEVFSRGSQFRVESMMLRLAKPMNYIAVSPSAHQRGCMRAPESLPLIMEPESTMYLDPVVVLDFQSLYPSIIIAYNYCFSTCLGRIEHIGSPHPFEFGATTLKVQKNLAKKLQNKMNFAPCGVAFVKSDVRRGILPRMLTEILETRLMVKKAIKDHSKEDRALQRALHSRQLGLKLIANVTYGYTAANFSGRMPCIEVGDSVVSKGKETLERAIKMVESTPEWGARVVYGDTDSLFILLKGKTREEAFAIGAEMADAVTAANPKPVKLKFEKVMQPCILQTKKRYCGYMYENLNDKPVYLAKGIETVRRDGCPAVAKILEKSLRILFDTNNMSMVKQYVTRQLDKVLSGRASIQDLTFAKEFRGMKGYKAAACVPALELTKRLIQKDPRAVPRTGARVPYIIVAGAPNEALIRCVRAPMELILDPGLRPNATYYVTKVIIPPLNRCLKLIGVDAYTWYMEMPHRQALNRLQGPALLNANRKQKTTISQYLCNATCPSCGQSCDRGICAECVNNQSQTLVVLHEKCRQYERIYSNIKMLCESCIGVKDADSCTSLDCPIFYRRSQAQRDNTQTSYLYNLMQCMEHLN

SEQ ID NO: 2675 - DNA, 6243 bp, Aedes aegypti
  CDS (1)..(6243)
atggtgcgacgtggcggtcagcatgtcacttcgatacggatcgtcagtgtggaccattacatgcacaagccggaaccacggttcgatacgtgctactcggagttccgtggatccaacgtaaaacaagtaccggtcattcgattgttcggttcgacggccgatggaacgcatagctgtgtccacattcacggggtgttcccgtacctgtacgtgcccttcgacggaaacaccgcggatcgaacggcggtcgatcgcttgatgtatcagattgcttctagcttggacaaggccatcaacgtttcgctcggcaatgccaattcagcggccacgcacgtcttccggatcgccttggtgaagggaataccaatctacggatatcaccggaaggaacatcagtttttcaaaatctacatgtacaacccgtatttgattcggaaggccaacaatctgctgatgaatggagtgattctgtcgcgagtgttccaaacattcgaatcacacgttccgtacattttgcagtttttcattgactataatctctatgggatgagtttgctggatgtgctggaaagtgcgattcggcctcgtacggaaactggagaggaagggcatttacagaagatgtccacttcggagtacgagattgacattttggccggagatatattgaatcgccacacgttggagcaggagaagcgttcggaatatgctaatccgggtattgcgtcgatttggaatgacgagatcgctaggaggaagttgctggggatggagcaaccagaagcactgagtttgtcgcaaagcggaaaggtggaaatcgtgacggagagtgatcgcttctttcgatcagtgttggcttcgaagcttaccggttcaaataacgcaaacagaccggtcgaaggggaagagactcgattaaagccgcccgtttcattttatccatcggaagtggcagatgacgagcgcttactggaagcctcgtgtgtccaggatcacaagcatttcagccagtattcgtcgttcaatatgtccaacacggtttacgatttcgatgggagccaggtagatgaggatcggatagtaagcatgtctcagaatcctgacgccacgtttgccgaagaggatcaccaattgttggacattatgcgagagctggaggaacacgaaaatcgcgatgtagagaacgacagtcttctcgctcctttgacacagcaaaatgaacgtagaattacatctactgggggaagtgggttaagcttatctcaatcgagtaacaaacgacttaatgctactttgagtggagacttggaaatgctttcgttgatgggtgacgacaagaagaatgatgatggaattcaagtacagcttcaggacaacagtacgttggattcggatgatgaatttctgttggattacactatgaagatggatccgaagacggctgaagacttgttgaacgacagcgacgacgatattctcaattcgagtgtgattccacaactggacggcgctgacgatggacagcttcctatgcttagaagcaagcgaacgagtcaaaatagaagtccttcgggtgccttgagcaacggaaagcttaatggacacgatgaaccggggatcaagcgcttgaagcatgttctagtgaccaagatgtcaaacgagttcgaaatgcacaacgttccaacgttaacaaatggtgtgcataaggtaaagcctttgtcgaagccgaggaaaaagatcaaactggatcaatcgaacaccaccattccctctgagaccaggagcagcgtcaaaccccagctctttttagagctccaaagagttgctagatttttcacaatcgacgcttgcctccttcgctcaattcacctcaagtacagtccaccgccgtcaaccgttcgccccagcgcgaacttctttttggtccataccgaaccggatcacggtggccatccgaaaagactttcgccgagaaagttcccccagtgccgttcaactgagcggcagaagccattcccgccgaagagaaaaacgacgcgctacgctaaaaaaagtgctgtgcccaaccaaaacaactgcttccgttgctacgaatgtgaatcgatgccggaatcgccagtaaagaaacccgctaaaactccaaacgcatcacccctcaaggaacgagatccatcaccgttcgatgtttgtaaattggctcgcgagtacgatctggccaacaattacgatcctcaggaaggactgtctcgaggtcccgttcggcgaggtcgtagtcgaggaaggggtcgtggtagtcgcagaggacgccctgtccgaaaacaaccatctcctgagccggtacccgaaccagaacccgaaccggatcctgagcagcaaatcccgccacaaccggaaccggaaatcgatgtgatcctgtcgcagaaatttcagagcatcattaaactgtctccaaaagtgttgataacggcgctaagccaatcggaggtaacaaacttgcaggtcaagaaagccgatccaacgtcaatggagacgattgaaatttccagcgagtcggaagtaatccacatcagtgatgaagaatcgcgctcttccggagaacagaaacgcctttccattccggaaatatcgcaggaagcagcccaggtggcaaatcgttcacccatttcgacaaaggcaatgacggaggatgacgagggtgaagatgaagatctcaacattaaaagtttttacgaacatacactcgtttttgacgatttcgatgagctgggctcgggttcggatggcagcatgatggaactcggatgcgataatcacgttgaggatgatacgaaggttataagcactcttcaagagaagccaccatcaatggcagatgcgttaaaagcgatacaggagttcacaatcccgcaagtaattcatcaagaaccattctacagcaatcctgtggatgttacggggcgaaaagaagtgggtcacattgtgctcaacatcggaggaaacagtcttaacgatatggaagagtttcatagcgttgtgagcgatatgaactcgatcaacaactttcgccataaaaaactaagcgcaatctatggagacagtctgagtgcaattttgggcgattcatctcgcccagacgctgggaaaatgagagaactgttggcaacggaacagtcggttatcgtggtaccggctgcaaagcccccatcaaaacatgaagccaaagtttggctgaaagccatggagaaaattaagactgaagaagctgttcctgtggagcaagacagcccgatcaaaattaagaaaatgcaagcaattatggtcggtgagggaacaacctccacgcaggaagcacaaagcatcaaaatcgatcacgacagcacactcaatctaagctctctgattacagcggataatcccgtagatagcagtgcgagaagcacgctggtttcgaaaattttctccatgaacacaaaatcctcccccgcaatgcgattggaccacgagaacggatcaccatctgtttctagcggaaaggaacatctcgagctgctcagttacagtgctcggaggaagcgacgcaaaaccatgaaagcgcggctatcgctaaaacattccgggaatatttccgccgtgacgccgaacaacaacacctacggattcaaggtcaactacgaaaaccttcagaaagcaaaagcaacgtgcgagtacaacttcttgaccatcatgtccgtcgaagtgcacattcagacgagaggtgaattgcgaccaaacccggaaatagatcccatatctgcaatcttctatcgcatccataatgatgtgccggaagatcaccgtcgggcgccatccgtttgtggtatcatcctgaatcacgaacacggtctggctgcaacggaccgactggatccgtacaaatacaacaagtgcaattatatggccgatgtggtaacggtgtcgaacgagagggagttgtacgagaaatttctgatgttgatctcgttttgggacccggatatcttcgccgggtatgagattgagcaagcttcgtggggatacattatccagcgggggtacagcttggagatgaaccttatgaaaatgttgtcgagggtgccgacggcggagaaagttcacgtttccgaggaagaagagcaagagctgctggagatgcatgaatacagtgcgggattaaagattcccgggaggatattactggatatttggcgcctgatgagacacgagatagcgttgacgtcgtacactttcgaaaatattgtgttccatattttacacaggcgagtttcatgccatgctttcaagcaattgacgagactgtggaacaaaccgtactccaagtggatcgtactggaatattatctggagagggttaacggtaatcttgaactgttgcatcagttggatttgatcggtagaacagccgaattggccaagctttttgggattcagttctacgaagtgctctcgcgtggctctcagttccgagtggagagtatgatgctgagaatagcgaagccgaggaatttcgtgtccgtgtcaccgagcatacagcaacgagcgcatatgagggctccggagtatctaccgttgatattggaacctgagtcgaggttctatgcggatccattgatagtgttggatttccagagcttgtatccaagcatgatcattgcatacaattactgcttttcgacgtgcctcggtagggttgaacatttgggacaatccgagccattcgaattcggtgcttctcatcttcggctgtctcctcgaatgcttaaagtactcgtagagaagaatcttatcaccatctcaccatgtggcattgcgttcgtgaaatcatccgtgcgagagggcatccttcccaggatgttgaatgaaattttgaccactcgtctcatggtgaaaggttccatgaagctgcacaaggagaacagtattctccaacgagtgctccattctcggcaactcgggctgaagctgatcgccaatgtcacgtatgggtacacggcggctaatttcagcggtcgaatgccctgcgtcgaggtgggcgatagcgttgtaagtaaaggtcgtgaaacgttggaacgggccatcaaaatggttgagaccagcgagcggtggggtgccaaagtagtgtacggcgatacggattcgttgttcgtgctttgtccgggccgaaccaaggagcaagcgtttaaaatcggagcagaaattgccgatgccgtgacgaaggataatcctccaccggtgaaactcaagctggagaaggtttaccagccgtcgatattacagacaaagaaacgctacgtgggttacatgtacgaaacaccggaccaggagaaacctgtttatgaggcaaagggaatcgaaacggtacgccgcgatggctgtcccgtggtcagtaaaatgctcgaaaaggtcctgcgcatcctgttcgaaacgcgggacgtttccaaagttaaagagtacacctgtcggcagttctccaaaattctcgaaggacgggtcaatctgcaggactttatatatgccaaagagtttcgcggcgaggatgggtacaagccgggagcatgtgtaccagctttggaactgacgcgccgctggaaagtggttgatcctagacgagaaccacgccggggtcaacgtgttccgtacgtgattatcaacggtccgcccttggtgccattgattcgactggtcagaagtcctgatgagttgctggcggataatggattgaaaatcaactctaattactatattgggaaggcaatcattccgccccttaatagatgtctgcttctgattggtgcagacgtgaaccaatggtataacgatatgccacgaaagtaccaactgttacacaataccggcggaaagcgttcgtcgcttgcaagcgaattgcagttaccgaaaaagagtacgatctcacagtacttctccaccactagctgcatcggagattgcggcaatcagagccacagtggagtgtgcactgaatgtcgcaagcgtccccaaagaactgttacctatgtgatggataagattaaccggttggaaaggcgagttgaactttgcgaaaagatgtgtcgatcctgctgtcagcggaattttgaaacggcatgcatttctctggattgccctgtgttatttgtgctgaaccaacgcactcgagagtacgctcaggttcagtattatcgtgatcttctcgaacagatgttctga

SEQ ID NO: 2676 - protein, 2080 aa, Aedes aegypti
MVRRGGQHVTSIRIVSVDHYMHKPEPRFDTCYSEFRGSNVKQVPVIRLFGSTADGTHSCVHIHGVFPYLYVPFDGNTADRTAVDRLMYQIASSLDKAINVSLGNANSAATHVFRIALVKGIPIYGYHRKEHQFFKIYMYNPYLIRKANNLLMNGVILSRVFQTFESHVPYILQFFIDYNLYGMSLLDVLESAIRPRTETGEEGHLQKMSTSEYEIDILAGDILNRHTLEQEKRSEYANPGIASIWNDEIARRKLLGMEQPEALSLSQSGKVEIVTESDRFFRSVLASKLTGSNNANRPVEGEETRLKPPVSFYPSEVADDERLLEASCVQDHKHFSQYSSFNMSNTVYDFDGSQVDEDRIVSMSQNPDATFAEEDHQLLDIMRELEEHENRDVENDSLLAPLTQQNERRITSTGGSGLSLSQSSNKRLNATLSGDLEMLSLMGDDKKNDDGIQVQLQDNSTLDSDDEFLLDYTMKMDPKTAEDLLNDSDDDILNSSVIPQLDGADDGQLPMLRSKRTSQNRSPSGALSNGKLNGHDEPGIKRLKHVLVTKMSNEFEMHNVPTLTNGVHKVKPLSKPRKKIKLDQSNTTIPSETRSSVKPQLFLELQRVARFFTIDACLLRSIHLKYSPPPSTVRPSANFFLVHTEPDHGGHPKRLSPRKFPQCRSTERQKPFPPKRKTTRYAKKSAVPNQNNCFRCYECESMPESPVKKPAKTPNASPLKERDPSPFDVCKLAREYDLANNYDPQEGLSRGPVRRGRSRGRGRGSRRGRPVRKQPSPEPVPEPEPEPDPEQQIPPQPEPEIDVILSQKFQSIIKLSPKVLITALSQSEVTNLQVKKADPTSMETIEISSESEVIHISDEESRSSGEQKRLSIPEISQEAAQVANRSPISTKAMTEDDEGEDEDLNIKSFYEHTLVFDDFDELGSGSDGSMMELGCDNHVEDDTKVISTLQEKPPSMADALKAIQEFTIPQVIHQEPFYSNPVDVTGRKEVGHIVLNIGGNSLNDMEEFHSVVSDMNSINNFRHKKLSAIYGDSLSAILGDSSRPDAGKMRELLATEQSVIVVPAAKPPSKHEAKVWLKAMEKIKTEEAVPVEQDSPIKIKKMQAIMVGEGTTSTQEAQSIKIDHDSTLNLSSLITADNPVDSSARSTLVSKIFSMNTKSSPAMRLDHENGSPSVSSGKEHLELLSYSARRKRRKTMKARLSLKHSGNISAVTPNNNTYGFKVNYENLQKAKATCEYNFLTIMSVEVHIQTRGELRPNPEIDPISAIFYRIHNDVPEDHRRAPSVCGIILNHEHGLAATDRLDPYKYNKCNYMADVVTVSNERELYEKFLMLISFWDPDIFAGYEIEQASWGYIIQRGYSLEMNLMKMLSRVPTAEKVHVSEEEEQELLEMHEYSAGLKIPGRILLDIWRLMRHEIALTSYTFENIVFHILHRRVSCHAFKQLTRLWNKPYSKWIVLEYYLERVNGNLELLHQLDLIGRTAELAKLFGIQFYEVLSRGSQFRVESMMLRIAKPRNFVSVSPSIQQRAHMRAPEYLPLILEPESRFYADPLIVLDFQSLYPSMIIAYNYCFSTCLGRVEHLGQSEPFEFGASHLRLSPRMLKVLVEKNLITISPCGIAFVKSSVREGILPRMLNEILTTRLMVKGSMKLHKENSILQRVLHSRQLGLKLIANVTYGYTAANFSGRMPCVEVGDSVVSKGRETLERAIKMVETSERWGAKVVYGDTDSLFVLCPGRTKEQAFKIGAEIADAVTKDNPPPVKLKLEKVYQPSILQTKKRYVGYMYETPDQEKPVYEAKGIETVRRDGCPVVSKMLEKVLRILFETRDVSKVKEYTCRQFSKILEGRVNLQDFIYAKEFRGEDGYKPGACVPALELTRRWKVVDPRREPRRGQRVPYVIINGPPLVPLIRLVRSPDELLADNGLKINSNYYIGKAIIPPLNRCLLLIGADVNQWYNDMPRKYQLLHNTGGKRSSLASELQLPKKSTISQYFSTTSCIGDCGNQSHSGVCTECRKRPQRTVTYVMDKINRLERRVELCEKMCRSCCQRNFETACISLDCPVLFVLNQRTREYAQVQYYRDLLEQMF

SEQ ID NO: 2677 - DNA, 5148 bp, Magnaporthe grisea 70-15
  CDS (1)..(5148)
atggacgtgttcaaggtgcgtctgaactgcatcgatcactaccaagccacgcccacgcaatatgacccctgtctccgaaacgatgttcggcattcccaactattcaaggagcccaaggttccggtgattcgcgtctttggctcaacccagactggtcaaaaagtctgcgcgcatatacatggcgcgtttccctatctcttcattgagtataatgggaagttggatcaagaagaagttggcgcattttcataccgactgcatctgtcgattgaccatgccctcgctgtcagctataggcaggatgcctatgctcgggacacgcccaagtatgtggcgcgtataacgctcgttaagggcgttcccttctatggcttccatgttggctacaagtattatctcaagatttatatgctcaaccccgttgtcatgacgcgactggccgatctgctgcaccaaggtgtcattatgaaacgaaaatttcaaccatacgaggctcatttgcagtacatcttgcaattcatgaccgactacaacctttatggctgcgggtacatcgaggccagcagtgtcaaattccgtgccccagtgcctcagatagacgacgatgacatggacagcgtcatgactccccatatctggcacaaccagtcgatatcccaaaagcagatcacagatcatcactctctgcctagggccagtcattgccccatcgaagttgatatatgcgtacaggacatcctcaatcgtaaagatgtcaaggaacgcagacttcatcatgattttgtcgagcggctgaaccccttacctaccgatatgaagctggtagctagcatggcagggctgtggagggacgaaacgaaacgtcgaaaaagacagctgggcatctccgatccgaaaagcagtccatttcctgctgaggcgcttgtctccatgtcgcacgatccgcgagactcgcagcctgccggctggctacacgaggaagagttccgtgcagagattgaagagctcataacaaccgagagagccaatgacgacacagacatcacattcgactcgtttgtgccagaaccgcctcctcttgattcggccatcaagactgtacttgagtctgtcgaggatctctaccctcaacacttggaggcatccttgggggagatgtcgactatttcggttgattttgaccctgcaagcagtattgacgttgatgagagaggtgcgcgccggctaggcagaccggagactatggacgaagacccttgtccggatgattctgatgaagaaagactgcgagaagcccagcgtttggaggaggcaaagaaagaaaaggctttgcaggactatcccaccacagcttcgataaacggactggttggacttgataccagtagtctgattactggaaagcgaccagagatacccataacacaggagctcatcgatgctgctattgaggaagatctgttgagcgaggttccagctcctttgcaaacgccaatcttgcgagagggattgaagcgacatgcccacccaaaatatgaggatcatccttcaaaacgaccaaggatacgaccagctcgcataaacaacttgacatttgtcccccctgaggacggtctacgagcccggtatgaacgccgtgctgcgaatgtggccaaagccgaaagccaacccccatcgtcttcccaacgacagacagtggatgaggccgccccgttccgtacgcctttgccgcgcaagtcatctatgatgcacaactcggcatccaagtctgttaatcgtaagctcagttttgctgtcgtcaaagatccgaatgaccctgagacaaagcttcgattgagccaaaattccaactcgcaaggcagcgacacatctgaaaccccgaagcttctttcttttgattcgtcgttgccagatccggaggaggcctcaccgcagaaggaagaaaaccaagaattctaccaggtgggccagttgccaaatccctttggaccctccgacaagtctcaggaacatgaccactcagaagatgaagtctttgcacatacctcaatggtacctgttagccatgttctccccccgaccgcagaggaggtctgcgcaactatggcggactacggaatacccgatgttgtataccgggacgcatattacagtaaagagaaagatgtgccacttcgtccaagagagtttgctgggcgtcaatttcggctccggggtaacacgttaccatacctacccgagttcactgctgatagggctgcaccggatgcatgggccgttccagaggcacgactaccagacaaatcaaaacttaaaattgaggaggagatacgccggaataaatgtacaatcaagacatgggaaattgcacaaccacctccgacgtttgaagaagtatcgggctggtgggaggaaaaggagattaagaagaaagagtccggatcgaggccaaagagccatccggcctctccacagtcgacacagttggctcgtcgccagctttcacagatcgaaggagcgacgcccaagaacaaacatggcttcaggtactcgcagaagcaaaagactaccagcgttcagcatgaggttgcttacatgagcacaatgagtatcgagatccatgttaacaccaggggaaaacttgtccctgatccggagaaggacgaggtcaagtgcatattctggtgcgttaggtcagatgataaatctaacgaggctagcagccaggctcctgatggtttacaatcgggcgtcgtggttctatctgaagaaggcaccctggctgaacgcatcaagcaccaaataaagggtgagctattggaagaaacatccgagctcgacctcatggttcgtatggttgagattgttcgaacgcacgacccagatatcctgacaggctacgaggtccatggtggctcttggggctatttgattgagcgcgcaagatgcatgtacgactataatctctgtgacgagttctcccgtatgaagtcgcagtctcatggaagatatggcaaagacgcagaccgatggggtttcaacactacttcgacaatccgagtgacgggtagacacatgatcaacatctggcgtgcgatgcgaggagagctcaacctacttcaatatacaatggaaaatgtcgtctggcatctgctacaccgtcggataccacactactcgtggcagacgctcaccacgtggtatggtagtggacggcacggcgatcttgataaactactacgctactaccaaacaaggacgaggcttgatattgagatccttgaggagaatgggctgatctcgcgaacgagcgagcaggcaagattgcttggcgtcgacttcttttcagtgttctcacgtggatcacagttcaaggttgagtctatcatgtttcggatcgccaagcccgaaaactttatgctcgtatcaccgagtcgaaagcaggttggcgggcaaaatgcattagagtgtttgccgctggtgatggagccacaaagtgcattttataacagtccagtgctggtgctagacttccagagtttgtatcccagcgtcatgattgcctacaactactgctactcgacgttcctggggcggatcgtggattggcgtggaaccaacaagatgggatttgccgagtatagaaggcgaaagcggctactcgagttgttgcaagagcacatcaacattgcaccaaacggcgtcatgtataccaaacctgagatcaggaagtcgctgcttgccaagatgttgacagagattctggaaacaagagtcatggtcaagagtggcatgaaacaagacaaagacgacaaaaccctccagcaattgctaaacaataggcaactggctctcaagctgctggcaaacgtcacatatggctacacgtctgcgtcattctcgggcaggcttccgtgttcggagattgccgatagcattgtacagacaggccgtgaaactctggagcgagccattgccttcattcactctgtcccgagatggggcgctgaagttgtctacggggacacagacagcctttttatccacctcaagggtcgcacaaaagagcaggcctttgagattggaaacgaaatggccaaggcaattactgacatgaacccgcggcccatgaagctcaagtttgagaaggtctacctaccatgcgttttgctagccaaaaagcgctacgttgggtacaagtacgaacacgtcgatcaacaagttcccgattttgatgccaagggcatagagacagtccgccgtgacgggacgccagcggagcaaaagatcgaggaaaaggcgctgcggctgctctttgagacggcggacctaagccaaatcaaggagtactttcaacgacaatgcaacaaaatcatgcgtggtcaagtgtcaatccaagacttttgcttcgccaaggaggtcaagctgggcacatatagcgaccgcaacggtgtaggccccgcaccgcctggcgcgctcattagcacaaagaagatgctggccgatccgcgagcggaaccacaatacggcgaacgtgttctttatgtcgtcgtcacaggcgcccctggcgcgaggcttgccgacaggtgcgtcccgcccgaagacatgctatcgcccgccggtgcgcacctacgacttgatgccgactactacatatccaagaacctgattccgccgctggagcgcatcttcaacttggtcggagcgcacatcagaggttggtacgatgagcttcccaaagtgcagcaggtaaggcgcgtcgtggtcgattctgggaacgggcacaacagctggttcgggagcatcatggggaacaatggcgcacaaaaggccaaaaaggtcacgcttgaaagctatctgcaagtgatgaactgtgcagtatgcaatgtccgcatccgccccgctacccagaaaaagaaaacgccggcaccccggcagcaactaccaccagtacagtaccaccccctgtttgggttcggccgttttgggccgcgacctccacctcaaccggcacccaagaagaagaagaagaagaaccctgcaaacgatgtcgtggctggcgcacgagcgcaagcggttttccgaggtggcagatgtgtgtcggagctgtgccggcttggcaccgggcgacgtcgcaagtgtacatga

SEQ ID NO: 2678 - protein, 1715 aa, Magnaporthe grisea 70-15
MDVFKVRLNCIDHYQATPTQYDPCLRNDVRHSQLFKEPKVPVIRVFGSTQTGQKVCAHIHGAFPYLFIEYNGKLDQEEVGAFSYRLHLSIDHALAVSYRQDAYARDTPKYVARITLVKGVPFYGFHVGYKYYLKIYMLNPVVMTRLADLLHQGVIMKRKFQPYEAHLQYILQFMTDYNLYGCGYIEASSVKFRAPVPQIDDDDMDSVMTPHIWHNQSISQKQITDHHSLPRASHCPIEVDICVQDILNRKDVKERRLHHDFVERLNPLPTDMKLVASMAGLWRDETKRRKRQLGISDPKSSPFPAEALVSMSHDPRDSQPAGWLHEEEFRAEIEELITTERANDDTDITFDSFVPEPPPLDSAIKTVLESVEDLYPQHLEASLGEMSTISVDFDPASSIDVDERGARRLGRPETMDEDPCPDDSDEERLREAQRLEEAKKEKALQDYPTTASINGLVGLDTSSLITGKRPEIPITQELIDAAIEEDLLSEVPAPLQTPILREGLKRHAHPKYEDHPSKRPRIRPARINNLTFVPPEDGLRARYERRAANVAKAESQPPSSSQRQTVDEAAPFRTPLPRKSSMMHNSASKSVNRKLSFAVVKDPNDPETKLRLSQNSNSQGSDTSETPKLLSFDSSLPDPEEASPQKEENQEFYQVGQLPNPFGPSDKSQEHDHSEDEVFAHTSMVPVSHVLPPTAEEVCATMADYGIPDVVYRDAYYSKEKDVPLRPREFAGRQFRLRGNTLPYLPEFTADRAAPDAWAVPEARLPDKSKLKIEEEIRRNKCTIKTWEIAQPPPTFEEVSGWWEEKEIKKKESGSRPKSHPASPQSTQLARRQLSQIEGATPKNKHGFRYSQKQKTTSVQHEVAYMSTMSIEIHVNTRGKLVPDPEKDEVKCIFWCVRSDDKSNEASSQAPDGLQSGVVVLSEEGTLAERIKHQIKGELLEETSELDLMVRMVEIVRTHDPDILTGYEVHGGSWGYLIERARCMYDYNLCDEFSRMKSQSHGRYGKDADRWGFNTTSTIRVTGRHMINIWRAMRGELNLLQYTMENVVWHLLHRRIPHYSWQTLTTWYGSGRHGDLDKLLRYYQTRTRLDIEILEENGLISRTSEQARLLGVDFFSVFSRGSQFKVESIMFRIAKPENFMLVSPSRKQVGGQNALECLPLVMEPQSAFYNSPVLVLDFQSLYPSVMIAYNYCYSTFLGRIVDWRGTNKMGFAEYRRRKRLLELLQEHINIAPNGVMYTKPEIRKSLLAKMLTEILETRVMVKSGMKQDKDDKTLQQLLNNRQLALKLLANVTYGYTSASFSGRLPCSEIADSIVQTGRETLERAIAFIHSVPRWGAEVVYGDTDSLFIHLKGRTKEQAFEIGNEMAKAITDMNPRPMKLKFEKVYLPCVLLAKKRYVGYKYEHVDQQVPDFDAKGIETVRRDGTPAEQKIEEKALRLLFETADLSQIKEYFQRQCNKIMRGQVSIQDFCFAKEVKLGTYSDRNGVGPAPPGALISTKKMLADPRAEPQYGERVLYVVVTGAPGARLADRCVPPEDMLSPAGAHLRLDADYYISKNLIPPLERIFNLVGAHIRGWYDELPKVQQVRRVVVDSGNGHNSWFGSIMGNNGAQKAKKVTLESYLQVMNCAVCNVRIRPATQKKKTPAPRQQLPPVQYHPLFGFGRFGPRPPPQPAPKKKKKKNPANDVVAGARAQAVFRGGRCVSELCRLGTGRRRKCT

SEQ ID NO: 2679 - DNA, 5046 bp, Gibberella zeae PH-1
  CDS (1)..(5046)
atggacttgttccggatcagactgaactgtatcgaccactatcaagcgacggcaacccagtacgaccctcagcttcgtaacgatatacgtccttcccagatttccaagggccccaaagttcctatagttcgcatttttggagctactgaaacaggccagaaagtatgcgctcatatccatggcgcgttcccgtacttgtacgtggaatacgaaggaggtttatctcccgatgaagtcggtgcttatatctatcgtttgcatctatccatcgatcatgcgttagctgtaagctaccgcagagatcaaaagaacgataatgcgaggttcgtggcgaggattacccttgtcaagggtattcccttctacgggtttcatgtcggctatcggttcttcttaaagatctacatgttcaaccccgtcgtcatgactcgtttggcagatctccttcaacagggtgtcataatgaagcacaagtttcagccgtacgaagcacatctccaattccttcttcaattcatgacagacttcaatctgtatggttgcgactatctagagtcatccagtacggggttccggtccccagttcctgaatatggtgaagaaacgaattcctcgcatctttggcacagcgaatcaataccccaggaggacgttaccgacgaaactacactccctcgaagcagtcactgttcacttgaggttgatatatgtgtccagaatatactcaacaggcaccgagttcaagaaagaccacttcatcatgactttactgagcggaccaacccccttccctcggatatgaagctcgtttacagcatggccagcctgtggaaagatgagactaaaaggcgcaaacaaaaaatgcaagaccctagtgaaggcagcagcccgtttccgccagaagttcttgtatcgatgtcggcaaacccgcgcgactcacagccacaaggttggattcatgaggaggggcatcgaattgagattcagaacctcatctcagaggagcaggtttctattgacggagatgagcttactttcgagacctttgcgaagcaccacccctatgaagcgaatatcagcactgcgttggagtcagttgaggaccttttcccgtccaaactcgcactcgctttgggactaccctcaggtttgcagcccaatcaggatccggaaagtagcatccttgttgatgagggcaaagtgcgccaagtcagagaggccgatgacgacttcttgcctgatgattcagacgaagaagccatcactgcattggtggcaatggaaaaagctgccgcaaaggggtttcgagatcccacaaaccaattgctagaagaagacctggaacaagcggcagcactcgatatcagcctcggtgaattaggtcagagaccgttctggtcatcaatcattggcgtcggtcgaagcggcctggcctctggcaagttgcccgatattcccttgggcccagaattgtttgattatgcagaggatcagggttcgacacaactcaaacggccgatgcctgacgtctcatcagtccaaatgtccaacaaaaggcttcgatttgatgagcagctgatgattgacgagaacgatatggacttggtccctattccttcaacagatctgaataaaccactcgtatcctctttcaggggatcatccattcttaaaggcccttctagtatcagcaaaagcattgcctctgtcttgaaaggtgctgccgggtcaaaccagaaactgaacttccctactgtcaaagaccagaacgaccccaacacgaggctccgtctcagtcaactgagtcaaaagtccgcctcgcaacaagccgatgatggccatcataccaagcatgtctcctttgatcccagcagctttctgcccgctgaggcaggaccctcccaaatgactttgtcatcatccttgatatcatctggaggagatgaagaggagaaggatagccaacagtctaagatccagcgagctatgcgcagattcgccagtcctcaagtacatttgcttttttctctgcccccatctgcggcttctgtggtttcctctttgaagggccacatgctacctgatgtcatctatcaagatgcatattatagtaaggagaaagatgttcctggccgaacacgtgagtacgccgggaaagagttccgtttggaaggtaacactttgccatttcttcctgaattcgatccaacagctacatcgccagccagctacggactgaaatatgaatctcttgacagggtcaccgctgaacttcagtatgaacgacaaggaaaggggtgttcctggaggagctgggagtttgcaagcctcccaccgacatacaaggaggttgaggattgggggcttgaacaggagcgcaaagccaatacgccagacggatccgggttgccgtcaactcatagaaactgtcactctcaaatcgaaggaccaacgccaaagaataggcacggcttcaagtacacgccaggcaagaaagcgacaagtgtcaagcacgaggttcaatacatgagcaccatgagtctggaagttcatgtgaacacgagagggaatttcgtgccaaacccagaggaagatgaagtccagtgtgctttctgggcaatcaaatccgacggaacttccaccgacagtcagagctcagcagggactgtccagacggggatcttgctattgtctaacgatgctgagtttacacagcgtgttcagcgccagacatctgccgatatcattgaggaaacgtcggaactggatctcatggtccggatggtagagatagtgaggaaccacgatccagatatcctgacagggtatgaagttcatggcagttcatggggctatctaattgagagagcacgcttgaaatacgactataatctttgcgacgagttttctcgcatgaaaacagagtcacatggcagattcggcaaagacaacgaccgatggggtttcaataccacatctacaattcgagtcacaggtcgacacatggtcaatgtctggcgtgcgatgcgaggggagttgaatcttcttcaatacacgatggaaaacgtcgcttggcatcttctccataagcggataccccattactcttggaaatcattgacaagttggtacaaaagtggcaagcatcgagagctcaacaggatgttgagatactaccagaaccgcaccaaacttgatattgagatattggacgccaacgaattgattgccagaactagtgagcaggctcgactccttggcgtagatttcttctcggttttctcgcgaggatcgcaattcaaggtcgaatcgatcatgttcaggattgccaagccagagaactttcttcttgtgtcgccttctcgcaaacaagtcggtggccagaacgctctcgagtgtttgccactcgttatggaaccgcagagcgccttctacaacagccctctcctcgtgcttgactttcagagcctctatccaagtgtcatgatcgcctacaattattgctattcgaccttcttgggtcgagtcactaattggagaggcacgagcaagatgggttttaccgagtataaacgtcagcaaggtcttctcacactcttgaaggattacatcaacatcgcaccgaatggtatgatgtatgcaaagacggaaatccgcaagtcactccttgccaagatgctaactgagatcctcgaaacccgagtcatggtcaaaagtggcatgaagcaagataaagatgacaagactcttcaacaacttctcaacaatcgacagcttgccctcaagctgctcgctaacgtcacctatggctatacttcagcttcgttctctggtcgtatgccttgctcagagattgcggacagcatcgtgcaaacgggtcgggagactcttgaaagagcaatcgcctatattcactctgtcgagaaatggggcgcggaggttgtgtatggcgacactgatagtctgttcatttccctgaaaggccgaacgaaagatgaagcattcgacattggaaacgagatctccaaggcaatcaccgagatgaacccacaaccaatcaaactcaagttcgagaaagtctaccacccttgtgtcctcctcgccaagaaaagatacgtcggctacaagtacgaaagcaaggaccaggtgaagcctgagtttgacgccaaggggattgagactgtccgccgagacggcacgcctgcggagcaaatgatcgaggaaaaggctctccgtctactattcgagacggcagatctgagccaggtgaaggagtacttccaaaagcaatgccaaaagatcatgcgcaacaatgtttcggtccaggacttttgctttgcgaaagaagttcgtctaggcacgtactctgataaaggcgcaccgcctgctggtgccctcatcagcaccaagcgcatgcttcaggatgctcgtgcagaaccacaatatggcgagagagttccttacgttgtcatcaccggtgcgcccggtgcccgacttatcgaccggtgtgttgcccccgaagagcttctcgacaatccgcattggcagctggacgccgagtactacatctccaagaatctcataccccctctcgaacgcatcttcaatctcgttggtgcaaacgtgcgtcaatggtatgatgagatgccgaaggtgcagcgtgtccatcatgcaactacactgagcaataagaaaacgactctcgagtcgtacatgaagtccacgcactgtcttgtctgcaacatcaaattctcacaggaaggcaatcccctctgcccaacctgtcgcacaaacattccctcggcgttactctcgcttcaaacgcgattaactaccgaggagcgttgtttgcaggagatactctccctttgtcgcagctgctctggtgttgggcctgtggaggatgttcagtgcgatagcaaggattgtcctgtattctggacacgcatgaaacaaatcagcaaaacaagaggggtgcggagtaccaaccaacctgtgattcaatctctgatagaggatgttgagaatttatcgctggattggtaa

SEQ ID NO: 2680 - protein, 1681 aa, Gibberella zeae PH-1
MDLFRIRLNCIDHYQATATQYDPQLRNDIRPSQISKGPKVPIVRIFGATETGQKVCAHIHGAFPYLYVEYEGGLSPDEVGAYIYRLHLSIDHALAVSYRRDQKNDNARFVARITLVKGIPFYGFHVGYRFFLKIYMFNPVVMTRLADLLQQGVIMKHKFQPYEAHLQFLLQFMTDFNLYGCDYLESSSTGFRSPVPEYGEETNSSHLWHSESIPQEDVTDETTLPRSSHCSLEVDICVQNILNRHRVQERPLHHDFTERTNPLPSDMKLVYSMASLWKDETKRRKQKMQDPSEGSSPFPPEVLVSMSANPRDSQPQGWIHEEGHRIEIQNLISEEQVSIDGDELTFETFAKHHPYEANISTALESVEDLFPSKLALALGLPSGLQPNQDPESSILVDEGKVRQVREADDDFLPDDSDEEAITALVAMEKAAAKGFRDPTNQLLEEDLEQAAALDISLGELGQRPFWSSIIGVGRSGLASGKLPDIPLGPELFDYAEDQGSTQLKRPMPDVSSVQMSNKRLRFDEQLMIDENDMDLVPIPSTDLNKPLVSSFRGSSILKGPSSISKSIASVLKGAAGSNQKLNFPTVKDQNDPNTRLRLSQLSQKSASQQADDGHHTKHVSFDPSSFLPAEAGPSQMTLSSSLISSGGDEEEKDSQQSKIQRAMRRFASPQVHLLFSLPPSAASVVSSLKGHMLPDVIYQDAYYSKEKDVPGRTREYAGKEFRLEGNTLPFLPEFDPTATSPASYGLKYESLDRVTAELQYERQGKGCSWRSWEFASLPPTYKEVEDWGLEQERKANTPDGSGLPSTHRNCHSQIEGPTPKNRHGFKYTPGKKATSVKHEVQYMSTMSLEVHVNTRGNFVPNPEEDEVQCAFWAIKSDGTSTDSQSSAGTVQTGILLLSNDAEFTQRVQRQTSADIIEETSELDLMVRMVEIVRNHDPDILTGYEVHGSSWGYLIERARLKYDYNLCDEFSRMKTESHGRFGKDNDRWGFNTTSTIRVTGRHMVNVWRAMRGELNLLQYTMENVAWHLLHKRIPHYSWKSLTSWYKSGKHRELNRMLRYYQNRTKLDIEILDANELIARTSEQARLLGVDFFSVFSRGSQFKVESIMFRIAKPENFLLVSPSRKQVGGQNALECLPLVMEPQSAFYNSPLLVLDFQSLYPSVMIAYNYCYSTFLGRVTNWRGTSKMGFTEYKRQQGLLTLLKDYINIAPNGMMYAKTEIRKSLLAKMLTEILETRVMVKSGMKQDKDDKTLQQLLNNRQLALKLLANVTYGYTSASFSGRMPCSEIADSIVQTGRETLERAIAYIHSVEKWGAEVVYGDTDSLFISLKGRTKDEAFDIGNEISKAITEMNPQPIKLKFEKVYHPCVLLAKKRYVGYKYESKDQVKPEFDAKGIETVRRDGTPAEQMIEEKALRLLFETADLSQVKEYFQKQCQKIMRNNVSVQDFCFAKEVRLGTYSDKGAPPAGALISTKRMLQDARAEPQYGERVPYVVITGAPGARLIDRCVAPEELLDNPHWQLDAEYYISKNLIPPLERIFNLVGANVRQWYDEMPKVQRVHHATTLSNKKTTLESYMKSTHCLVCNIKFSQEGNPLCPTCRTNIPSALLSLQTRLTTEERCLQEILSLCRSCSGVGPVEDVQCDSKDCPVFWTRMKQISKTRGVRSTNQPVIQSLIEDVENLSLDW

SEQ ID NO: 2681 - DNA, 4446 bp, Candida glabrata CBS 138
  CDS (1)..(4446)
atgatatcgggagaggaaacagacagcattcaagatggagcgaatgaggttgaatttgatagtttcgatttgcaactaaataactacgatcattacatggcgtatccaacttccttagacaggacacatggatctagtttaccattgaagaaattccataaggtcccggttattaggatattcggatgtttgcgcacaggtcatcaactgttgtgccatgttcatgggatttttccatacttttttgtcaaatatgatgggaaagaggatgacacttccataatcataaatgaaaagtgtgctaagttacatcaattgcttgaacagattttgcgagataaaatgaagagtaaaggatccagaaatgacaaacaagacgaaacaaacctcaacgaactggtatatatagccaatgtttcagtggtgaaaggtgtcccattttatggctaccatgtagggtggacacctttctataagatatcgttgttaaaccctagcttaagtgaacaggtttgtaatattattagggaacagaatgttctacaaaacggacagaacgaggtatatgaatcccagttcccatatttgttgaagtttactgccgatttcaatttatttgcttgttcatggattaacttcaaaaaggtatatttcagagcgccagtactaaatgaaatgctgaatatggacgaaataatgatgaccaaagagttgagggtattattggatagatttcattctaaagatactgtgttaaaaaaaactatgtttccaagaattggcaatggtttgttagagatagatgtaatccctcagtttatcaaaaacatcgaccaaatcaaaataagaaacatccaccatgatctgtcagagaaaaaagaaagtgttaattacttagatgatggcccatatgtttcttctactaaaaatatgcttaaggacgttgaaatacagcgtaagttgtattcactggaagaatacaaaaaagcagctgatatatcaaggaatgaaaacgatatgatttggaactcaagtcatcagtttgagatgtttttaaggaaagctttatccagtgttaaagtttcagataaggattcgaattttctttcaggtcattttaatgcgaatgactttcttaaaacaccatttgaaatgattgatgagctgtggcccactaaatttgaatcctctatagatttgaacgatgaaaacgaacgacatgataaaaatgatcagctgttagatgttggcgaagattttgataaggcggaagagcgagacgaagacatactgggtgaaccaaatgaggatgattatatcgagaaagaaatgcattctcaggataatggccaattcataaatgtgagtacatcagttatctcaacaacacagtcattggataagcttttgacacagagtatagttaaaaatcaacgaaagttaaagatagggaatgttctgtctgatttaggtaatgttgctactaattaccataattattttccatctaacataaagaagtactataggtataaacaatgcaatatatcttatagttctatgaatgaagatcttcaagataatgggcttcctattaatgattatatgggcccatttttctccgatccttgtgatctccataaaaaagactatcagtacgctggtaaacaatttgatataacatcaacacatttaatgaaaaggtacccattagacttcaaagaggatctagtacggttgactaagcaaagacttgataatgatgtactttttgcttcgtggaaatatttgaagatgccgccatcatttaatgatgttgcagaatccgttactagaaaagagcgagccagacattccatttcccaaattaaaaaacccacagctacaaagagtttgggaaatacttcctccataaaacggtcggaatcaattcacgataatttaacgcatttttcgctcgaaatccatgtaaatactagaggtgaccttttaccagatcccaggaaagatgaagtatcagttatattttggaaggtagacagtgacacttttcctttcagtatagatttacagcttgaaggaattatgtatacaaacaagcttgaaagggagaatcttattgaaactttggaatctatatccggaggggtaccaatcatggagtatgaggacgaattttctatgtttgatgccctgacagatctcattctattatttgatcctgatttattgtccggttatgaaatacacaactcatcttggggctacatatttgaaagaagtctgagcgtgcataaatttaacattgctaatgaaatatctcgggtaaacatgggtgctcagttcaaacttcgagattcatggggttttaaaaagagttctggtattagcatcactggacgttatgtgctgaatatttggaggttgttaaggaaagaaattgctgttactcagtactcttttgaaaatatggttcatttgctcctcaagatacgactacctaaatactcctgcagtcatttaacatcgctctggagcaattttaagacaggtaacgaactaaaaacattccttaactattatttgacgcgtgtaagactaaatattggaatcctaaagaaaattagctttacattaaatgtgatggaagaggccagattgataggtatcgattttcaatctgtatataatcgcggctcccaatacaaagtggaatcatttttgattcgtatttgcaaaagtgaaaattatatactgctctcaccttcaaaagttgctgtgcagaaacaaaaacctttagaatgtgttccactagtgatggaaccagaatcagcattttacaagagtccattgcttgttttggacttccaatcattgtatccatctattatgtcaggctataattattgttattctacaatgatgggtagagtgcgagaacttgacggaacaaaacgaacacttggtgtaacaaattttgaactgaagtcggagctgttgaaaaaacttcgagatgatattcgtatagcaccaaatggtgttatttatgctaaagagcacttgaggaagtcaacattatccaaaatgctttctgaaatactggagataagatttatgattaagaagacgatttcagatcttggttctgatcatcaagcgctcaagaaattgctagaatccaaacagctggctttgaaacttttggctaatgttacctatggttatacttctgcctcattttcaggtagaatgccatgctcggatttggccgatagcattgttcaaactggtagagaaacattagaaaaggctgtcaaaatgattgaaagtactgcatcctggggtgccaaagttgtgtatggggatacagatagtttgttcgtctacttaccagggaaaacgaaagaagacgcattcagaattggcgctgaaatttccaatagtattacagcatctaacccaaaaccaataacattaaaatttgaaaaggtctactttccttgtattcttttgagtaaaaagaggtatgttggatattcctatttgtcgagttcccaacttaacccccattttgatgcaaaaggtattgagacggttagaagagacggaacaccagctcaacagaaagtggtagaaaatgccttacggattttgttcgagacaaaggatttgagtaaggtaaaaaattatgtagttgacactttcaccaagatacggagtggaaatatttctattcaggatttctgttttgctaaagaaatcaaacttgggcattataaaagtgagagcacaatgcctcctggtgcagtagtggcaaagaggcttaagaaacaagacagtagagctgaaccccagtacaaagaaagactctcgtatctagtagtgaaaggtaaatctggacagatattaagagaaagatgtgtatcagtatcagaatatttttcaaatgaccattttgccctcgattcggaatactatataacaaaaacgctgattcccccactcgatcggttgtttaatatagttggtataagtgtatccgattggaatcaagaggggcctatgtttgttgagggttccattaaaccatatactggcgcagacaatatccccacttcgactagatgtaaagcctgtgaacaaaacacagtttctggtgatagctatctttgtgacaattgtgtttctaatgagaaaatggctgcatcaaagcttattattaagattcaagccagcgctagtaagttaaaggtactaaatgatatatgcagaatatgcagtagacaatatacaggagacatggggctactgagctccaataatgcattgaagtgtgtatcttatgattgtcctaattattattccaagcttaaagctcagagattaatgcaatctaagcactattattcttggaatgagctgttgcacaatatggatcattggtaa

SEQ ID NO: 2682 - protein, 1481 aa, Candida glabrata CBS 138
MISGEETDSIQDGANEVEFDSFDLQLNNYDHYMAYPTSLDRTHGSSLPLKKFHKVPVIRIFGCLRTGHQLLCHVHGIFPYFFVKYDGKEDDTSIIINEKCAKLHQLLEQILRDKMKSKGSRNDKQDETNLNELVYIANVSVVKGVPFYGYHVGWTPFYKISLLNPSLSEQVCNIIREQNVLQNGQNEVYESQFPYLLKFTADFNLFACSWINFKKVYFRAPVLNEMLNMDEIMMTKELRVLLDRFHSKDTVLKKTMFPRIGNGLLEIDVIPQFIKNIDQIKIRNIHHDLSEKKESVNYLDDGPYVSSTKNMLKDVEIQRKLYSLEEYKKAADISRNENDMIWNSSHQFEMFLRKALSSVKVSDKDSNFLSGHFNANDFLKTPFEMIDELWPTKFESSIDLNDENERHDKNDQLLDVGEDFDKAEERDEDILGEPNEDDYIEKEMHSQDNGQFINVSTSVISTTQSLDKLLTQSIVKNQRKLKIGNVLSDLGNVATNYHNYFPSNIKKYYRYKQCNISYSSMNEDLQDNGLPINDYMGPFFSDPCDLHKKDYQYAGKQFDITSTHLMKRYPLDFKEDLVRLTKQRLDNDVLFASWKYLKMPPSFNDVAESVTRKERARHSISQIKKPTATKSLGNTSSIKRSESIHDNLTHFSLEIHVNTRGDLLPDPRKDEVSVIFWKVDSDTFPFSIDLQLEGIMYTNKLERENLIETLESISGGVPIMEYEDEFSMFDALTDLILLFDPDLLSGYEIHNSSWGYIFERSLSVHKFNIANEISRVNMGAQFKLRDSWGFKKSSGISITGRYVLNIWRLLRKEIAVTQYSFENMVHLLLKIRLPKYSCSHLTSLWSNFKTGNELKTFLNYYLTRVRLNIGILKKISFTLNVMEEARLIGIDFQSVYNRGSQYKVESFLIRICKSENYILLSPSKVAVQKQKPLECVPLVMEPESAFYKSPLLVLDFQSLYPSIMSGYNYCYSTMMGRVRELDGTKRTLGVTNFELKSELLKKLRDDIRIAPNGVIYAKEHLRKSTLSKMLSEILEIRFMIKKTISDLGSDHQALKKLLESKQLALKLLANVTYGYTSASFSGRMPCSDLADSIVQTGRETLEKAVKMIESTASWGAKVVYGDTDSLFVYLPGKTKEDAFRIGAEISNSITASNPKPITLKFEKVYFPCILLSKKRYVGYSYLSSSQLNPHFDAKGIETVRRDGTPAQQKVVENALRILFETKDLSKVKNYVVDTFTKIRSGNISIQDFCFAKEIKLGHYKSESTMPPGAVVAKRLKKQDSRAEPQYKERLSYLVVKGKSGQILRERCVSVSEYFSNDHFALDSEYYITKTLIPPLDRLFNIVGISVSDWNQEGPMFVEGSIKPYTGADNIPTSTRCKACEQNTVSGDSYLCDNCVSNEKMAASKLIIKIQASASKLKVLNDICRICSRQYTGDMGLLSSNNALKCVSYDCPNYYSKLKAQRLMQSKHYYSWNELLHNMDHW

SEQ ID NO: 2683 - DNA, 4356 bp, Kluyveromyces lactis NRRL Y-1140
  CDS (1)..(4356)
atgagtgatatttttggttctttagactccagcttagactccaatgaaatcaacatacagattaataattcagacagctatcaatgcttcccaactctattggattgtaaaactagtaagagccttcctggacttcgatttgttcaggtgccagtactaaggttctatggatgtttatctaccggacacaaagttctaattcattgccatggcattttcccttacatattcatcaaatatgacggacattcgaatgataaagcatcagtaatacggaatagatgtaccagtttgcacaaaatacttgagacacggatgattgaaacttttaccaaaacagattttaaagagaagctaacttccctgaaatacattgctaatgtgtccgttgtcaaaggcgttccattttacggataccacgtaggatatgaaccttactataaaattactcttttgaatggttcatatagtaataaactctctgaattacttagagatggcagaatattcacctcaaaagtggatgtctttgaggctcatataccttatttattgcaaatgatggctgactataacttatttggttgcggatggttaaaactatccaaatgctattttcggcaacctgttctgttaactgatctagatatgaatgaaatattgcacacggactctttggaacgttttttgaaaaaacacttgcatccgaatcaaaatgttttagacatagatccatttcatcgaattggaaagacctttcttgaaatggatattattccacagttcattttaaacagagaagaaattcaattcagggatttacaccatgattttgttgagcttaagaaagaccttcaaacatcagatcaaggatatgttaattctacaaaagatatatggaaagagatacaactgcttaggaaaaggaaagggcttgctgaatatgaaggattaaaagaaatatttcgagaatctcaattacaatataattggaaagaagatgaaaggttggtgaaacactttgatgaagctaagaaacgaatgtcttccctttttaacaaagaaaaagctttaaattttgacaactttgtggatcctttcattaatgagaatttttttgcaagtaccaaagacgcccttcaagaattatggcccaaaataccaaggaatgctagtagtaaagtattctgttggtcagaagtagaattcaaattgaacaaccaatatacttctgttcgtgaacaaaaagtagcgtctacaaacactaaaaatattcccattttgctaaatatttcctccaatgaatcgcactcttcacatgtcagttccaaacgtgcggaggaatcttcatgtcatgacgatattgctaatgaagcaattgctaggaaactggcaaaacgaaaaacatctgctattagaaagtcaacatttcgcccgatgatcagacctagcgtaacacacgctaacatcaaggagagtttatctgctaaccaaattgaagaagttcagtataacgatccatttttctccaatccacttgattgtaaaaggctacaaacggaaatggctggtcgagtgttcaagctatcaagtgatcatatcctctttaaaagaagcatccgtagtaacgatacaacagcaacattaacttcttcaggaagtgtatatgcaagaagcagatggaaatatataagaccaaagccgtcttttaaaagaatagccaatgcgatgaagcctttcaaaggtaaattctcgatggtggaggggaaaacaccagaactaccattcggatacaagttcaagagcaataaaatagaaaaaaataataacgcttctaatagaatgacccatttcaccatggaaattcacgtcaatactcgtgaagataagtttccagatcctaaatatgatgctgtcaggatgatattttggaaagtgcaagatggaacttttccattcgacctggatattactcaagaaggtgttttgatatttctagacgatgtctcgacagaaaattcatggaaaactgccgatcctagtgttcatataactgcttattacgatgaattggaaatgatatatgcattagaagatttagtgaggtttttcgatcctgatatcttgtcaggatacgaaatacactcttcctcgtggggctacttgattgatagatgtcacaagggacatgattatgatgtggaagatgaactctctcgagtcgattataaccagagtagcaaaaaaaaagacagatggggttacactcacgcaacagcattttcgataacgggaagacaaatgctaaacatatggaggcctctccgctcttctttgaatcttctcgattatacattagaaaatattgcatttcatgttttacaccaacggttacctttttattcgtacaaaaccaggacagagttctatgaatctatggacgaaacttcaaaaaggtgtctcctattttactggatcacaagacttcgagtaaatttcaagcttttagagactcagaatataattggaaaaaccatcgagcaagcaagacttatcgggattgacttttattctgtcctttaccgtggctcacaatacaaggttgaatcctttttaattagactttgcaaatcagaacaattcattctgatttctccaagccgaatgcaggtccgtaaccaaaaagcactcgaatgtataccacttgtgatggaaccttcatctgccttttacaagagtcctttattagttttagactttcaatcattatacccatccattgttatggcatataattattgttacagcactattatcggaagagttgaatcattaaatactaaaaataatgaaataggtatcacaaggtatgatatccctgaagatttactaactttaatatctgattatatcaccatctcaccaaatggtatcgtctttgtcaaaaaagaactgagaaagtcagttttggctaagatgttaaaggacattcttgatacgagatttctaatgaaaagtactatgaaggaacttaatgatgaacataaccttattaatatgttggataataggcaggaagccttaaaattacttgctaatgtcacgtacggatacacatctgcttcattctctgggcgtatgccatgttccgacattgcagatagtatagttcagactggcagggaaacattagagagggcgatcgaggttatagaaactactaaagaatggggggctaaagtagtttatggagatacagatagtttatttgtttaccttccagggaaatcgaaagatgaagcatttgtaatcggaaggcagatcgctgaagaaataacaagacagaatccgaaacccatagagttgaagtttgagaaagtgtatcatccgtgctttttagtaaccaagaaacgttatgtaggcttttcctatgagtctgaatatcaaaaagaaccaaaattcgatgcaaagggtatagaaactgttcgaagggatggaacaccagcacaacaaaaaatcgtggaaaaggcacttagaattatgtttgaaaccactgatttatccatggtaaaagaatacttaattggagaatttgacaaaattatcaccggcagagttaatattcaagatttctgtttcgctagagaagttaagctaggccattataaaagtgaaaagactgctccccctggtgcccaaattgccatgcaaatgatggaagaagatgcacgtacagaaccccaatacaagcagagagtaccgtatgtcgtgaaaatgggaaaaataggtgaaactttgagctctagatgcctctcaccggaggctttcttaaggtctaaaacgtctaggttggattatacatactacattgtcaaaaacattatacctcctcttcagcggtttttccagttagtaggagttgatatcatggattggtatatatcgatgaaacatactcttaatcctctaaaagtagactctgatgacggcagccatgaaggaaggtctttgacttcaatcgtcaaaggcaaatcttgtctgcgctgtcgcaagaaagttcacccaaaattcattagtcctatatgtggtgaatgcaggatcgataaaagcaacaccaccctttttttggaagagtcagtcagactaaaacagtctaagatgcattctgttatgaggacctgtcaaacctgttcatacaagtttcataaagatgctatggcacctttggaccaaattgcactcaagtgccaatctaaagactgtccggtatacttcagtaaattcaaatacatgaacggtctcaaggataatgatatgagagatctcttgatgggactgatagatttggactattga

SEQ ID NO: 2684 - protein, 1451 aa, Kluyveromyces lactis NRRL Y-1140
MSDIFGSLDSSLDSNEINIQINNSDSYQCFPTLLDCKTSKSLPGLRFVQVPVLRFYGCLSTGHKVLIHCHGIFPYIFIKYDGHSNDKASVIRNRCTSLHKILETRMIETFTKTDFKEKLTSLKYIANVSVVKGVPFYGYHVGYEPYYKITLLNGSYSNKLSELLRDGRIFTSKVDVFEAHIPYLLQMMADYNLFGCGWLKLSKCYFRQPVLLTDLDMNEILHTDSLERFLKKHLHPNQNVLDIDPFHRIGKTFLEMDIIPQFILNREEIQFRDLHHDFVELKKDLQTSDQGYVNSTKDIWKEIQLLRKRKGLAEYEGLKEIFRESQLQYNWKEDERLVKHFDEAKKRMSSLFNKEKALNFDNFVDPFINENFFASTKDALQELWPKIPRNASSKVFCWSEVEFKLNNQYTSVREQKVASTNTKNIPILLNISSNESHSSHVSSKRAEESSCHDDIANEAIARKLAKRKTSAIRKSTFRPMIRPSVTHANIKESLSANQIEEVQYNDPFFSNPLDCKRLQTEMAGRVFKLSSDHILFKRSIRSNDTTATLTSSGSVYARSRWKYIRPKPSFKRIANAMKPFKGKFSMVEGKTPELPFGYKFKSNKIEKNNNASNRMTHFTMEIHVNTREDKFPDPKYDAVRMIFWKVQDGTFPFDLDITQEGVLIFLDDVSTENSWKTADPSVHITAYYDELEMIYALEDLVRFFDPDILSGYEIHSSSWGYLIDRCHKGHDYDVEDELSRVDYNQSSKKKDRWGYTHATAFSITGRQMLNIWRPLRSSLNLLDYTLENIAFHVLHQRLPFYSYKTRTEFYESMDETSKRCLLFYWITRLRVNFKLLETQNIIGKTIEQARLIGIDFYSVLYRGSQYKVESFLIRLCKSEQFILISPSRMQVRNQKALECIPLVMEPSSAFYKSPLLVLDFQSLYPSIVMAYNYCYSTIIGRVESLNTKNNEIGITRYDIPEDLLTLISDYITISPNGIVFVKKELRKSVLAKMLKDILDTRFLMKSTMKELNDEHNLINMLDNRQEALKLLANVTYGYTSASFSGRMPCSDIADSIVQTGRETLERAIEVIETTKEWGAKVVYGDTDSLFVYLPGKSKDEAFVIGRQIAEEITRQNPKPIELKFEKVYHPCFLVTKKRYVGFSYESEYQKEPKFDAKGIETVRRDGTPAQQKIVEKALRIMFETTDLSMVKEYLIGEFDKIITGRVNIQDFCFAREVKLGHYKSEKTAPPGAQIAMQMMEEDARTEPQYKQRVPYVVKMGKIGETLSSRCLSPEAFLRSKTSRLDYTYYIVKNIIPPLQRFFQLVGVDIMDWYISMKHTLNPLKVDSDDGSHEGRSLTSIVKGKSCLRCRKKVHPKFISPICGECRIDKSNTTLFLEESVRLKQSKMHSVMRTCQTCSYKFHKDAMAPLDQIALKCQSKDCPVYFSKFKYMNGLKDNDMRDLLMGLIDLDY

SEQ ID NO: 2685 - DNA, 4767 bp, Debaryomyces hansenii CBS767
  CDS (1)..(4767)
atgagcgatgctagattacacgtccagatcaacgattacgatacatatcaaacacatacactgaagctagatcaattatataatgatgttgttcaggtaccaatcataaggatttttgggtcgttgtctgtgggtatagatgatggcgatgaaagaagtgataatgatcatacgaagcatagcggttcaaataagccggtcaaattcctctcgtacaatgtgttagttcatgttcacaattactacccgtatttgtacgttgactgctttgagaatgaggcattgttgaggtcggaaaactatataaaccagttggtggaataccttgaaaatagcttacagcaatcatttcgtcgaaagaagggtgaagaagaagaagaagaagaagagacgatagacgtggatgtggattcgggtgggggggaaagaaagttcattgctaaggtggcaatatgtaaaggttctccaatttacggatatcaagttggatacaagctcttctacaagatctcgttgctttctccgttgtacaagaccaggcttaccacgcttttccatgacaagaacatcaatatttgcgaattcagctctagttttgacaagggtacgaaaaagtcgtatgcggtaaatgtatacgaggcacatattccgtatttgcttcagtttttagctgatttcaatttgtttgggtgtgggtggttagaaatcgacaacacttatttcagataccccattttaaacgataataccgatatagacaccactcacctcaaatcgtatttgaagctgttcatcaaccataacaatatactcgaaggactgaaatttgctcgaattggcaggtctttgttagaatttgatatcaagacagagagcattcacaacagaagttatataaaacagcgacatttgcaccatgagttcgttgaaaatcgtagttttaattctgggataccgaacaatgaaatatatttatcttcattaaatcatatctacaaggatttgaaatatcaatgtgaatcaagaggctcaaaaatgactgaatcgcagttttcgcagaataatttaggcttgggtggaaccttttgggaaaatcaatctgatttaaatgatttgatgaactatgtaatttctcttactaaaccaagccctaccaataaattggatgcatatttcaagaaattcattgagtctgataagctttctaaatttccaacagcatttgagttaatagatattgagaaaatctccagttcgtctggtggcatttcattattgaatttcaatgacgatctaattaagtggaacgtttattcgttcttatttgaagatgcagtgatactcaaagatatcgctacgcgtgaagaaagtgctgtaatacgtgaagatgatattgtaccggattctaaaccttcgttagatttagagttcgatagtgatgatttcacggattctgaacatgttaatcctgatgatagagtcgagaaaaatgatattgaccctgcagaacatgagcgtgcttggagtcagcctaataaatctgaccacgaaataatgtttgaagtaagtcaaaggaagaggaggagaacgtcgctttctcaaacgttggaagaaggcgattcaattttacaagtgcctagttcacctcaccatctctttaacaaaataactaatcccaagcaaaccaacaagctccctgacctaatgcattcgtctcatggtaggcatttttatgaagtcctgaaaccacaagcattagaccgtaatcgtataatgaaaactttcgatgaccaacatctattgaaggtaaattacactgatccgtactatgacaaagaatccgatatgccttctaggcctatgatattcgctaataagaaaattagtattccccttattaattataacacgcttgaagcgtttaaagtgaaagccggttctagttcattacctatgtccctgatgattcagcaaactctaagtgattcaagttcatcaaaaattagagcatgtgcgagaaacatctgttcctggagatatgttgctgaaccaccttctaaggttgaaattcagaaatgggtcgctgtggaggaagctaaaatgaaatacaagcgatctaaattccgatctcagatcgaacctccgattactcaaactaatgactacaaattttcatatagatcggaaaagatttctcgtaggccaaattccttcaactcattaactaatttccatttagaaatacatgttaatactcataatgatctattacctaacccagacgtggatcctattagcgtgattttttatacttttagtgattcaaatcatatgttcgacaaaaataataataaagtcggtattttgatttatcatgaaccaggctctcagagagaggattttgctaagcaattagagaaagtttcaagtttccttgtcgaaaagcctgcagttgcaatattttctgatgaaaagtcgatgattaatcaactaattcggcttgttgaatgcttcgacccagatatattatctggatatgagataaacgcattatcgtggggatatgtcatagaacggtttcgaaatgcttacgacataaatttattgtttgaattcagtcgttgtaagtttaaaagcaatggtaagtttggtgatagatggggatatactcatacatctgcgtttaaaattaatggacgccatatattaaacgtttggagattattgagatctgaattaagtcttacaaattattctttggagaacatgtcatatcacttgcttcaccaaacgttaccaagatacctgaattttcaattaagtcaatggtactatgggaatgattttctggaattgttatctgttttcaagtactatttgagaagggttcaattaataatgaaaataattgatattcaagagttgataacaagaaatgttgagcaatcccggttaattggaattgacttcaattctaatttttatagggggtcccaatttaaagttgaatcaattttatgtagattaacaaaggcagagaacatattgttaaattcagtctccaagcagcaggttcatgaaatgagacctttagaatgtattcctttgattatggagccggactcaaatttttacaagtctcctttaatcgttttagactttcaatctttatatccatcgattatgattgcttacaattattgttactctactattttgggtaaactacatggttttagcccaaggaagaacattattggctacttgaagaacctaaaattaccacctggattagttgatttatttgccaaaaacgatggtttaaatatttcacctaatggttacgtatttgttaagtcatctattcgaaagtctatgttagctaaaatgcttgaggaaattttgaatgctagaatcaatgttaaatctgtaatgaaactattcaaagatgatccagagctaataaagttatataattcacgtcaattggctttaaaattaattgcaaacgttacatatgggtatacttctgcaacttttagtggaagaatgccaaattctgatattgcggatgctattgtctcaactggaagagagattctaagtcaatcagtgaatcttattgaactgacaaattatggagcgaaagtagtatatggtgatactgattctttgttcgtttatttaccgggtaagactaaacaagatgctttcaaaattggcaacgagcttgcaagctttataactgataaatttccggatcctataaagctaaagttcgaaaaggtttatcatccttgtgttttgctagcgaagaaaaggtatgttggttatagttatgagtatgaagatcaacaagaaccaaaatttgatgcaaaaggaatagaaacaattagaagagatggtatacccgctcaacaaaaaatggtcgagaagacaattaggatcttatttgacactaaaaatttatcgttaatcaagaagtatacaatggagcaattttacaagattttaatcaacaaagtttccataaaggatttttgctttgcaaaggaggtacggtttggaacttacaaaaatgaggctcatttaccgcctggtgctattgtagctaataggaatgtgaataaagaccccagaaatgagccgcaatatcgtgaaagggtgccatatgttgtgttccaagactcttcgaaaatccgagtaaaagatagatgtatatcgccagaggattttattaaatcatacaatacactgaaacctctaagcttggataatgaatattatattacgagggttttgattcctccattagaacgtgtttttaatttgattggagtagatatcaaaggttggtataaagaattgcctaaattcaaccatgaactatttgaaacgaagaacaatatttttcagttcgcaaagtttataaaattaaattcatgtgcatgctgtgggtcgaaattaaaagaatattctagatctaaatatatttgtggtcaatgtctaaataatgaattggaattaatcgcaaatctttcgatgtcctctaagttcggagaatttaaagaattagtagcagataagacgtgtgaattatgcgtgaatatgaattatgagagtttgggctctcgaactattagaaactgtatgaatgaatgcgttaataatagctgtctggtgtattataataagattagggtaacaaaagaaaaagtacaactagaccaaaagcatttacacctattaagtgacttagaatggtga

SEQ ID NO: 2686 - protein, 1588 aa, Debaryomyces hansenii CBS767
MSDARLHVQINDYDTYQTHTLKLDQLYNDVVQVPIIRIFGSLSVGIDDGDERSDNDHTKHSGSNKPVKFLSYNVLVHVHNYYPYLYVDCFENEALLRSENYINQLVEYLENSLQQSFRRKKGEEEEEEEETIDVDVDSGGGERKFIAKVAICKGSPIYGYQVGYKLFYKISLLSPLYKTRLTTLFHDKNINICEFSSSFDKGTKKSYAVNVYEAHIPYLLQFLADFNLFGCGWLEIDNTYFRYPILNDNTDIDTTHLKSYLKLFINHNNILEGLKFARIGRSLLEFDIKTESIHNRSYIKQRHLHHEFVENRSFNSGIPNNEIYLSSLNHIYKDLKYQCESRGSKMTESQFSQNNLGLGGTFWENQSDLNDLMNYVISLTKPSPTNKLDAYFKKFIESDKLSKFPTAFELIDIEKISSSSGGISLLNFNDDLIKWNVYSFLFEDAVILKDIATREESAVIREDDIVPDSKPSLDLEFDSDDFTDSEHVNPDDRVEKNDIDPAEHERAWSQPNKSDHEIMFEVSQRKRRRTSLSQTLEEGDSILQVPSSPHHLFNKITNPKQTNKLPDLMHSSHGRHFYEVLKPQALDRNRIMKTFDDQHLLKVNYTDPYYDKESDMPSRPMIFANKKISIPLINYNTLEAFKVKAGSSSLPMSLMIQQTLSDSSSSKIRACARNICSWRYVAEPPSKVEIQKWVAVEEAKMKYKRSKFRSQIEPPITQTNDYKFSYRSEKISRRPNSFNSLTNFHLEIHVNTHNDLLPNPDVDPISVIFYTFSDSNHMFDKNNNKVGILIYHEPGSQREDFAKQLEKVSSFLVEKPAVAIFSDEKSMINQLIRLVECFDPDILSGYEINALSWGYVIERFRNAYDINLLFEFSRCKFKSNGKFGDRWGYTHTSAFKINGRHILNVWRLLRSELSLTNYSLENMSYHLLHQTLPRYLNFQLSQWYYGNDFLELLSVFKYYLRRVQLIMKIIDIQELITRNVEQSRLIGIDFNSNFYRGSQFKVESILCRLTKAENILLNSVSKQQVHEMRPLECIPLIMEPDSNFYKSPLIVLDFQSLYPSIMIAYNYCYSTILGKLHGFSPRKNIIGYLKNLKLPPGLVDLFAKNDGLNISPNGYVFVKSSIRKSMLAKMLEEILNARINVKSVMKLFKDDPELIKLYNSRQLALKLIANVTYGYTSATFSGRMPNSDIADAIVSTGREILSQSVNLIELTNYGAKVVYGDTDSLFVYLPGKTKQDAFKIGNELASFITDKFPDPIKLKFEKVYHPCVLLAKKRYVGYSYEYEDQQEPKFDAKGIETIRRDGIPAQQKMVEKTIRILFDTKNLSLIKKYTMEQFYKILINKVSIKDFCFAKEVRFGTYKNEAHLPPGAIVANRNVNKDPRNEPQYRERVPYVVFQDSSKIRVKDRCISPEDFIKSYNTLKPLSLDNEYYITRVLIPPLERVFNLIGVDIKGWYKELPKFNHELFETKNNIFQFAKFIKLNSCACCGSKLKEYSRSKYICGQCLNNELELIANLSMSSKFGEFKELVADKTCELCVNMNYESLGSRTIRNCMNECVNNSCLVYYNKIRVTKEKVQLDQKHLHLLSDLEW

SEQ ID NO: 2687 - DNA, 4017 bp, Yarrowia lipolytica CLIB122
  CDS (1)..(4017)
atgtcgggactgcgcatccagataaattacatcgactatgtaatggctcctccggggccgctggactggtccaaggtgcctgaaacggtatcttgcgaatgcgactacaaagatctacaccgggttccagtgctgcggatatttggaggcacctcggacggtctttcgtcttgcgcacatgtgcacaacgtcttccaatacttttacataccctacaccggtccttccttaagtccggcggattcggagccgttcatagcagacatgtatcgccgaatcaacctgcaactccgttccaagaggacacgtggcgagaagttacccgaggagtgtagttttctggccaacattgtgctatgcaaagctacaccattctacggataccatgagggatggagatactacctgaagatcgtggtggtggaccctagtcatgttggaatgctggtggacatgttcaggaacggtgtgtttggatgggaccactcgcgtgtgtttgagagccacttgtcttacattttgcaattcttttgcgactacaatttgcatggttgtggatggatggaggcgtccaggtacatgatgagaagggaaggtatgatctccaagtcggagtttgaggttgacttgcaggccgaatacatcttaaaccgactggtgatttcgaccaacaagaagccaggggacaaggcgttccattcactgaaagagctgtggacgagcttacagagcattagagacaagttcagcaaaggcgagtacaagagtgactatggagaaaggactgtaaatgacccgcgggagcagtggttttcagcccagtccatgttctcggagttggaggagaaggtgagcaaggcagactcggcccattcatacgtgcagttctggcccaaaaggccatacgacaatctcgttcccacagcgtttgaaacgacaaaatgcatgttcaagggagagggtgcctcagaagtggacagttttgtgtttgatgtgtcctttgacgatcttccttccatgtcccaggaaaagagaagcagtgcaacaagaaaacacagttccactcctcccccatcaaccaggaaacaaaagggactcaacttcaaggtgaccaaacccaagtttgatgttccaaatactgcaaagacgagtactgctgttgctactgctactttaactacaacagtctacactttcaagccacctccatcgcgtggactgtgtattaccgatttagacgacaacaacatggcacagaaagtctacccaaagccgcactactcacgtgattcagacgtccccacaaaaacaatgacacacggaggcgtcacttttcgaattctggggtcttccgtaaagtatctaccaacgggattccccgaaaagccctcaaactatgctcttaagggcgttgttgagctggcaaagtctcctccatcgcgtgatgacgtactcaagtggataggaaagactaccaacaatgctgatctgtttctgtcccagatagcgcctcctacccagaagcccaagtactctttccccagtcaaaacacactctcccagcgacacgagtcggctgctttaacggtcatgagcatggaggttcatgtgaacactcgaaaaggtctcaatccagacccagatcttgacccaatcctgttcgttgtctggcacatgttgggtggtcccagtggagtgattatcaacgccgaggattgcccagacttcacaaacatcatcgaagcaccttccactgtcgtcaaaacagagtgtgaaatgatcactcatcttcagaaaatggtggagaactttgatcctgacattctgactggctttgaagtccaagcttcttcctggggctatgttcaagaccgttgcaagaccatgttgtacccatgtgaatttggaagggttcagcatcataagatgagctcgaaaattgacacttggggcgcacgaaaggcttctggagtcaaagtagttggccgtcatgtgctcaacttgtggcgtatgattcgtggggaggtttctttgttgaaatacacgcttgagaatgtcgtcttccacgttctacacgaacgcattcccttctacacacacgatacgctcacagaaatgtgtgtgggcagtctgtctgaccggaaattacttgtggagtacaaatgcacgcggtccaattacaatctgcagctcttgagcactctggagattgtttcacgaacagctgagcaggctcgagtggtgggaatcgacttttcgtccgtctacacccgcggcagtcagtacaaagtcgagtcgtttcttgctcgcctgacaaaaagtgagaacttcatgctggcaagccccagtagagaacaggttggtcagcagaatgccctggagtgcattgctttggtaatggagcccgaatctcgactttatacgagccccgttcttgttctggactttcagtctctttatccttccgtcatcttagcccacaattactgctactccacctgtttgggcaaatggactgattttgaaaaggacggaaacactttgggaacggagaaactgttctacaagccgtctttggtaaaacggttgctgactaaagacgatgtgaccatctctccaaatggcctggtgtttgtgaaaccccatattcgagtttctctgttagctcgaatgctgggtgagattctggagaccagattcatggtcaaggatactgccaagctcgatagagacaatgtgtcgttccagagactcaaccataaccgacagcttgctctgaagctcgtggccaacgtcacatatggatacacttctgcctccttctctggacgtatgccctgtgccgaaatcgctgacgcaatagttcaaagtggacgtgagacgctcgaaaagtgcattgacgtgatccatggatcggacaaatgggcagccaaggtcgtctacggcgatacagactcgttgtttgtatgtctacctggtcgtaccaaggatgaagcattcaagattggtactgagatcgctgataccataacatctgccaatccagcacccatgaaattgcagtttgaaaaggtctatcttccttgcatgctcatatccaagaagcgatacgtgggctacaagtgggagtactcgaagcagatgtatcccattttcgacgccaagggaatcgaaactgtgcgacgagacggcacccctgctgcccagaagattgaggagaaggctcttcgtatcttgtttgacactgctgatttatctctggtcaaatcgtacctctacgagcagtggacgaagattctaactggtaaggtctcgattcaggacttttgttttgccaaggaagtcaagttaggccagtacaaggaagggggagtgttgcccgcgggtgcgaagatctcggctgagaaaatggcagtcgacatgcgctttgaaccccagtacaaggaacgtatcccatatgtggttgttgctggtcctcccaaaagtcggctgattgaccgatgtgtttctcctgaagaactagtcaggaacgccaactctctcattctcgacgccgactactacattcacaagactctgattccccctctggatcggttctttaactgtgtgggtgcttctgttctcaagtggtacgaggagatgcccaagaagcggcggtacgagttttaccagactgtttctcgagcaaagaccaaccaaaccacgctcaagtcgtacgctgtgtccaactcgtgcatcgtctgcaagactgcccagacgtctggcttgtctaaactttgcgccacgtgcgagagtgatcctggtcatgcaacattcgtgcttaactccgatctgaggtacagggagaagcggctggatgagctcaacacaatctgcgcgcagtgctcaggcgactttgagactaggtgcgagtctcaggactgtcctatttactactcacgggtcaaggcagtgagtaaggcggaagatgcaagtgagaggctagtggagtggactgaggggctggagtggtga

SEQ ID NO: 2688 - protein, 1338 aa, Yarrowia lipolytica CLIB122
MSGLRIQINYIDYVMAPPGPLDWSKVPETVSCECDYKDLHRVPVLRIFGGTSDGLSSCAHVHNVFQYFYIPYTGPSLSPADSEPFIADMYRRINLQLRSKRTRGEKLPEECSFLANIVLCKATPFYGYHEGWRYYLKIVVVDPSHVGMLVDMFRNGVFGWDHSRVFESHLSYILQFFCDYNLHGCGWMEASRYMMRREGMISKSEFEVDLQAEYILNRLVISTNKKPGDKAFHSLKELWTSLQSIRDKFSKGEYKSDYGERTVNDPREQWFSAQSMFSELEEKVSKADSAHSYVQFWPKRPYDNLVPTAFETTKCMFKGEGASEVDSFVFDVSFDDLPSMSQEKRSSATRKHSSTPPPSTRKQKGLNFKVTKPKFDVPNTAKTSTAVATATLTTTVYTFKPPPSRGLCITDLDDNNMAQKVYPKPHYSRDSDVPTKTMTHGGVTFRILGSSVKYLPTGFPEKPSNYALKGVVELAKSPPSRDDVLKWIGKTTNNADLFLSQIAPPTQKPKYSFPSQNTLSQRHESAALTVMSMEVHVNTRKGLNPDPDLDPILFVVWHMLGGPSGVIINAEDCPDFTNIIEAPSTVVKTECEMITHLQKMVENFDPDILTGFEVQASSWGYVQDRCKTMLYPCEFGRVQHHKMSSKIDTWGARKASGVKVVGRHVLNLWRMIRGEVSLLKYTLENVVFHVLHERIPFYTHDTLTEMCVGSLSDRKLLVEYKCTRSNYNLQLLSTLEIVSRTAEQARVVGIDFSSVYTRGSQYKVESFLARLTKSENFMLASPSREQVGQQNALECIALVMEPESRLYTSPVLVLDFQSLYPSVILAHNYCYSTCLGKWTDFEKDGNTLGTEKLFYKPSLVKRLLTKDDVTISPNGLVFVKPHIRVSLLARMLGEILETRFMVKDTAKLDRDNVSFQRLNHNRQLALKLVANVTYGYTSASFSGRMPCAEIADAIVQSGRETLEKCIDVIHGSDKWAAKVVYGDTDSLFVCLPGRTKDEAFKIGTEIADTITSANPAPMKLQFEKVYLPCMLISKKRYVGYKWEYSKQMYPIFDAKGIETVRRDGTPAAQKIEEKALRILFDTADLSLVKSYLYEQWTKILTGKVSIQDFCFAKEVKLGQYKEGGVLPAGAKISAEKMAVDMRFEPQYKERIPYVVVAGPPKSRLIDRCVSPEELVRNANSLILDADYYIHKTLIPPLDRFFNCVGASVLKWYEEMPKKRRYEFYQTVSRAKTNQTTLKSYAVSNSCIVCKTAQTSGLSKLCATCESDPGHATFVLNSDLRYREKRLDELNTICAQCSGDFETRCESQDCPIYYSRVKAVSKAEDASERLVEWTEGLEW

SEQ ID NO: 2689 - DNA, 5046 bp, Aspergillus nidulans FGSC A4
  CDS (1)..(5046)
atggagcccttccaagtacgcctgaactgcgtggatcattatcaggcaaatccatcagaattcgatcctcctctaccttaccgtgacggtaataatgagaaaggctacatgcctaaggttcccgtcattaggatattcggtactacagaaactggccaaaagatatgtgtccatgtccatggcgcctttccttatctctacgttcagtatgacggggatctgagccccgattcagtgcgctctgcagcaaggagtctacacctgtccatagaccatgcgcttgcagtcagctatcgccgcaatgcacacgacaagaagacagtttttgttgcgcatatcaccttagtaaagggtgtccctttctacggctatcatgtcggataccgattttttttcaagatatacttactgaatcccatatatattacaaggttagcggatctgctgcttcaaggagctgttatgaaacgccctattcaaccatacgagagccacctacagtatgtcccacaatggatgtgcgattacaatctgtttggctgcgcgttcatgaagtgtggcaaggccaaattccgttctcctataccggagtatttggatctccctgatctgtcccatcgctggcatgaccgatcaattccacctggctggatcttagatgagagtgtcctacccaaacagagccattgtcctctggaagccgacgtttgcgttcaagatattctaaacaggctagaaattagcgagcgttcaattcaccatgactttagggagtttttaaatcccctgacatcgaatgaaaagcttgttccaagtatggcgggattatgggaggatgaaaagcgccggcgaaagaaaaaacttgggcttgatgatccggatagcagcccattcagcactgaagatctcgtttcattctcatctgatccacggaaggcttcgcagggtgattggattcataaagatgaacttcagctattggtgcgtcagatcactgcagaggagagggagcgagataacaatcgggatatgacgctggatgcgcatttacaagagaatccttatgcgaaggatgtcaagactgctttacaaagcattgaagatttcttcactgacgctgatggtttgactaacttacaacttccttataattccgggattgattattcagaagagcaagccgttgattatgtcgacgaagatgctgttcgagccaccgaatcgaattcgggtctttactcctccgatgaggatggcatgattgacatattttctgatgatgattatgacaatagtgagaacgagatggcgcaagttgacttggagaatgatttacaacaggatgaaagatccaatgctatctccaagacccatgggcctcgggtttccgccccgtcagttgatggtcttgctgggaacagttccggactagaaggacctcgaagtgatgctctcgaggccaggaatgcaataagtttcaaagctcccactcaacaaaatgtgcaatcaggtcgatcgtcagtcactagatcaaagtacgaggagaatttggataaatcttctcagagccaggagagttctagcctcgttcagttttggacggcgaatgcggacagcagtaacaagaagatccgcatgccgagtcgtgccacggaaccatcctcttcagacggacagagcatttcttcccagaaaacgatccgcctcaaagcccttagccaatatggcacactaaacttcccagttgtgaaagatcctaacgaccccatgacaattctacgttttagccaggaagcgtcgggttcaaaagaattgatggacgtggtagcgaaggaggccagcagttctgggaaaagttctagcactcttcagccgcgttcgtccgacgagaaggagcttagtagttcgtcagataacatcgcaactgactttgcaggacttatatctgatgcttttaacataccaccaagcacccgcttgtgctgctttcggcgggcctgtccaagccccaaggaggtttcctctacaataaacgcctacggcctttcagatatcatctatcaaaatgcacactacagtatagatgctgacgttccggatcgccctcgtgactacgcaggaaaggagtttcagctgggcggtatcggcatacgctacctccccgattttgatccttctggtcgtttacctgcaatgctagcggaggagaatataggccaaaaagagaaacgtgactggcaagaactggaccatcaattgcgggttgggtccacggccagattctgggagtttactcctgtccctccgagccgctcagaggtcatcacatggtataacggcgaacagcagaaatctttggcagcaacaacgaaaacagaagagcaatacgaggagaaagagtatcgaggaaaggtactttctcagattgagggtcctacacaaaagaatgaacatggcttcaaatactcacaacataaaaagtccacaagtgtcgagcatcagactcagtatatgagcactatgagcttggaggttcatgtgaatacccgcggtgtgctattgccaaatccagaggaagatgaaatagccgcgttcttttggtgtgttaactccgaagatgaacctcaggaggaagatgattctttatcagttgtcaatatgggggtcgtattccaaggagaagaagagtacccggagtcgaaaatctcaaaggcgctgaggtttgagtgcgagcatgaatcgacagaattagacctgatcaaccgtctagtcgatatcgttcgactccacgaccctgatattataaccggatacgaagtgcataatagttcttggggcttcatcatcgagagagccaggaagaagtacgacttcgatctatgtgacgagttatcgcgagtgaaatcgcacgctcatggacgatttggcaaagaagctgataaatggggcttcgaccacacatcatccattcgaattactgggcggcacataatcaacatatggcgcgccatgagaagtgagatgaatttgctccagtataccatggaaaacgttgtcttccatctcctgcaccggcgaataccacattattcgttccgcgacctcacggcatggtaccaaagtgataaaccgcgagacttcatgaaagtcattaactactatacgtcacgcgtccaaatgaacatcgagattctaaatgcgaacgaattaataccaaggaccagtgaacaggcaaggctgcttggcattgatttttactctgtgttctctcgaggctctcagtttaaggttgagtctctgatgtttcgaattgcaaagccggagaactttatactcgtttcgccaagcagaaagcaggttggtcaacagaatgccctggagtgccttcccttggttatggaaccccagagtgatttctacaccagtcctcttattgtgctggatttccaatctttataccctagcatcatgatcgcctacaactattgttattctacctttcttgggagagtccagtcatggaggggacgcaataaaatgggtttcttggactataaccggccgcctaggctgcttgagctactcaaagatcatatcaacattgcgcctaacggcatgatctacgcacgatccgaagtgcgaaagtcgctccttgcgaaaatgcttacggagatattggagacccgcgtaatggtaaagactggaatgaaagttgacaaagatgaccgagcattgcagcgcttgctcaacaaccgacagcttgcactgaaactaatcgcgaatgtgacttacggatatacctcggcctctttttctgggagaatgccttgctctgaaatcgccgacagcatcgttcaatcgggccgggaaactttggaaaaagcgatcgccttcattcattcggttgagcgatggggtgctgaagtggtttacggagacacggacagtttgttcgtctatctcaaaggacggactcgagaccaggcctttgacattggcgaggaaatcgctcaagctgttaccaacatgaacccccatccggtaaagctcaaattcgaaaaagtatatcacccatgtgtgctgctcgcaaagaaacgatacgtcggttttaagtacgaacacagaaaccagaaggaacccgaattcgacgcgaagggcattgaaacagtccgtcgcgatggtacccctgctgagcagaagattgaagagaaagccctcaagctgctcttcagaacagcagatctgagccaagtgaagagctattttcagagccaatgcacgaagatcatgcaaggacgggtgtccgttcaagacttctgctttgctcgagcagtaaagctcggaacatacagcgagaacggaacgctccccgccggagctctcattagcacaaagaagatgctagaggaccctcgcgcagaaccccagtatggagagcgcgtcccttatgtcgttgtcacaggtgcgccagggtcacgattgatcgaccgctgtgtaccccccgaaacccttctccaggatgcgcaacttgaccttgacgccgagtactatatcactaaaaacatcattcctcctctagagcgtatcttcaacctagtcggagctaatgtgcgtcagtggtatgacgagatgccgaaagttcatcgcattcgccgtgtagaagggacatcttctctggctggtggaaaaagcagcatccggaccctcgaatcatacatgaaagcttcatcctgcgtcgtatgtaaggcaaagctctatgatgccgaaatccctgtctgctcggattgcgtacggcagccccatgtctccttgcttgagcttgtctcccgccagcgtcatgccgagcagagagttgctactctcgagcgtatctgccggtcctgcatggatgtaccgtttggtgatgaagtgaaatgcgacagccttgactgcccagttttctatgcaagaacgagaggtcttgcccattggagacatacaaattccgtgctcggccctgttattaaacttttacaggacaattgcagcgatagcctggaatggtag

SEQ ID NO: 2690 - protein, 1681 aa, Aspergillus nidulans FGSC A4
MEPFQVRLNCVDHYQANPSEFDPPLPYRDGNNEKGYMPKVPVIRIFGTTETGQKICVHVHGAFPYLYVQYDGDLSPDSVRSAARSLHLSIDHALAVSYRRNAHDKKTVFVAHITLVKGVPFYGYHVGYRFFFKIYLLNPIYITRLADLLLQGAVMKRPIQPYESHLQYVPQWMCDYNLFGCAFMKCGKAKFRSPIPEYLDLPDLSHRWHDRSIPPGWILDESVLPKQSHCPLEADVCVQDILNRLEISERSIHHDFREFLNPLTSNEKLVPSMAGLWEDEKRRRKKKLGLDDPDSSPFSTEDLVSFSSDPRKASQGDWIHKDELQLLVRQITAEERERDNNRDMTLDAHLQENPYAKDVKTALQSIEDFFTDADGLTNLQLPYNSGIDYSEEQAVDYVDEDAVRATESNSGLYSSDEDGMIDIFSDDDYDNSENEMAQVDLENDLQQDERSNAISKTHGPRVSAPSVDGLAGNSSGLEGPRSDALEARNAISFKAPTQQNVQSGRSSVTRSKYEENLDKSSQSQESSSLVQFWTANADSSNKKIRMPSRATEPSSSDGQSISSQKTIRLKALSQYGTLNFPVVKDPNDPMTILRFSQEASGSKELMDVVAKEASSSGKSSSTLQPRSSDEKELSSSSDNIATDFAGLISDAFNIPPSTRLCCFRRACPSPKEVSSTINAYGLSDIIYQNAHYSIDADVPDRPRDYAGKEFQLGGIGIRYLPDFDPSGRLPAMLAEENIGQKEKRDWQELDHQLRVGSTARFWEFTPVPPSRSEVITWYNGEQQKSLAATTKTEEQYEEKEYRGKVLSQIEGPTQKNEHGFKYSQHKKSTSVEHQTQYMSTMSLEVHVNTRGVLLPNPEEDEIAAFFWCVNSEDEPQEEDDSLSVVNMGVVFQGEEEYPESKISKALRFECEHESTELDLINRLVDIVRLHDPDIITGYEVHNSSWGFIIERARKKYDFDLCDELSRVKSHAHGRFGKEADKWGFDHTSSIRITGRHIINIWRAMRSEMNLLQYTMENVVFHLLHRRIPHYSFRDLTAWYQSDKPRDFMKVINYYTSRVQMNIEILNANELIPRTSEQARLLGIDFYSVFSRGSQFKVESLMFRIAKPENFILVSPSRKQVGQQNALECLPLVMEPQSDFYTSPLIVLDFQSLYPSIMIAYNYCYSTFLGRVQSWRGRNKMGFLDYNRPPRLLELLKDHINIAPNGMIYARSEVRKSLLAKMLTEILETRVMVKTGMKVDKDDRALQRLLNNRQLALKLIANVTYGYTSASFSGRMPCSEIADSIVQSGRETLEKAIAFIHSVERWGAEVVYGDTDSLFVYLKGRTRDQAFDIGEEIAQAVTNMNPHPVKLKFEKVYHPCVLLAKKRYVGFKYEHRNQKEPEFDAKGIETVRRDGTPAEQKIEEKALKLLFRTADLSQVKSYFQSQCTKIMQGRVSVQDFCFARAVKLGTYSENGTLPAGALISTKKMLEDPRAEPQYGERVPYVVVTGAPGSRLIDRCVPPETLLQDAQLDLDAEYYITKNIIPPLERIFNLVGANVRQWYDEMPKVHRIRRVEGTSSLAGGKSSIRTLESYMKASSCVVCKAKLYDAEIPVCSDCVRQPHVSLLELVSRQRHAEQRVATLERICRSCMDVPFGDEVKCDSLDCPVFYARTRGLAHWRHTNSVLGPVIKLLQDNCSDSLEW

SEQ ID NO: 2691 - DNA, 5037 bp, Ustilago maydis 521
  CDS (1)..(5037)
atgacatcgttggaaagtgcggaacagagcgatccttctgcgcaacagaccgcgcaacagaccgaaaagatcgactcggcttcagcttcgtccgacccattctttcgcgtgcgcctcatcaatattgatcacatcctcacagtgccgacgccgtttgaccgcacctcatgcgctttcaatgccgaaggacagccgcttcggaaggtgcctgtcctccgcctatttggcgctactcctgcaggtcagcgcgtctgcctgtacatccacaatgtctatccatattgttatatccaatacaagggctccctcgatcccgacaatgtcctcagatacatccatcggctgggtcgggggctgaatgctgccatggctgcatcgctccgccgcaatctgcacgacacggacgccaaccagttcattgccgctattcacctctgcaaaggggtcaacttctacggctaccatgtcggatactcgtactatctcaagatttcgtttgtggatccagcgcataattatcgcatagcagccatacttgagtcgggaggggtcatgaagacggtctttcagccttttgagattcacattcgctaccagcttcaattcatgctcgattataacatcttcggttgcgactatgtcgacttggacgacatccgctttcgacttccgattccagaaggaaatctggttgccaacgatgacttgtctcccctcgactctcgcagcaagatttggaatcgtaactcgataccttatgcccacgtgcaggccccagacgtacatcgtggctcatactgcgagctcgaagccgatgcgagtgctccgtggatcatcaatcgacgcagatttaaacagagagacattcacagcaactttgatgagacttctaccactccatccgaccaagatatccttgttccaagcttgtcaggactctgggaggatgaaatgaagcgacggaaagcagctggattgccgccttcgataccgagagaagatccagctcgggatcctcggctatatgctagcggagattctccaacatggatgtcagaggaacgcatgcgacttctactcgaaaaacgtctgatcgaggagaagcaaaagacgctaccacgcgagcgcaatgctagccactttaccgatcgccccgggctggatgaatatatcatgaccacatttgacgctgtggaggtgtttcacccatatcaagatcagattcacgctgctgatccttactctcaacgcacaggcccctctgcctcttctaggctgtacgacttgcagcacgccatttctcaaactcagcaaagtccaccggaccagatggaacctactcagttgacccaacagctgaaagaggaggaagacgactttgatgacgaattctttcagagtcaagacttcaatcatcgcctccagtcagccgaaaaggaggcgatgtcagccaaccaagatccaccatcggatcaagaggatgacgccaacgatgccgatcaggtcgagccggcatgggcgcagcctgatggcccaggcacgccttgcaagtggcataggaccgaaagctcccactctaactcaaacaccgcatctagtagcaccttcagcaaaagcccttcctctacgcccaaaaggcgtcatcacgccgatgttctcggaagcgataagacaacgtcaacagcaagcccttcgtccaagccatcaaaagaggttcacgaagacagcgtacgcagattcaaaaaagccaagcatgagcattcgacggccagtacgaatgcaactagtggaagccgttctggtcatgcgataaactctgtccgatccaccaaagtccgcttcgtcgaggcaggttcgtcagcaccagcagccagattgcgccagcaggagacgtcatcgttgcagcatagctctgcatcgcgcacgcgttttctcacctttcacgaatcggctccgtccttgcgcgacgtcgtcgggacctttccgctcttctccatcgcccgccaaatccatcccgagccttttttcagcaacccaagtgatctgccagcacgtccacgagaatacgccggccgtatgttccattttcaatctcattcgttgccttacctacgctcgttcgatcattgggaccagaaaagcgaacatgttgcgtccactcagaaggacaagccaccgaaacgcctctactggcagttcggaccaccacctccaacgttgctcgaagctcgggcgtggcggcaaaaggagaaggtgattgaaaggcagcgttcaaaacgacgacgagcacgacttctctctcagattgagaggctgacccaggccaatgactttggattcaagatctcgcagcacaaggcgactgcgctggtgaagcgggacaaacagcacatgacgacgctcgctgttgaggtaatgactactacgcgtgacagcctcttcccagacccggccttggacgccatacagtccatcgtctactccttccagaacgaggacgaaaatttgcaggacactggcagtcgacctgatctccgcaccggtctcatcatcgtcagtggggacgaaatcaacttcgaccgtcttggtctgtcgcacctggctgtggaggtggttgaagatgagctggagctattcaatactctgatcgaccttgtgcgcgcgtttgatccggagattctcgttggctgggaaattcattcctcctcgtggggctacatcgttgaacgcgccagcaaagagtacgactatgatctcgtccctcagatcggccgagcaatcatccacaataccgggcgggcggggggcaagtcggacaattatgcgtatactcaatcgtccgcccttcgctttactggccgacacacgctcaatctctggcgtctcatgaagggagagcttacactgaatctgtacacgcttgaaaatgtctgttaccacctacttcaccgtcgtataccaaaatactcgcatcagacgttgacgcagtggtacaagtccggacgcgccgagctgatcagaagagcactgctgtactatgtcgacatggttgaattggagcttgagattatcgcggaatcggagttcgtcctgcgaaccgccgaattcgcgaggatctatgggatcgacttcttttcggtgatatccagaggcagtcagttcaaggtggagagtatcatgcttcgcatcgcaaaaccagaaaactttgtgctcatctcaccgagccgagcgcaggtgggcaaacaaaatgcagcggaatgtcttccgctcatcatggaaccccagtcggcgttctacaaggggccgttgatcgtactggatttccagtcgctctatccttcgatcatgatcgcgtacaacctgtgctactcgacctgtctcggccgtgtcgcaggtttcaaagggactagcaaatttggtgtcaccgaatacgcgccacccaaaggcctgctgagtctgttacaagacgacgttaacatctctagcaatggattgctatttgtcaagccgagcgtgcgcaagtcgctgctggctaagatgctttccgagatcctggacacgcgtgtcatggtcaaaagctcgatgaaagctaccaaatcggacaagtcgttccagcgcattcagaacgcgaggcaaatctcgctcaaactgcttgctaatgtgacgtatggctacacatctgcgagcttttctggccgcatgccgtgcgtcgagatcgctgatgcgattgttcagacaggacgagagacgttggaaaaagcgatggacctgatcaacgggacagaagagtggggtgcgcaagtcgtgtacggcgataccgattctctctttgtctaccttccaggaaggaccaaggaggaagcgtttacattgggcaacgttattgctgacaaagtcacaagcctgaatccgcgtccagtcaagctcaaattcgaaaaggtctatcttccctctgtgcttctggccaagaaacggtatgtgggcttcaagtacgagacgctcgacgagcgcgagcctgggtttgatgccaaagggattgagacagtacgacgcgatttccatcctgccattcagcgcatgctcgaagcgtgcattcggattctcttccgttctcgcgatctgagtctggtgaaaagttacctgcagcgtcagtggcgaaagatcctcgaggggcgtgtcagcgcacaagactttatctttgccaaagaggtgcgactcggatcatatagcgataaagtggcgccgccgccgggtgctgctgtggcgtcgagacgcatgttagcggatccgcgatccgagccgcagtacggagagcgtgtgccatacatcatttctcagggagagccaagggccaagttgaaccaacaggccgtctcaccggaggcgtttctcaaagacccacagcttcagatcaacgcgctgtactacatcacccgcacaatcatcccaccgctagctcgcgtgtttaatctgctgggcgccgatgtcgaagcgtggtttcaccacatgccgaagcccaacaatgcctactggaacaaacggcccactgctgctctgttatctgcccttctcgctcaacaggacccatcgagctcgacgcacgagatcggttccgactcggccgcttctaaagcgacgagcagcacagcaattgcgacgctcaactcccactacgccaccgagacatgcttgctctgctcatcgcgtaccgaggcactcgtctgtctcgactgccgccaatcgcccctcgaaagcatccacgccacatcgtccaagttgcacaagctcgaagcgcaggtagctgccatcgacagcatctgctccacctgcgcacacatggaacgacccggccccgtcgactgcgtcagcttcgactgcccgtacacatatcaaaagaccaaagtgcacaagtcgctccaagataccgctctggtgcacacatatatctcacgactgtttgactcagagccgcaacgtcaggctgtggtggatgacgcatggaccggaaccaagaacctcaacgacggcatcagttga

SEQ ID NO: 2692 - protein, 1678 aa, Ustilago maydis 521
MTSLESAEQSDPSAQQTAQQTEKIDSASASSDPFFRVRLINIDHILTVPTPFDRTSCAFNAEGQPLRKVPVLRLFGATPAGQRVCLYIHNVYPYCYIQYKGSLDPDNVLRYIHRLGRGLNAAMAASLRRNLHDTDANQFIAAIHLCKGVNFYGYHVGYSYYLKISFVDPAHNYRIAAILESGGVMKTVFQPFEIHIRYQLQFMLDYNIFGCDYVDLDDIRFRLPIPEGNLVANDDLSPLDSRSKIWNRNSIPYAHVQAPDVHRGSYCELEADASAPWIINRRRFKQRDIHSNFDETSTTPSDQDILVPSLSGLWEDEMKRRKAAGLPPSIPREDPARDPRLYASGDSPTWMSEERMRLLLEKRLIEEKQKTLPRERNASHFTDRPGLDEYIMTTFDAVEVFHPYQDQIHAADPYSQRTGPSASSRLYDLQHAISQTQQSPPDQMEPTQLTQQLKEEEDDFDDEFFQSQDFNHRLQSAEKEAMSANQDPPSDQEDDANDADQVEPAWAQPDGPGTPCKWHRTESSHSNSNTASSSTFSKSPSSTPKRRHHADVLGSDKTTSTASPSSKPSKEVHEDSVRRFKKAKHEHSTASTNATSGSRSGHAINSVRSTKVRFVEAGSSAPAARLRQQETSSLQHSSASRTRFLTFHESAPSLRDVVGTFPLFSIARQIHPEPFFSNPSDLPARPREYAGRMFHFQSHSLPYLRSFDHWDQKSEHVASTQKDKPPKRLYWQFGPPPPTLLEARAWRQKEKVIERQRSKRRRARLLSQIERLTQANDFGFKISQHKATALVKRDKQHMTTLAVEVMTTTRDSLFPDPALDAIQSIVYSFQNEDENLQDTGSRPDLRTGLIIVSGDEINFDRLGLSHLAVEVVEDELELFNTLIDLVRAFDPEILVGWEIHSSSWGYIVERASKEYDYDLVPQIGRAIIHNTGRAGGKSDNYAYTQSSALRFTGRHTLNLWRLMKGELTLNLYTLENVCYHLLHRRIPKYSHQTLTQWYKSGRAELIRRALLYYVDMVELELEIIAESEFVLRTAEFARIYGIDFFSVISRGSQFKVESIMLRIAKPENFVLISPSRAQVGKQNAAECLPLIMEPQSAFYKGPLIVLDFQSLYPSIMIAYNLCYSTCLGRVAGFKGTSKFGVTEYAPPKGLLSLLQDDVNISSNGLLFVKPSVRKSLLAKMLSEILDTRVMVKSSMKATKSDKSFQRIQNARQISLKLLANVTYGYTSASFSGRMPCVEIADAIVQTGRETLEKAMDLINGTEEWGAQVVYGDTDSLFVYLPGRTKEEAFTLGNVIADKVTSLNPRPVKLKFEKVYLPSVLLAKKRYVGFKYETLDEREPGFDAKGIETVRRDFHPAIQRMLEACIRILFRSRDLSLVKSYLQRQWRKILEGRVSAQDFIFAKEVRLGSYSDKVAPPPGAAVASRRMLADPRSEPQYGERVPYIISQGEPRAKLNQQAVSPEAFLKDPQLQINALYYITRTIIPPLARVFNLLGADVEAWFHHMPKPNNAYWNKRPTAALLSALLAQQDPSSSTHEIGSDSAASKATSSTAIATLNSHYATETCLLCSSRTEALVCLDCRQSPLESIHATSSKLHKLEAQVAAIDSICSTCAHMERPGPVDCVSFDCPYTYQKTKVHKSLQDTALVHTYISRLFDSEPQRQAVVDDAWTGTKNLNDGIS

SEQ ID NO: 2693 - DNA, 5922 bp, Cryptococcus neoformans var. neoformans B-3501A
  CDS (1)..(5922)
atggaagacaccgcggtcgtcaatcaaggaccgtcgtcctctttgcccgtcggatcgagccaatctttgagtctcagcagtccccgtctacgtgtcaaaattacccatatcatctcggatcaggcggcacccattcctactcttcgtcagcactatgctccgtctcgactcgcaaccgccataccgttgggtaatctaccacacagcgtacctgttatccggatatttgggaccacgtcctcttcgcagaaaatttgtgccaacatacacttgtgctacccatacttttttgtaccctatcccatggactctcaagatccgttgcggccagagagggtggtcaaactttgtcaaagattcgccgtctctctcaactatgcgatttgtctcgcacttcggcaaaatccgacatctgcagccaacaacactaactacggcggtggtgtggacccaaagcatttgcatgtcgtctctgtgatccttgtaaagggaacaccattctatggatatcatcttggatttgactactttctcaaaatcaatctggcaaatccggcaagactgcatatagcactcgagcaactacgaaagccgaatgtgctaggaagagaatggcaaccgcacgaagcacatctcaatcacgttctacagtttatgtgtgactttgacctgtatggttgcggatggttggagctgggaggaggtaccttcagggaacccgtgccagaagcagatccgtttgactccctgtcagagacagttaccgatggtactcttggcttacttaactgtcgcacgatacccacttccatgttataccccccaggcctctctcctgcgaaggattcatttacttcccttgaatttgacattcttcctcaccagatcctaaatcgacagcgacttatgccccgtctactgcatcatgatttcattgagctgttacataagcctttggatcccaacgaaaagcttgtgcctgcggttgcagaattgtgggaagatgaaaggcgaaggagagcggctaaaggattaggcactggaacaaatgatatgatgccaggtagcggcgggatggatggaagatcaatggaggaacttgggtatagaggcaatcaagtggatgggaagaagaacaagggaggtgattggaagatctcagacgagctttgggcaatactggaagagcgtatgggcgctgagaggaagagaaaagggaagctgacattccagaaatactctcgcgatgtttcagctggcagggaaggggaaaaattgcaatgggataagtggatcatgaccacctttgatgctttatcagctcattggcccaagcaagctaagaaggtcaccaagactacccaaatgtccaggaagtctcacatgactctgccagccgacacttcatctatatactacggttcttctcaggataagaatgccctgttcggcgagtcaacatctgttactttggaggaaccgggaatggattcaaggttggagaaagaagacgaagagataaacccctttgaggcgttcgccatgactcaggcttctcaacatccgcaaccagtaccagagctttcccaacatgttcaagcagtcccatttaaagaagttgaggattctgaccaatattatgtcggcgaggacgagggtgatatagacgagtacaaacaagctgagggggctcgagtgcatgcccaagagaccgacaagatacgcgccacacaaatggcgtctgagatggaaggtcattatgacgagtacgatgacaaagagcttgaagagttgttcagacagacagtggcagctggcttgggagtccagagcgtgcccactacaccacacagacctaaagatcaagaccaggaagggaatagtcgatggtctgggtggactccgacaagcaaaggatctagcaaatcaagcgtgggcactttcgagtcacgtaaacgtaaaagaaatcagcgattattagaggacgctggattgggagatctcagtacaatcattgatcgctcttcactttctctgtcgcctctcaaaaacccatacgatgaaagaggtcatggcgtttctacgcctgaaaacgcgaacacaccttccagagagatggcaactcctagctccctcatgcgtaatgcattcgccaaaagccgccaacaatcgccgaacctgtctcccgcgaagagaagcgagtcatcccgaagtaaacatcttcgttctgatactgttattctgcccttggagagaaagaaccctggagctattacatcctctccatcgctctctcccagagataaagttatcgatggtgaccatggaaacttacaaagaaaattagctgaggcgaagaaaccgctgcagggacaatttccttcggcatcggcgaaaaaaaatctcgttgttggcccagagccaggtcaagaagtagtccaattatcacttcctccagccggtgctggtctgtacgaaccagttgcgaatgttgtttcgccggtcgtgtctaacagttcacgccccatcgggctagtcgaatctcaccttagttccactttgctcaacccgtccttcagagacaaaacctcagacttacctctctctgcaacccttctgaacgcaccctccgccaaacccgctttgagccctacttttcaagacccttccgccaacgatgaacgcctccctatatccccatccatcgttgcgacacatcgcgatgaccgcgaggcaaaggtgcgcccgcacaaacgggtcaaactcacagaaccaggtcatgcgagccaggagtcgcttttgcccctcattagtaatttctcacatccttcgcatggagacagacatcggtcgccacaaaatgctgcatcagaccaccaggagaatctttcgtcttgtttggcaagcaaagcatggcaatattacatccttcctcctcagcgccatgagattgctgatactatggagttgcacggcgtatctactgttgactaccaaccgccgttctttggtcaactggccgatgtacccaagagatcaaaaacgctggcgggcagggtgttcaatctcaaatcccattcagtgagaaatttgcaaaaatttgaatctacgatcggcagtggacccctgctagaaaatgcaaagggcaaggagagggcaaaggctggttggctaaaaacaaatagtgacaacgatagtgttgggaaaagagaagtcaaacgttggtgtgaaaaaatcgaagacaaggcgaagatagccagagaaaaatacgaggaaaagacgtcacagctagcacatccgacccaaaagagcaaatatggcttcaaatattctcagaaagggaaagtgagggattcttccggcgatccccagaacatgtcgatcttgaccatggaagtatttgctcaatcgcgaggtactctcctccccgaccccgaaaaagacgcagtcactgccatcttctattgttattccaataccgatgatgaccttcctgatacaactatctatcctggttatcatgctggttatgtcgtaactagtgctctggcgaatcccgcacggttgcgcctcgacgacattccatttgaagtcgttgaggatgagcttgcattgatcaattgggtaattgacattgtaaaattttgggatccggacgtcctggctggatgggaactccacaactcctcttggggttaccttgctgcgcgtgcgagtggagaattcgctatggatatgatggatcaaatctccagaataatatctggaaggaccggcccacgcaatgacggctactctgcccaccactcatcgacatttaaggtcgttggtagacatactttgaatatatggcgtatatgccgttcggaaatcaatcttacccaatatacttttgagaacgtcgttttccacctgctacatcaacgaatcccacattactcaccctctagtctgacagctttatggaaaagcaaatatcctagccatgcttgtcgtgtcctcaaatacttctttcaaagaacggtaatgtgtatggagatacttgaccaagcagagataattacaaagactgcggagtttgctcgcgtgtttggagtagacttcgcttctgtcttgacccgaggctctcaatacaaagttgaatcatttatcttccgtatcgccaagcctgaaagctttgtattggtatctccttcgaaacagcaggttggtttgcaaaacgccccgttcgctgtgccactcattgcagaaccggagtccaaatactacactcatccggtcattgtcctggatttccagtcattgtacccatccatcatgattgcatataacatatgttactcgacatgcttggggagagttgagatgttcaaagggactaacaaattcggttttacaaatctaaaggtcacagagggcctcttggaactgttgaaagattacctcaccgtgactccaaatggaatgattttcgtcaaacctgctattagaaaaagcctccttgctaaaatgctcggcgagatacttgatacaagggtcatgatcaaacacgctatgaaaggtgcaagaggtgataagtcattaaccgccatgcataatgccaggcagcttggtttgaagctcatggcgaacgtcacttacggctatacgagcgcaacctactctggcagaatgccttgcattgaaatagccgactcaatcgtacaaacaggtcgggagactcttgagaaggctcaagaactgattcattcgcgcgttgattgggatgctcgcgttgtctatggagacacggactccctttttgttgccttaccaggtcgttcaaaggagcaggctttcaaaattggatatgacatagctaatgctgtgaccgcactcaatccgaagcctgtcaagctcaaatttgaaaaagtctacatgggctcagtattgatggctaagaaacgttacgtgggatttaaatacgagcatccagacgatacagagccgtcttttgatgcaaagggtattgaaaccatcaggagagatggctttcccgctcagcagaagatggaagaggtttgtctaaagctacttttccgcacgcaggatctatctaaagtgaaagaattctgcttgaaagaatggacaaagattctccagggtcatgtatctatgcaggacttcatcatcgcaaaggaagtacggttggggacgtattccgaaaaaggtatccctccccctggagcagccgtagcctatcgacgtatcctcaaggaccctcgcgacgaacctcaatacgccgagcgagttccgtaccttatttctaatgctgatggtcgacgcctaattgaccgcgctcgcatgcccgaggagctcctttccagtagatcattgagcattgatgctgaatactatattcgtaatctgctaatcccacccttatcgaggatcttcaatcttgttggagcagatgtagaagagtggtatgacaatatgccaaagaccaagagattgggaaagtacgacaaagctgggggcaagatgaccaacagaggaaatgggaaagggaagcagggagaagcaaaaggacggggctcgagaatagactcccattttaggtcgagtcactgcgttgtgtgtggtatagagtcttcagacgtactatgccacccctgtcgtctggacccctccacgacatcacatgcccttctatctcgacttcatatcgcccaagacaaactcattgttttgcaaaagatatgcgcttcttgctcctcagtgcctcccgccgaaaaaattctgtgtgactctattgactgtcccaatacctttgctagagtggcggctgaaagagaggtggaagatctggaagacgtcggcgagttgttattggaattgaagctagaggatgagaggccggaaatagatctcagttggtaa

SEQ ID NO: 2694 - protein, 1973 aa, Cryptococcus neoformans var. neoformans B-3501A
MEDTAVVNQGPSSSLPVGSSQSLSLSSPRLRVKITHIISDQAAPIPTLRQHYAPSRLATAIPLGNLPHSVPVIRIFGTTSSSQKICANIHLCYPYFFVPYPMDSQDPLRPERVVKLCQRFAVSLNYAICLALRQNPTSAANNTNYGGGVDPKHLHVVSVILVKGTPFYGYHLGFDYFLKINLANPARLHIALEQLRKPNVLGREWQPHEAHLNHVLQFMCDFDLYGCGWLELGGGTFREPVPEADPFDSLSETVTDGTLGLLNCRTIPTSMLYPPGLSPAKDSFTSLEFDILPHQILNRQRLMPRLLHHDFIELLHKPLDPNEKLVPAVAELWEDERRRRAAKGLGTGTNDMMPGSGGMDGRSMEELGYRGNQVDGKKNKGGDWKISDELWAILEERMGAERKRKGKLTFQKYSRDVSAGREGEKLQWDKWIMTTFDALSAHWPKQAKKVTKTTQMSRKSHMTLPADTSSIYYGSSQDKNALFGESTSVTLEEPGMDSRLEKEDEEINPFEAFAMTQASQHPQPVPELSQHVQAVPFKEVEDSDQYYVGEDEGDIDEYKQAEGARVHAQETDKIRATQMASEMEGHYDEYDDKELEELFRQTVAAGLGVQSVPTTPHRPKDQDQEGNSRWSGWTPTSKGSSKSSVGTFESRKRKRNQRLLEDAGLGDLSTIIDRSSLSLSPLKNPYDERGHGVSTPENANTPSREMATPSSLMRNAFAKSRQQSPNLSPAKRSESSRSKHLRSDTVILPLERKNPGAITSSPSLSPRDKVIDGDHGNLQRKLAEAKKPLQGQFPSASAKKNLVVGPEPGQEVVQLSLPPAGAGLYEPVANVVSPVVSNSSRPIGLVESHLSSTLLNPSFRDKTSDLPLSATLLNAPSAKPALSPTFQDPSANDERLPISPSIVATHRDDREAKVRPHKRVKLTEPGHASQESLLPLISNFSHPSHGDRHRSPQNAASDHQENLSSCLASKAWQYYILPPQRHEIADTMELHGVSTVDYQPPFFGQLADVPKRSKTLAGRVFNLKSHSVRNLQKFESTIGSGPLLENAKGKERAKAGWLKTNSDNDSVGKREVKRWCEKIEDKAKIAREKYEEKTSQLAHPTQKSKYGFKYSQKGKVRDSSGDPQNMSILTMEVFAQSRGTLLPDPEKDAVTAIFYCYSNTDDDLPDTTIYPGYHAGYVVTSALANPARLRLDDIPFEVVEDELALINWVIDIVKFWDPDVLAGWELHNSSWGYLAARASGEFAMDMMDQISRIISGRTGPRNDGYSAHHSSTFKVVGRHTLNIWRICRSEINLTQYTFENVVFHLLHQRIPHYSPSSLTALWKSKYPSHACRVLKYFFQRTVMCMEILDQAEIITKTAEFARVFGVDFASVLTRGSQYKVESFIFRIAKPESFVLVSPSKQQVGLQNAPFAVPLIAEPESKYYTHPVIVLDFQSLYPSIMIAYNICYSTCLGRVEMFKGTNKFGFTNLKVTEGLLELLKDYLTVTPNGMIFVKPAIRKSLLAKMLGEILDTRVMIKHAMKGARGDKSLTAMHNARQLGLKLMANVTYGYTSATYSGRMPCIEIADSIVQTGRETLEKAQELIHSRVDWDARVVYGDTDSLFVALPGRSKEQAFKIGYDIANAVTALNPKPVKLKFEKVYMGSVLMAKKRYVGFKYEHPDDTEPSFDAKGIETIRRDGFPAQQKMEEVCLKLLFRTQDLSKVKEFCLKEWTKILQGHVSMQDFIIAKEVRLGTYSEKGIPPPGAAVAYRRILKDPRDEPQYAERVPYLISNADGRRLIDRARMPEELLSSRSLSIDAEYYIRNLLIPPLSRIFNLVGADVEEWYDNMPKTKRLGKYDKAGGKMTNRGNGKGKQGEAKGRGSRIDSHFRSSHCVVCGIESSDVLCHPCRLDPSTTSHALLSRLHIAQDKLIVLQKICASCSSVPPAEKILCDSIDCPNTFARVAAEREVEDLEDVGELLLELKLEDERPEIDLSW

SEQ ID NO: 2695 - DNA, 5196 bp, Oryza sativa subsp
  CDS (1)..(5196)
atggccgccgccgcctcctcctcctcgccgccggggaccgcctccccggtgctcagcgtgcggatcgtctccctcgactactacatggcgccgcccctccccggattcgacttctcctacagccacttccacggcggagaggtggaggaggtgccggtgatcaggatctacggctccacccccgcggggcagaagacttgcctccacatccatcggctaatttcgctcgtcatttttgattcaagacttcaaccgagtctgcgtgtgtttgatgctttgagcgtgagtgtccttccatttctgtatgtaccttgcaaagaggaccttcttcataacgtcgaaaaaggtaattcatttatatctggtctattgagtgatcttgagaaagctttgcaggatggtgctgttcttaatagagtattccaaccttatgagtcccacattccatatcttcttcactttttgattgactacaacttgtatggaatgggctatgtacatgttacagacttcaagttccgccctccattgccagatgattttcatccaaagtcatctcttcacagcaaggtggactgctccactgaatcagggcataaggtacatccggataatgtcgcaattagaaaaccgacaatctggatatcttcaacagtaccacattctttaatactggctagttcagccacttcccattgcatggaaggaacaaattggaacgtcactaatcgacatagttctttgatgcttgaagctgactcgagaatagaaggcatcctaaatgaaaagtataagatgtacacttccctttcacaagctacagcagatagcaaaatagttcggtcacttttatcaatttgggaggaactcgagcacttaagattgttggaggaagcaaaacctgttgatatgggcagacctttgcgggattctgttcttagaagttttcttcatggaattaaatatgagactgccctttctatgctatgtccaaaggaggaagtgtcctatcacagagttccaaccatggaagaatctgaaaagctcgaagaatgcttaaaatcattgaatgatattattgggactatcacattttcacagaatgactactgttctattattgatagtgatatttctgcgggcactcaacaggagaaccagatcacaaatgttctgtgtttagagccatcggaagagggaaacactcagtgcccagtgtcatcatctgctgctcaaagaacatcatctcaattatttgaagaacatgaaaagcttgtggatgctgaagctcttggccttctaagctggctggcctcctcacaagctgcagaagaaccaacaactgatgatgagttggtcaatgaagccattcttagccctttattttccaagaagtccattgcagttgccttagagtctgcacagctggattttgatggtgcttctcagcaggagtgccaggatattcttgattcaattggacctgtgattggagaagaacaaccaaatgatcaaatgtcctaccgcagttctgtaaggctcggtgagagtagttccctgagcaatagtattccgcagattgatgggtcatctgatgaaaacaaggaagttccacaagaagatggtaagtataaaatcgacaggaaaagggctggattgcctagttattcatctcctcaaagtagttcaaaagccagtaagcgtggaggaaatgaacttctctggggctctttgccactttccattaaaaagagatcagatttgaatgctgatggtcattcaggtggtgcgatgcctactgagaaggtgctaagtgcttctttcatgagtggaactggaaagaactcccatgctaacccagataacactgagaggggatcttctagtccaacaggtgaacatgacccattgtgtgattctgtgagagatttgatgaggaggaggaggagatcttttcggtctgaacaatcagaagttggtaattctggagatgcagcatacatcgttcgtaaagagaatgaaattgtgaattctgagcgactagaattgcatgatatatccagtgacctttcaaattcagaaatgtattattctggcagtgaatatttgcagatgacctttgcacggaagcctccaatgaagaatgaagtattatgtttggagggctcttcagcaggtagtgagctgcctcaatcttccaaactgggatttgccgatatccctccgttttttaatcagaccgctgaagagaataagcagaatgaatcatttcaacgcatgggaagttcatgggatacattgggtgttccaactcatttccaaaatgatggatcagccttatatttgctgacacatgcattttcgccaccatccactgtagccgtgggccagtggctaacccaacaatcttgttctgttagtgtctctggtataggtcattccaactatggcgagaaagtgtctgttgatcaggagggagcaaacaattctactctttcaccatatatgggaggtcctgctttgatggatgattctcctgcatctaaaatggctttggagcatagcattacgacatttcctgatgatacagttatgatagaaccagatctttccaaccaagaaattaaaaatctggctgattggcatgacttttcccagatctctggtggagatgagaaggataaacttacacctctcagtcaaattggattctgtgatcctgctagtattggtggcggacagcaactgactataattagcatagaggtaataacagaaagcagaggagagctgcgtcctgatccacgatttgatgccatcaatgctgtatcgctggccgttgaggatgatgctgacaatactattgaagttcatgtgcttatacgtggaaacaatgacagttcacacaggaggagaaacctggatggagtttccggttgtgacgtaaatgtatttcctggagagagggaacttttgaaccatcttattaatgcaatatgttcaattgatccagatattatagttggatgggagattcagttaggatctttaggattccttgctgaaagagctgctcatctgggtataggcttactgaaaagaatttcaaggacaccaccgcatcagatgaaacatccacctatgaacccagtggacgaatctagtcaggagcttcctggagcatcttcagctgatgatgttattgatgatgccagtgaaaacaattggagtcatgctcatgctagtggtatacatgttgatggacgaatcatactgaacttatggcgtctcatgcgtgcagaagttaaacttaataattactccctcgaggctgtagctaatgaagtcttgaggaggaaggtaccattagtaccaactaagatattgaatcgatggtttgcaacaggttctggacgaggaagatatcgatgcatagaatatgttaataagagatcttctctcaaccttgaaatattaaatcaacttgacctggtaaaccggacatctgaacttgcccgtgtatttggtattgatttcttctctgttctttctcgaggttctcagtttcgtgttgaatctatgctcttgagattggttcatacacaaaactaccttgcaatttcccctggaaatcaacaggttgcttctcagccagccatggaatgcttgccacttgtaatggaaccagagtcagctttctactctgacccagttgttgtattggattttcaatccctttatccctccatgataatagcatataacttatgttattccacatgcttgggtaaagttttcccgtcaaagtcaagtgtacttggtgtcagctcatattcagcagatccacagaaaattgctgacctgaaaaatcagctgctgctgactccaaatggtgtcctgtacgtgcaacctgaggtcaggaaaggtgtgcttcctcgccttctcgaagagatactatcaacaagaattatggtgaagaaagcaatgaaaaagctgtctgcatctcagaaggttctgcagcggatttttaatgcacgccaacttgctctgaagctgatagctaatgtaacatatggttacacagctgctggattcagtggtcgtatgccctgtgcagagattgcagacagcattgttcagtgtggccgtagaacacttgaaacagctatatcattcgttaaccagcaccctttgtggaaagctagagttgtatatggtgatactgacagctacgagagtcctgaacagaaagagcccatctttgatgcaaagggaattgaaacagtgcggagagatacatgcccagcagttgcaaagattttagagcaatctattagaataatgtttgaagaacaagacttagccaaagttaggtcatatttggagcgtcaatggacacggatactatcagggaaaatttctattcaagatttcgtttttgctaaggaggttcgcctaggtacttatagtgcaagggcttcctcgctgccacccgcagcaattgttgcaacaaaagcaattctatctgatcctagggcagaacctcgctatggggagagagtgccatatgttgtaatccatggagaaccaggtgctcggcttgtagatatggttattgatccttatggcctgctagaagttggatctccatatagattaaatgcactatattacataaccaaacagataatccctgcattgcaacgtgtttttggactcgttggtgctgacctgaataagtggtttaatgagatgcctcgcccaataagggaaacacttgctaaacgacagtcagcatctggtcatggtagctttagccgattaggattgaataagaaaggggttggcaaaggaagcaggatagatacttactatatgtcaagccactgtataatttgtggtgaaataattcaaggatcagacacattttgcaacaactgcttgagaaatgaagctgttgtcggcacaatagttgctggcagaacttccaaattggagcgggaaattcagcatcttgctgctatatgtggtcactgcggaggggcagattggattgttgaaagtgggatcaagtgcatttcccttgcatgcccagtgttctttgagcggagaaagattcaaagggagttgaggggtgtttcagaatcagcaatagaagctgggtattatcccttctgttgtccagaactcttctga

SEQ ID NO: 2696 - protein, 1731 aa, Oryza sativa subsp
MAAAASSSSPPGTASPVLSVRIVSLDYYMAPPLPGFDFSYSHFHGGEVEEVPVIRIYGSTPAGQKTCLHIHRLISLVIFDSRLQPSLRVFDALSVSVLPFLYVPCKEDLLHNVEKGNSFISGLLSDLEKALQDGAVLNRVFQPYESHIPYLLHFLIDYNLYGMGYVHVTDFKFRPPLPDDFHPKSSLHSKVDCSTESGHKVHPDNVAIRKPTIWISSTVPHSLILASSATSHCMEGTNWNVTNRHSSLMLEADSRIEGILNEKYKMYTSLSQATADSKIVRSLLSIWEELEHLRLLEEAKPVDMGRPLRDSVLRSFLHGIKYETALSMLCPKEEVSYHRVPTMEESEKLEECLKSLNDIIGTITFSQNDYCSIIDSDISAGTQQENQITNVLCLEPSEEGNTQCPVSSSAAQRTSSQLFEEHEKLVDAEALGLLSWLASSQAAEEPTTDDELVNEAILSPLFSKKSIAVALESAQLDFDGASQQECQDILDSIGPVIGEEQPNDQMSYRSSVRLGESSSLSNSIPQIDGSSDENKEVPQEDGKYKIDRKRAGLPSYSSPQSSSKASKRGGNELLWGSLPLSIKKRSDLNADGHSGGAMPTEKVLSASFMSGTGKNSHANPDNTERGSSSPTGEHDPLCDSVRDLMRRRRRSFRSEQSEVGNSGDAAYIVRKENEIVNSERLELHDISSDLSNSEMYYSGSEYLQMTFARKPPMKNEVLCLEGSSAGSELPQSSKLGFADIPPFFNQTAEENKQNESFQRMGSSWDTLGVPTHFQNDGSALYLLTHAFSPPSTVAVGQWLTQQSCSVSVSGIGHSNYGEKVSVDQEGANNSTLSPYMGGPALMDDSPASKMALEHSITTFPDDTVMIEPDLSNQEIKNLADWHDFSQISGGDEKDKLTPLSQIGFCDPASIGGGQQLTIISIEVITESRGELRPDPRFDAINAVSLAVEDDADNTIEVHVLIRGNNDSSHRRRNLDGVSGCDVNVFPGERELLNHLINAICSIDPDIIVGWEIQLGSLGFLAERAAHLGIGLLKRISRTPPHQMKHPPMNPVDESSQELPGASSADDVIDDASENNWSHAHASGIHVDGRIILNLWRLMRAEVKLNNYSLEAVANEVLRRKVPLVPTKILNRWFATGSGRGRYRCIEYVNKRSSLNLEILNQLDLVNRTSELARVFGIDFFSVLSRGSQFRVESMLLRLVHTQNYLAISPGNQQVASQPAMECLPLVMEPESAFYSDPVVVLDFQSLYPSMIIAYNLCYSTCLGKVFPSKSSVLGVSSYSADPQKIADLKNQLLLTPNGVLYVQPEVRKGVLPRLLEEILSTRIMVKKAMKKLSASQKVLQRIFNARQLALKLIANVTYGYTAAGFSGRMPCAEIADSIVQCGRRTLETAISFVNQHPLWKARVVYGDTDSYESPEQKEPIFDAKGIETVRRDTCPAVAKILEQSIRIMFEEQDLAKVRSYLERQWTRILSGKISIQDFVFAKEVRLGTYSARASSLPPAAIVATKAILSDPRAEPRYGERVPYVVIHGEPGARLVDMVIDPYGLLEVGSPYRLNALYYITKQIIPALQRVFGLVGADLNKWFNEMPRPIRETLAKRQSASGHGSFSRLGLNKKGVGKGSRIDTYYMSSHCIICGEIIQGSDTFCNNCLRNEAVVGTIVAGRTSKLEREIQHLAAICGHCGGADWIVESGIKCISLACPVFFERRKIQRELRGVSESAIEAGYYPFCCPELF

SEQ ID NO: 2697 - DNA, 5718 bp, Vitis vinifera
  CDS (1)..(5718)
atggaaaattcacaggacgatgcgaagattttcagcgttcgaatcgtttcgatggattactatatggcgcctccgattccagacctcgacatttgttacagtagctttcaaggtggtatggtgaaggaagttcctgtaataaggatttatggctctactcctgtgggccagaagacttgcttgcatgttcatcgagctttgccctatttgtatgtgccatgcacggatctaatgcctcagtcaccccaagaagttattgataaacaaactttgattattaaatgtggcacctataataactacaatccccaagactttgtctcattatggttttactctgatacatacacacatgctgtatctcttggtgttgagaaagccttgaagcttaaaggtaatgctggttcaaaacgacaacatgtgcatggctgcagccttgttcgggcaaaaaacttttatggttaccattcgtcagaggagctatttgtgaaaatatatctctaccatccgcatgatgtctctcgtgctgctaatcttcttctgggaggttcagttcttgataaaagtttacagccccatgaatcacatattccctttcttctccaatttctgattgactacaacttgtatgggatgggtcatctacatctatcgaagatgaaatttcgtcatccagtacctgatgttttctcctcaaggaaagttaattataatggccaacaaaaactggagccagatgactttgcttgcatatctgctcatttgcaggcagattcaagtggtgacacatgtttaagttcaccagtttggatatcttccacaattccaggtggttggatgtggcaattttctagtcaactagatgcttcaccaggtcagggcatttgcagccctaagcgtcaaagtacctgtgagcttgagggagatgctattgtagaagagattcttaatcagcagtttaaattgtactcatccctttcacaaacccattcagatgtgaaaatggtccggtcactgataccaatttgggaggaggagtttgaaaggactggaatgcatgaggtggcaatgcctcctgatcctggcaaaccactgccagaagatgttttgagaagtctctcacatgggcttgaatttgagaacaaacttggagagttgtgtaatcaagcaggtgactctttggcttttactccattggagaaagatgagaggtttatgcagtcaataacatcttcagctgatgagagaaatttagttggagatgtacttgttcgccctaatgacaatgatggagagccttcaaagtgtttcaaagatcaaaataagaacatttctccagtatcacaaggttcattgtgtgaagaagatgatgatgcaatacccagtgaaggcagggataatgaagccctggggctactaagctggcttgcctcttctcaggctgcagaagatataaactctgacgatgaacttgtttgtcagaccattctgagtccattgttgcccacagtaactattgataaggtgttggagaaagccaatatggattatgagaatgaatcccaacaagagtgtcaggacattcttgattcagttgaggatttagctgactttaagggtttaaaggagagagcctcttgttccacagatcatagccattcacctcaaacttcattagagaaaatgatcccccaagtggatggttctggtgatgatcctaatgattgttcaggtaattcatctgaaacagagatgaaaagtgagactaagaggttttctcagcaccaggtccttcaagatactggtgcaagtttctctaataagcataaaaggaaccagtctttatggggctctttacctttaacaacaactcaaaaggtgaatgataacttaaaatctgtcagtttgaacatggccaagaaagatgccagtgaagttaaagacggtgcagataaaagtttcttggccagaaatgaggaagaaaaatgttgtgaggctttatgcaatgtgagaacagatgtcaatgatttaaaagaagcaagtactttagttggatgctctatgcgggacttgatgaggagaaaaagatgccaccgggttgagccatctgaatgtgtgattcatactaaaaaggtgcgagattctgcagcttccatggtcgattttgaattttctaattgcaaagagtatgcttgcaaacctgatccttcaactgatgttcagtttttgaagtttgatactggtgataaacattttgttgatgagagattgaagcaaactaaagcatctgcttcaagctgtttgtcaaattcaccttttgaacatgaaatggtatgtcgagatgggtacacttgcaaaagtggccgtgactgcaggacctccattgagtgtttgcctgaaatatcttctgagaatcttgaaggttgggatggtgctactggcacaacactttcacaatttaagaattgtggtggtggagattggggaaatgatgctggcttgtctgggactcacaatttagtatccacagttgtcaacatggaagcaaaacctgtggaacttattggcatgaccttccaccagaagcctcccactgtagactggacggatgggacttttgataatgccttgttgtcacctgctatccccaattgctcttctcttgagaatgaggaaattcaaggcacaattctggatgaattcatcccattttttgtgggggactgccaggaagagaaaaaagtttggaacaagtgctataatgacttaaataatcaccaagaagttggcatgggtgtgcctacccactatcaaaatgatggctcattcttgtacttgttgacaccagtattttcacctccatccgcagattgtgttcatagatggctgttgcatgatgacacggtgctcattgcagatacctctgctgagcctttgcctgtggggtctgtgtctcacgtgaaacctgtcctggatcaacagaatcatgaaattcatgacaacctcaatgcaaaaaagaatgcttttcatgataaggtgccagaaaaaacacaggtcaaagggaatattatgaaagtaaaaaaatgcactaattgctcacaggatatctctcagatttcaggcccagaggagaaatcaaaacctactcctcttagtcaaattggatttcgggacccggcaagtgttggtgggggacagcaagtaacattgttaagcatagagattcaagcagaatctagaggagatctccgacctgaccctcgatatgatgccatcaatgtgattgttcttctgattcaggaagatgatgattctgctcttgaagtttttgtgctttgtcgaagtaatattgaaccttgtcagagaaaacttgacggaatatctggttgcaaggtgttggtttcctctgaagagaaactcttatttgacgactttattaatattatatgttcatttgatccagatattttgattggctgggatattcaaggtggctcccttggtttcttggctgaaagggcttcacatcttggtataggtttacttaataaaatatctaggacaccatctgaaaccaagacagcttctagaaattttgaaattcctgagaaaagagatgaatggggtcggactcatgcaagtggtgtccatgtcggtggtagaattgtccttaatgtttggcgactgatgcgtggtgaaattaaacttaatatgtacactgctgaatctgtagcagaagctgttttgaggcaaaaaattccatcaattcgtaatagagtattgactaagtggttttcaagtggtcctggaagggcaagatatcgtagtattgaatatgtcatacagagagcaaagctgaattttgagataatgaaccaacttgacatgataaaccggacatcggagcttgctcgtgtgtttggaattgattttttttctgttctctcccgaggttcgcagtaccatgttgaatcaatgtttctaagactggcacatactcagaacttccttgcgatttctcctgggccccaacaggttgctactcaacctgctatggagtgcctgcctcttgtaatggagccagaatctggtttttatgccgatccagtagtggttttggattttcagtctctttatccatctatgataattgcatacaacctctgctattctacatgccttggaaaagttgcaccttcaaaggcagatgtacttggtgttagcatatattcaccagatccgcatgctttacatgatttaaaagatcaaatactgctcactccaaatggtgttatgtatgtgccttcaaaggcacgtaaaggcgtgctgcctcgtttgttggaagaaatattgtcaactagaataatggtgaaaaaagcaatgaagaagttggttccttcccagcaggttcttcaaaggatatttaatgcaagacagcttgctttgaagctgatagcaaatgtaacatatggttatacagctgctggatatagtggtcgtatgccttgtgcagagcttgcagacagcattgttcaatgtggccgtaggacactggaaaatgctatttcacttgtaaatacacatgataaatggaaagctaaagttatttatggtgatactgacagcatgtttgtcctccttaaaggccgcactgtcaaagaatctttccaaattggacatgagattgcatctgcagtaactgcaatgaaccctaatccagttacattgaaaatggagaaagtctatcatccttgcttccttcttaccaagaaacgttacgttggttacagttatgagagccctgatcaaattgaacccacctttgatgctaaaggtattgagacagtacgtagagacacatgtggcgctgttgctaagacaatggagcaatccctgagacttttttttgaacatcaagacatttccaaggttaaagtatacttgcagagacagtggagaaggattctatctggtagggtgtctcttcaggattttgtttttgcaaaggaggttcgcttaggtacatacagttcaagagcttcttcactcccaccggcggcaattgtggccatcaaagcaatgagagccgatcccagggctgaaccatgctatgcggagagagtaccttatgttgtaatccatggggagcctggagctcgcctggttgatttggttgtggatccattggatcttttggcaattgattctccctacagattaaatgatcaatactacatcaacaagcagataatcccagctttgcaaagggtatttggacttgttggagctgatttgtaccagtggttttcagagatgcctcgcccagttagggaagtttatgctaaacacaagtctcatgctccaaatccataccggaccagaattgatttttactatctctcaaaacactgtatcctatgtggtgagctgtccccggcatcagcccatatatgcgataaatgttctaaagatggaactgctgttgctgcagctgtgattggaagaactgcaaaattagagagagatattcaacaccttgcagctatatgccgacattgcggaggtggagattggatcgtggaaagcggggtgaagtgcacatcacttgcatgctcagtgttctatgaaagacggaaagttcagaaagacctgcagggtctctcttctgttgctacagaagcaggcttttaccccaagtgtatggttgagtggttctga

SEQ ID NO: 2698 - protein, 1905 aa, Vitis vinifera
MENSQDDAKIFSVRIVSMDYYMAPPIPDLDICYSSFQGGMVKEVPVIRIYGSTPVGQKTCLHVHRALPYLYVPCTDLMPQSPQEVIDKQTLIIKCGTYNNYNPQDFVSLWFYSDTYTHAVSLGVEKALKLKGNAGSKRQHVHGCSLVRAKNFYGYHSSEELFVKIYLYHPHDVSRAANLLLGGSVLDKSLQPHESHIPFLLQFLIDYNLYGMGHLHLSKMKFRHPVPDVFSSRKVNYNGQQKLEPDDFACISAHLQADSSGDTCLSSPVWISSTIPGGWMWQFSSQLDASPGQGICSPKRQSTCELEGDAIVEEILNQQFKLYSSLSQTHSDVKMVRSLIPIWEEEFERTGMHEVAMPPDPGKPLPEDVLRSLSHGLEFENKLGELCNQAGDSLAFTPLEKDERFMQSITSSADERNLVGDVLVRPNDNDGEPSKCFKDQNKNISPVSQGSLCEEDDDAIPSEGRDNEALGLLSWLASSQAAEDINSDDELVCQTILSPLLPTVTIDKVLEKANMDYENESQQECQDILDSVEDLADFKGLKERASCSTDHSHSPQTSLEKMIPQVDGSGDDPNDCSGNSSETEMKSETKRFSQHQVLQDTGASFSNKHKRNQSLWGSLPLTTTQKVNDNLKSVSLNMAKKDASEVKDGADKSFLARNEEEKCCEALCNVRTDVNDLKEASTLVGCSMRDLMRRKRCHRVEPSECVIHTKKVRDSAASMVDFEFSNCKEYACKPDPSTDVQFLKFDTGDKHFVDERLKQTKASASSCLSNSPFEHEMVCRDGYTCKSGRDCRTSIECLPEISSENLEGWDGATGTTLSQFKNCGGGDWGNDAGLSGTHNLVSTVVNMEAKPVELIGMTFHQKPPTVDWTDGTFDNALLSPAIPNCSSLENEEIQGTILDEFIPFFVGDCQEEKKVWNKCYNDLNNHQEVGMGVPTHYQNDGSFLYLLTPVFSPPSADCVHRWLLHDDTVLIADTSAEPLPVGSVSHVKPVLDQQNHEIHDNLNAKKNAFHDKVPEKTQVKGNIMKVKKCTNCSQDISQISGPEEKSKPTPLSQIGFRDPASVGGGQQVTLLSIEIQAESRGDLRPDPRYDAINVIVLLIQEDDDSALEVFVLCRSNIEPCQRKLDGISGCKVLVSSEEKLLFDDFINIICSFDPDILIGWDIQGGSLGFLAERASHLGIGLLNKISRTPSETKTASRNFEIPEKRDEWGRTHASGVHVGGRIVLNVWRLMRGEIKLNMYTAESVAEAVLRQKIPSIRNRVLTKWFSSGPGRARYRSIEYVIQRAKLNFEIMNQLDMINRTSELARVFGIDFFSVLSRGSQYHVESMFLRLAHTQNFLAISPGPQQVATQPAMECLPLVMEPESGFYADPVVVLDFQSLYPSMIIAYNLCYSTCLGKVAPSKADVLGVSIYSPDPHALHDLKDQILLTPNGVMYVPSKARKGVLPRLLEEILSTRIMVKKAMKKLVPSQQVLQRIFNARQLALKLIANVTYGYTAAGYSGRMPCAELADSIVQCGRRTLENAISLVNTHDKWKAKVIYGDTDSMFVLLKGRTVKESFQIGHEIASAVTAMNPNPVTLKMEKVYHPCFLLTKKRYVGYSYESPDQIEPTFDAKGIETVRRDTCGAVAKTMEQSLRLFFEHQDISKVKVYLQRQWRRILSGRVSLQDFVFAKEVRLGTYSSRASSLPPAAIVAIKAMRADPRAEPCYAERVPYVVIHGEPGARLVDLVVDPLDLLAIDSPYRLNDQYYINKQIIPALQRVFGLVGADLYQWFSEMPRPVREVYAKHKSHAPNPYRTRIDFYYLSKHCILCGELSPASAHICDKCSKDGTAVAAAVIGRTAKLERDIQHLAAICRHCGGGDWIVESGVKCTSLACSVFYERRKVQKDLQGLSSVATEAGFYPKCMVEWF

SEQ ID NO: 2699 - DNA, 5685 bp, Arabidopsis thaliana
  CDS (1)..(5685)
atggctgattctcaatccggttccaatgttttcagtttacggatagtttcaatcgattattacatggcttctccaatccctggttataatatttgctacagtagcttccaaggtagtgaggtaaatgaagtccctgttataaggatatacggctctacacctgctggtcagaagacttgcttgcacattcatcgtgctttaccatatctctatattccgtgctcagaaattccacttgagcatcataaaggagtggatggaagtacacttgctttatcccttgagttagagaaggctctaaagcttaagggaaatgctgcttcaaaaaggcaacatatccatgattgtgagattgtaagagcaaagaagttttatgggtaccactcaacagaggaggcttttgtgaagatttatctgtatccttatagtagctaccatccacccgatgtggctcgtgctgccagtcttcttctggcaggtgctgttcttggtaaaagtttgcagccttacgagtctcatattccctttattctccagtttctggttgattataatttgtatggaatgggtcatgtgcatatatcaaagatgaagttccgtagcccagtgcctcaccatttccggccaaggagatttgatttggatgattgtccgggacaaaggattgacgaagtggctattacaaaggcaaattcaagtgctgctgcaagcgtcagttttcctgtttggagcttgtcaacaatcccaggtcagtggatgtggaatctctctgaagaatctgatacaccgttgagccagagccagcataggcaccaacaccattacagacgtcagagtctctgtgaacttgagggagatgctactagtagtgatattctcaatcaacagtttaaaatgtacaactccctttcacaagcccagtctgatactaacatggttcagtcgcttgtggcaatttgggaggaggagtatgaaaggactggtgtgcatgatgcacctatacctcctgatcctggtaaaccctctgcagctgatgtgttgcagactatgtcagattatgttgggtttgggaatatgcttaaagaaatgctaaacaaagttgaattgtctccgcctggtatgaagcctactgcagtatcttcagctggtccagatatgcatgccaaacctgaaattactgatctacaggctttgaatcatatggttggtacatgcagtgagtttcctgcatcagaacagctttctccacttggcgagaagagtgaagaagcatcaatggaaaatgatgaatatatgaaaacacccacggacagagatacacctgctcaaatacaagatgctgaagccttgggtctctttaagtggtttgcctcatctcaggctgcagaggacataaactcagatgatgagattctccgggaaactatccttagtcctcttttgcctttagcgtctattaacaaggttcttgaaatggctagtacagattatgtgagccaatcccaaaaggaatgtcaagacattcttgattctcaggaaaatcttccagactttgggagttcgactaagagagctttacctagtaatcctgatagccagaatcttagaacttcatccgacaaacaatctcttgaaatagaagtcgctagtgatgttccagatagctccacttcaaatggagcaagcgaaaattcattccggagatacagaaagagtgatttacatacgagtgaagtaatggagtataagaacaggagcttctctaagagcaacaagcctagcaactcagtatggggacctttaccttttacactgaccaaaaatcttcagaaggactttgacagtacaaatgctagtgataaacttggtttaacaaagattagttcttaccccatgaatgagatgacagacaattatattgttccagtcaaagaacatcaagcagatgtttgtaatacaattgacagaaacgttttggctggatgttctctgcgggacttgatgagaaaaaaacggttatgccatggagaatcgcctgtttcacagcatatgaagtctaggaaggttagagattcccgacacggggaaaaaaatgagtgcaccttgagatgtgaggccaaaaaacaaggtcctgctctttctgcagaatttagcgaatttgtttgtggcgatactccaaatttatctcctatagattctggaaattgcgagtgtaatatatccactgagtcatctgaacttcattctgttgatagatgttcagctaaagagacagcaagtcaaaacagtgatgaagttttaaggaatttgtcatctaccactgttccatttggtaaggatccacaaactgtggaatcaggaacactagtgtctagcaatatacatgttgggattgaaatagatagtgtccaaaaatcggggagggagcaagagtcaactgccaatgaaactgatgagacgggaagattaatatgcctaaccttaagcaagaagcctccttctctcgattgcctaagtgctggactgcaggattctgcacattctcatgaaattcatgccagggaaaaacagcatgatgaatatgagggaaattccaacgacatcccgttttttcccttggaggacaacaaggaggaaaagaaacactttttccaaggaacttcccttggtattcccttgcatcatctcaatgacggctccaatctttacctactgacccctgccttttcacccccttctgtggattctgttttacaatggatatcgaatgacaaaggagactctaatattgattcagaaaaacaaccattacgagataatcataatgatcgtggagcaagtttcactgatcttgcttctgcatctaatgtggtgtctgtgtctgagcacgtggagcagcataataacctttttgtgaattcagaatcaaatgcttatacagagtcggagatagatctgaaacccaaaggaacgtttcttaatcttaacttgcaggccagtgtttcccaagagctgtctcagatttcaggccctgatgggaaatctgggcccactcccttaagtcaaatgggattccgagatcctgcgagcatgggtgcggggcaacagcttacaattctgagtatagaggttcatgcagagtctagaggggacctgcgacctgatccacgatttgattctgtcaatgttatagctctcgtcgtgcagaatgacgatagttttgtagctgaagtatttgtgcttttatttagtccagatagcattgatcagagaaatgttgatggcctatctggatgcaagttgtctgtattccttgaagagaggcaactattcagatattttattgagactttatgtaaatgggatccagatgttcttctgggctgggatatacagggcggatccattggttttctagctgaaagagctgcacagcttggtataagatttctcaataatatatctaggacgccatctccgaccacaacaaacaattcagataataagagaaaacttggtaataatctgctgccagatccgttggtagctaatcctgctcaagtagaagaagtggtaattgaggacgagtggggccgcacacatgctagtggtgttcatgttggaggtagaattgttctcaatgcatggcgtttgattcgcggggaagttaaactcaacatgtacacgattgaagctgtgtcagaggctgttttgaggcagaaggttccatcaatcccctataaggtattgacagaatggttttcaagtggtcctgcgggtgcaagatatagatgcatagaatatgtgattcggcgagcaaatttgaaccttgagataatgagccaacttgacatgataaatcgtacgtcagaacttgctcgtgtttttggtatagactttttctcagttctctcccgaggttcacagtacagagtggaatccatgcttctgagattagcacatacacaaaattatcttgctatttctccaggaaaccaacaggttgcctctcagccagctatggaatgtgtacctcttgtgatggaaccagaatctgccttttacgatgatcctgttattgtgttggattttcaatctctttacccttcaatgattatagcatataatctgtgcttttctacatgtctcggaaaacttgcacatttgaagatgaacacccttggggtcagctcatactctctagacctcgatgttcttcaggatttaaatcagatcctacagaccccaaacagtgtgatgtacgtgccaccagaggtgcgtagaggaattttacctaggctgctagaggagattctgtctacaagaataatggtgaaaaaagcaatgaaaaagttgactccttcagaagcagttcttcaccggatatttaatgcgaggcagcttgctttaaagctgatagcaaatgtgacttatggttatactgctgctggcttcagtggtcgaatgccttgtgcagagctggcagatagtattgtccagtgtggtcgtagcacacttgagaaggctatttcattcgtcaatgccaatgataattggaacgctagagttgtatatggtgacactgatagtatgtttgtcctcctaaaaggacgaactgtaaaagaagcttttgtagtcggacaagagattgcatctgcaataactgaaatgaacccacacccagtcactttaaagatggagaaagtctatcacccttgtttccttcttacgaagaagcgttatgttgggtacagttatgaaagtcccaatcagagagagcctatatttgatgcaaaaggtattgaaactgttcgaagagacacttgtgaagctgttgcgaaaactatggagcaatcgttgagactcttttttgaacagaagaacatctctaaggttaagtcgtacttgtatagacagtggaagcggatactatcagggagagtgtctcttcaagattttatctttgcaaaagaagttcggttgggtacttacagcacaagagactcttcactccttcctccagcagctattgtggcaaccaaatcaatgaaagcagaccctcggacagagccacgctatgctgaacgagtgccttatgttgtgattcatggggagccaggagctcgacttgttgatatggttgttgatccactggttcttttggacgtcgatacaccctaccgactgaatgacttatactacatcaacaaacaaattataccagctttgcaaagggtatttggactcgtgggtgcagacttaaaccagtggtttttggagatgccccgtctcaccagaagctcccttggtcaacgtcccttaaactctaaaaactcacacaaaacaaggattgattatttttatctatcgaaacattgcatcttgtgtggggaagttgttcaagaatctgctcaactatgcaaccggtgccttcaaaataaaagtgctgctgctgcaaccattgtttggaagacttcaaagttggagagagagatgcaacacctagccacgatatgcagacactgtggtgggggagactgggtggtgcaaagcggagtgaaatgcaattcccttgcgtgctcagtcttttacgagagacggaaagttcagaaagagcttcgtggcctctcctccattgctactgagagtgagctttaccctaaatgcatggctgagtggttctaa

SEQ ID NO: 2700 - protein, 1894 aa, Arabidopsis thaliana
MADSQSGSNVFSLRIVSIDYYMASPIPGYNICYSSFQGSEVNEVPVIRIYGSTPAGQKTCLHIHRALPYLYIPCSEIPLEHHKGVDGSTLALSLELEKALKLKGNAASKRQHIHDCEIVRAKKFYGYHSTEEAFVKIYLYPYSSYHPPDVARAASLLLAGAVLGKSLQPYESHIPFILQFLVDYNLYGMGHVHISKMKFRSPVPHHFRPRRFDLDDCPGQRIDEVAITKANSSAAASVSFPVWSLSTIPGQWMWNLSEESDTPLSQSQHRHQHHYRRQSLCELEGDATSSDILNQQFKMYNSLSQAQSDTNMVQSLVAIWEEEYERTGVHDAPIPPDPGKPSAADVLQTMSDYVGFGNMLKEMLNKVELSPPGMKPTAVSSAGPDMHAKPEITDLQALNHMVGTCSEFPASEQLSPLGEKSEEASMENDEYMKTPTDRDTPAQIQDAEALGLFKWFASSQAAEDINSDDEILRETILSPLLPLASINKVLEMASTDYVSQSQKECQDILDSQENLPDFGSSTKRALPSNPDSQNLRTSSDKQSLEIEVASDVPDSSTSNGASENSFRRYRKSDLHTSEVMEYKNRSFSKSNKPSNSVWGPLPFTLTKNLQKDFDSTNASDKLGLTKISSYPMNEMTDNYIVPVKEHQADVCNTIDRNVLAGCSLRDLMRKKRLCHGESPVSQHMKSRKVRDSRHGEKNECTLRCEAKKQGPALSAEFSEFVCGDTPNLSPIDSGNCECNISTESSELHSVDRCSAKETASQNSDEVLRNLSSTTVPFGKDPQTVESGTLVSSNIHVGIEIDSVQKSGREQESTANETDETGRLICLTLSKKPPSLDCLSAGLQDSAHSHEIHAREKQHDEYEGNSNDIPFFPLEDNKEEKKHFFQGTSLGIPLHHLNDGSNLYLLTPAFSPPSVDSVLQWISNDKGDSNIDSEKQPLRDNHNDRGASFTDLASASNVVSVSEHVEQHNNLFVNSESNAYTESEIDLKPKGTFLNLNLQASVSQELSQISGPDGKSGPTPLSQMGFRDPASMGAGQQLTILSIEVHAESRGDLRPDPRFDSVNVIALVVQNDDSFVAEVFVLLFSPDSIDQRNVDGLSGCKLSVFLEERQLFRYFIETLCKWDPDVLLGWDIQGGSIGFLAERAAQLGIRFLNNISRTPSPTTTNNSDNKRKLGNNLLPDPLVANPAQVEEVVIEDEWGRTHASGVHVGGRIVLNAWRLIRGEVKLNMYTIEAVSEAVLRQKVPSIPYKVLTEWFSSGPAGARYRCIEYVIRRANLNLEIMSQLDMINRTSELARVFGIDFFSVLSRGSQYRVESMLLRLAHTQNYLAISPGNQQVASQPAMECVPLVMEPESAFYDDPVIVLDFQSLYPSMIIAYNLCFSTCLGKLAHLKMNTLGVSSYSLDLDVLQDLNQILQTPNSVMYVPPEVRRGILPRLLEEILSTRIMVKKAMKKLTPSEAVLHRIFNARQLALKLIANVTYGYTAAGFSGRMPCAELADSIVQCGRSTLEKAISFVNANDNWNARVVYGDTDSMFVLLKGRTVKEAFVVGQEIASAITEMNPHPVTLKMEKVYHPCFLLTKKRYVGYSYESPNQREPIFDAKGIETVRRDTCEAVAKTMEQSLRLFFEQKNISKVKSYLYRQWKRILSGRVSLQDFIFAKEVRLGTYSTRDSSLLPPAAIVATKSMKADPRTEPRYAERVPYVVIHGEPGARLVDMVVDPLVLLDVDTPYRLNDLYYINKQIIPALQRVFGLVGADLNQWFLEMPRLTRSSLGQRPLNSKNSHKTRIDYFYLSKHCILCGEVVQESAQLCNRCLQNKSAAAATIVWKTSKLEREMQHLATICRHCGGGDWVVQSGVKCNSLACSVFYERRKVQKELRGLSSIATESELYPKCMAEWF

SEQ ID NO: 2701 - DNA, 5781 bp, Neurospora crassa
  CDS (1)..(5781)
atggaatttttaagacttcgattgaactgtattgatcactaccaagccacgccaactagatatgatccccagtttgaccaagatgtgcgcttttcgcgttcgcggaaggccgccaaagtccctgtaattcgggtgttcggatcgaccgacaagggccagaaagtctgcgctcatattcatggtgcctttccctatctgtatgtcgagtatgacggaaatctagaacccagcaaggatcatgcgttagctatcagctaccggaaagatcccattcgcgatcggcccaaatatgtagcacggatttcgctgacaaaaggtatacccttttatggcttccatgtgggttatcgcttctatctcaaaatttacctgttcaacccggtggtcatgtcgcgtctcgtcgatctccttcagcaaggtgttattatgagtcggaaatttcaaccctacgaggcccatctgcagtatctccttcaattcatggctgattacaacctgtacggctgtaactacctggatgcggcgatggccacctttcgagcacctgtaccgaagcatgacagcaacattgaaggccgtgaggctgaacatcactgggacgatacaacgatcccgccagagctgattacggataattacagccttccccgggctagccactgctcccttgaagtggacatctgcgtcgaagacatcctgaatagaaaacaagtcaaagagcgaaggcttcatcatgattttatcgaaaaggagcagccggtgtcaagccaagaaaagctggtgcacagcatggctggactctggacggatgagacaaaccgcaggaaaaagcgtatgggaataacggaccctgaagtcaacccttttcctccggaagtcttggtatcaatgtctgcggacccacgtcaatcacaggtgatggggtgggttcatgaagctgagtaccgtgctggtattcaacaattggttgctcaggaacagaacaacacagatggacgtcaggagactttctccagctttgtgcaaccagttccatttgaagaaactatcaagactactttagaatccgtggaagacttatacccagacaacttgagccaagctctgcaaatcgaagcacaatttttccacatgaatgcacaccatcccatcagtatcgatgtcgacgaacgaagcattattcagctgacacgcgagccatatgcaaaacacactcgacacgaatacgcgggcagaatctcaccggaggagtctttgaacggtgttggagaaggatttggtgtgggggattcaatgatttatcctatggatgggcggatccgtgtataccaacccagagcttccatccgtcataaacttttgaagattgcccagacttactcttccaacataccagccaatacaggtagacaagccgggattcttggtcctggagagcgacaacgaagatctctcaagcatcccaggccgccgggagaagttgatcatggtgcacctgcaaaacgtcaggtgctccaagctgagtactcaagggagtcacttcacataaaagccgaccctccgcaaagagctttgagaaaggctccgagaaacgcccatgaacaaactcaaagtgcaggtcggccagggcctcagagaaagctccagagtaaccctccggaaagggtttacgaggagccaaacaagagggttcatgaggaggctcaaccaaacgtccatcggaaggcccagcaaagatctcgggaacatgaccagaaacagggccaacagataatacaggaaccaactcaagatcatgatcagggaggatgccagaaggaagttccagcagattcggcattcacgacgccagctctgacaatccagccaatgaaacccaataatcaagatccaacaggagaggaactattggtgaatagtctgctggtcgagccaccaaaacctaagacatctcagcccatgaagtctgctatgaagcagagcttcacacaagagttccaaaaccgtacgatcaactttcccgtcgtcaaagatccacaagatcctaacacaagggcgcgactgagccaaaagagtggttcgcagaagaacgagggtaacgtcaccagaaagcaacttgccttcgaccctcaacccaccattttggggccatcggctcaggcgaaacccggtcagactaaacccaacctaaaatcgtcgtccaggccccttgactcggcccctgtggcttcggctccggcactcttgtggagtggctcaaagaacatgtttgtcttgaacaataaacctccatccctgagcgaagtccgctgtaccatgcaggtacatggcctacctgatgtcatctataaagacgcatattacagtaaggatgaggacgttccctccagaccgagagaatatgcaggcagggaataccgacttgacggtagctctgttccttggctccccgatttcgacccgactggcacatcttcggcgacatatggagagaaaccaacctccggtgccgactggccaatgctggaggcaatctatgaggctcaacaagaggaatgtgcgatgaggggttgggaaatagcagatcctcctccttctttcaaggaagtcagtaattggtggacagatgaacaaaacgatcgcaatccaaaacgatgccattccacacccctaaggtttaaaacctaccgctcccaaatcgcgggcgtgacgccaaagaacagacatggcttcgaacatcccgaaaagacaaaatctgaaagcaaacaggatcaggcacagtacatgagcgccatgagcctagaggtacatgttaacacccggggcaagctagtaccggatcctgaagaagacgaagtgcagtgtgtgttttggtatctgcggtccgaagtaaacgctctctgcggaactcaggcgccggatgatacggcacggggcattatcgttttctcagaggatagtctgcttgcagatagaatccgaaagcacacatccgtgccggtggttcaagagacaacagaacttgatatgatggtccggatggtcgagattgtgcggaaccatgatcccgatatcttcacgggatatgaggtacatggcagttcatggggctaccttattgagcgagcgagaataaagtatgagctcgacctctgtgatgagttctcacgcatgaagtctcagtcaaatgggcgtatcggtaaggatgcggatcgctggggcttcaacacgacatcctcgattcgaattacaggacggcacatgatcaacatttggagagccatgagaggcgaactcaatcttctacagtataccatggagaatgttgtttggcatctgctacaccgtcggattcctcattacagttggaagacattatcggattggtatctgagcgatcgaccgaaggatctggataaagttctccgatattacctgacgagaacgcggcttgatattgaaatcctggaaaagaacgagctcattcctaggacaagcgagcaagcaagactgcttggtgttgactttttttctgtcttctccagaggatcgcagttcaaggtagagtccatcatgttcaggatagccaaacccgagaacttccttctcccttcgccaagcagaaagcaagtgggtgcacaaaacgctctggagtgtttacccttagtgatggaaccgcagagtgcattctacagcagtcctttgattgtccttgactttcagagtctgtatcccagtgtcatgatcgcctacaactactgctactcgaccttccttgggcgtatcgtcagctggcgaggtacaaacaaaatgggtttcatggactacaagaggcaagaggggcttcttagtctactcaaagattacatcaacatcgccccaaacggcatgatgtacacaaagcctcatattcgcaagtcacttcttgcaaagatgcttaccgagattctcgaaactcgtatcatggtcaagtccggtatgaagcaagacaaggatgatagggcgattcagcaactgctgaataaccggcagctggcgctgaagctcctcgccaacgtcacatacggttacacatcggcctcgttctcaggtcgtatgccctgctccgaaattgccgacagcatcgtccaaaccggtcgcgaaacccttgagcgggccatagccttcattcatagcgtccaaaaatgggacgccgaggttgtctacggcgacaccgacagtcttttcgtctctctcaagggccgcacccgcgaacaggcctttgagatcggccaagagatcgccgacgctgtcaccaagttgaatccgcggcccgtcaagctcaagtttgaaaaggtctaccacccatgcatactcctcgccaaaaagcgctacgtcggctacaagtacgagagtcgggaccagaccgtgcccgtgttcgacgccaagggcatcgagacggtccggcgcgacggcacacccgccgagcaacggatcgaggagaaggcgctcaaaatcctctttgagactgccgatctcagccaggtcaaaagttacttccaggagcagtgccacaagatcatgcgcggcgccgtgtccgtgcaggacttttgcttcgcgcgcgaggtcaagctgggcacgtacagcacgtccggtcgcggcggcccggctcccgctggcgcgctcattgccaccaaaaagatgaaggaggacgcgcgggcggagccgcaatatggcgaacgggtgccatatgtggtgatggccggcgcgccggggatgaggctggtagaccggtgcgtggaaccggaggagctgttgaacaacgcacatgctacgttggatgcggactactacattaacaagaacatcattccgccgctagagaggattttcaacttggtcggcgcgaacgtgaggacttggtatgaggagatgcccaaggttcaagtcttgcggaaggtggcggaggatgaagacgctgctgacgatgcttccaaaggcccactgctgggactgctaggggcgtcaccaagcaaaaagggtgcggcagcggcagaagcagctgcagcagctgcagaactagagatggaagatatgttgggagaagacggcgagctcctccctcctgacgtcgcagctgcccaagcccaagcgcgcaagaccctcgaagccttcctcaataccaccatctgcacagcctgcggcgtcaagatcaagcggccgctcggggtagggcttgcgcgcgagctgggcatgcttgaggagggcgagggcgccgtggaccgaggcctgccgctctgtcaccggtgcgcttcggatccacccacgcttatggtcgacatgcaggccaaggtcagcagagccgagaaaagctgcgtggagattatgaaggtgtgtcagagctgtgcgggctttgcgttatccgaggaggtgccctgcgatagcaaggattgccctgtcttttactcgagggtgaagcagaggacgaaggtaacgacggtaaagagggtgatggagccgctaatcaagttgtttggagagttggaattggataaggcgagtagtgaggatgagggtggcgacgaggagggtaattgggatctggaagggagaggtgaggtggttgacgaaagtggtgtagaaatgcaagaagacgcaagagtaaggtatgaggaggagaaagtgagattcgagaccattgtcaagggcaaggttagagccatgagtgaggagttggcggagaggaaagagattattgacaacagttataagagcctgaaggcggcatcgttggaatggtag

SEQ ID NO: 2702 - protein, 1926 aa, Neurospora crassa
MEFLRLRLNCIDHYQATPTRYDPQFDQDVRFSRSRKAAKVPVIRVFGSTDKGQKVCAHIHGAFPYLYVEYDGNLEPSKDHALAISYRKDPIRDRPKYVARISLTKGIPFYGFHVGYRFYLKIYLFNPVVMSRLVDLLQQGVIMSRKFQPYEAHLQYLLQFMADYNLYGCNYLDAAMATFRAPVPKHDSNIEGREAEHHWDDTTIPPELITDNYSLPRASHCSLEVDICVEDILNRKQVKERRLHHDFIEKEQPVSSQEKLVHSMAGLWTDETNRRKKRMGITDPEVNPFPPEVLVSMSADPRQSQVMGWVHEAEYRAGIQQLVAQEQNNTDGRQETFSSFVQPVPFEETIKTTLESVEDLYPDNLSQALQIEAQFFHMNAHHPISIDVDERSIIQLTREPYAKHTRHEYAGRISPEESLNGVGEGFGVGDSMIYPMDGRIRVYQPRASIRHKLLKIAQTYSSNIPANTGRQAGILGPGERQRRSLKHPRPPGEVDHGAPAKRQVLQAEYSRESLHIKADPPQRALRKAPRNAHEQTQSAGRPGPQRKLQSNPPERVYEEPNKRVHEEAQPNVHRKAQQRSREHDQKQGQQIIQEPTQDHDQGGCQKEVPADSAFTTPALTIQPMKPNNQDPTGEELLVNSLLVEPPKPKTSQPMKSAMKQSFTQEFQNRTINFPVVKDPQDPNTRARLSQKSGSQKNEGNVTRKQLAFDPQPTILGPSAQAKPGQTKPNLKSSSRPLDSAPVASAPALLWSGSKNMFVLNNKPPSLSEVRCTMQVHGLPDVIYKDAYYSKDEDVPSRPREYAGREYRLDGSSVPWLPDFDPTGTSSATYGEKPTSGADWPMLEAIYEAQQEECAMRGWEIADPPPSFKEVSNWWTDEQNDRNPKRCHSTPLRFKTYRSQIAGVTPKNRHGFEHPEKTKSESKQDQAQYMSAMSLEVHVNTRGKLVPDPEEDEVQCVFWYLRSEVNALCGTQAPDDTARGIIVFSEDSLLADRIRKHTSVPVVQETTELDMMVRMVEIVRNHDPDIFTGYEVHGSSWGYLIERARIKYELDLCDEFSRMKSQSNGRIGKDADRWGFNTTSSIRITGRHMINIWRAMRGELNLLQYTMENVVWHLLHRRIPHYSWKTLSDWYLSDRPKDLDKVLRYYLTRTRLDIEILEKNELIPRTSEQARLLGVDFFSVFSRGSQFKVESIMFRIAKPENFLLPSPSRKQVGAQNALECLPLVMEPQSAFYSSPLIVLDFQSLYPSVMIAYNYCYSTFLGRIVSWRGTNKMGFMDYKRQEGLLSLLKDYINIAPNGMMYTKPHIRKSLLAKMLTEILETRIMVKSGMKQDKDDRAIQQLLNNRQLALKLLANVTYGYTSASFSGRMPCSEIADSIVQTGRETLERAIAFIHSVQKWDAEVVYGDTDSLFVSLKGRTREQAFEIGQEIADAVTKLNPRPVKLKFEKVYHPCILLAKKRYVGYKYESRDQTVPVFDAKGIETVRRDGTPAEQRIEEKALKILFETADLSQVKSYFQEQCHKIMRGAVSVQDFCFAREVKLGTYSTSGRGGPAPAGALIATKKMKEDARAEPQYGERVPYVVMAGAPGMRLVDRCVEPEELLNNAHATLDADYYINKNIIPPLERIFNLVGANVRTWYEEMPKVQVLRKVAEDEDAADDASKGPLLGLLGASPSKKGAAAAEAAAAAAELEMEDMLGEDGELLPPDVAAAQAQARKTLEAFLNTTICTACGVKIKRPLGVGLARELGMLEEGEGAVDRGLPLCHRCASDPPTLMVDMQAKVSRAEKSCVEIMKVCQSCAGFALSEEVPCDSKDCPVFYSRVKQRTKVTTVKRVMEPLIKLFGELELDKASSEDEGGDEEGNWDLEGRGEVVDESGVEMQEDARVRYEEEKVRFETIVKGKVRAMSEELAERKEIIDNSYKSLKAASLEW

SEQ ID NO: 2703 - DNA, 5781 bp, Neurospora crassa
  CDS (1)..(5781)
atggaatttttaagacttcgattgaactgtattgatcactaccaagccacgccaaccagatatgatccccagtttgaccaagatgtgcgcttttcgcgttcgcggaaggccgccaaagtccctgtaattcgggtgttcggatcgaccgacaagggccagaaagtctgcgctcatattcatggtgcctttccctatctgtatgtcgagtatgacggaaatctagaacccaacaaggatcatgcgttagctatcagctaccggaaagatcccattcgcgatcggcccaaatatgtagcacggatttcgctgacaaaaggtatacccttttatggcttccatgtgggttatcgcttctatctcaaaatttacctgttcaacccggtggtcatgtcgcgtctcgtcgatctccttcagcaaggtgttattatgagtcggaaatttcaaccctacgaggcccatctgcagtatctccttcagttcatggctgattacaacctgtacggctgtaactacctggatgcggcgatggccacctttcgagcacctgtaccgaagcatgacagcaacattgaaggccgtgaggctgaacatcactgggacgatacaacgatcccgccagaactgattacggataattacagccttccccgggctagccactgctcccttgaagtggacatctgcgtcgaagacatcctgaatcgaaagcaagtcaaagagcgaaggcttcatcatgattttatcgaaaaggagcagccggtgtcaagccaagaaaagctggtgcacagcatggctggactctggacggatgagacaaaccgcaggaaaaagcgtatgggaataacggaccctgaagtcaacccttttcctccggaagtcttggtatcaatgtctgcggacccacgtcaatcacaggtgatggggtgggttcatgaagctgagtaccgtgctggtattcaacaattggttgctcaggaacagaacaacacagatggacgtcaggagactttctccagctttgtgcaaccagttccatttgaagaaactatcaagactactttagagtcagtggaagacttatacccagacaacttgagccaagctctgcaaatcgaagcacaatttttccacatgaatgcacaccatcccatcagtatcgatgtcgacgaacgaagcatttttcagctgacacgcgagccctatgcaaaacacactcgacacgaatacgcgggcagaatctcaccgggggagcctttgaatggtgttggagaaggatttggtgtaggggattcaatgatttatcctatggatgggcggatccgtgtataccaacccagagcttccatccgtcataaacttttgaagattgcccagacttactcttccaacataccagccaatacaggtagacaagccgggattcttggtcctggagagcgacaacgaagatctctcaagcatcccaggccgccgggagaagttgatcatggtgcacctgcaaaacgtcaggtgctccaagctgagtactcaagggagtcacttcacataaaagccgaccctccgcaaagagctttgagaaaggctccgagaaacgcccatgaacaaactcaaggtgcaggtcagccagggcctcagagaaagctccagagtaaccctccggaaagggtttacgaggagccaaacaagagggttcacgaggaggctcaaccaaaggtccatcgaaaggcccagcaaaggtctcgggaacatgaccagaaacagggccaacagataatacaggaacaaactcaagatcatgatcagggaggatgccagaaggaagttccagaagattcggcattcacgacgccagctctgacagtccagccaatgaaacccaataatcaagatccagcaggagaggaactatcggtgaatagtctgcgggtcgagccaccaaaacctaagacatctcagcccatgaagtctgctatgaagcagagcttcacacaagagttccaaaaccgtacgatcaactttcccgtcgtcaaagatccacaagatcctaacacaagggcgcgactgagccaaaagagtggttcgcagaaaaacgagggtaacgtcaccagaaagcaacttgccttcgaccctcaacccaccattttggggccatcggctcaggcgaaacccggtcagactaaacccaacctaaaatcgtcgtccaggccccttgactcggcccctgtggcttcggctccggcactcttgtggagtggctcaaagaaaatgtttgtcttgaacaagaaacctccatccctgagcgaagtccgctgtaccatgcaggtacatggcctacctgatgtcatctatcaagacgcatattacagtaaggatgaggatgttccctccagaccgagagaatatgcaggcagggaataccgacttgacggtagctctgttccttggctccccgatttcgacccgactggcacatcttcggcgacatatggcgagaaaccaacctccggtgccgactggccgatgctggaggcaatctatgaggctcaacaagaggaatgtgcgatgaggggctgggaaatagcagatcctcctccttctttcaaggaagtcagtaattggtggacagatgaacaaaacgatcgcaatccaaaacgatgccattccacacccctaaggattaaaacctaccgctcccaaattgcgggcgtgacgccaaagaacaagcatggcttcgaacatcccgaaaagacaaaatctgaaagcaaacaggatcaggcacagtacatgagcgccatgagcctagaggtacatgttaacacccggggcaagctagtaccggatcctgaagaagacgaagtgcagtgtgtgttttggtatctgcggtccgaagtaaacgctctccgcggaactcagacgccggatgatacggcacggggcattatcgttttctcagaggatagtctgcttgcagatagaatccgaaagcacacatccgtgccggtggttcaagagacaacagaacttgatatgatggtccggatggtcgagattgtgcggaaccatgatcccgatatcttcacgggatatgaggtacatggcagttcatggggctaccttattgagcgagcgagaataaagtatgagctcgacctctgtgatgagttctcacgcatgaagtctcagtcaaatgggcgtatcggtaaggatgcggatcgctggggcttcaacacgacatcctcgattcgaattacaggacggcacatgatcaacatttggagagccatgagaggcgaactcaatcttctacagtataccatggagaatgttgtttggcatctgctacaccgtcggattcctcattacagttggaagacattatcggattggtatctgagcgatcgaccgaaggatctggataaagttctccgatattacctgacgagaacgcggcttgatattgaaatcctggaaaagaacgagctcattcctaggacaagcgagcaagcaagactgcttggtgttgactttttttctgtcttctccagaggatcgcagttcaaggtagagtccatcatgttcaggatagccaaacccgagaacttccttctcccttctccaagcagaaagcaagtgggtgcacaaaacgctctggagtgtctacccttagtgatggaaccgcagagtgcattctacagcagtcctttgcttgttcttgactttcagagtctgtatcccagtgtcatgatcgcctacaactactgctactcgaccttccttgggcgtatcgtcagctggcgaggtagaaacaaaatgggtttcatggactacaagaggcaagaggggcttcttagtctactcaaagattacatcaacatcgccccaaacggcatgatgtacacaaagcctcatattcgcaagtcacttcttgcaaagatgcttaccgagattctcgaaactcgtatcatggtcaagtccggtatgaagcaagacatggatgatagggcgattcagcaactgctgaataaccggcagctggcgctgaagctcctcgccaacgtcacctacggttacacatcggcctcgttctcaggtcgtatgccctgctccgagattgccgacagcatcgtccaaaccggtcgcgaaacccttgagcgggccatagccttcattcatagcgtccaaaaatgggacgccgaagttgtctacggagacaccgacagtcttttcgtctctctcaagggtcgcacccgcgaacaggcctttgagatcggccaagagatcgccgacgctgtcaccaagttgaatccgcggcccgtcaagctcaagttcgaaaaggtctaccacccatgcgtactcctcgccaaaaagcgctacgtcggctacaagtacgagagtcgggaccagaacgtgcccgtgttcgacgccaagggcatcgagacggtccggcgcgacggcacacccgccgagcaacggatcgaggagcaggcgctcaaaatcctctttgagactgccgatctcagccaggtcaagagttacttccaggagcagtgccacaagattatgcgcggcgccgtgtccgtgcaggatttttgcttcgcgcgtgaggtcaagctgggcacgtacagcacgtccggtcgcggcggcccggctcccgctggcgcgctcattgccaccaaaaagatgaaggaggacgcgcgggcggagccgcaatatggcgaacgggtgccatatgtggtgatggccggcgcgccggggatgaggctggtagaccggtgcgtggaacccgaggagctgttgaataacgcacatgctacgttggatgcggactactacattaacaagaacatcattccgccactagagaggatcttcaacttggtcggcgcgaacgtgaggacttggtatgaggagatgcccaaggttcaagtcttgcggaaggtggcggaggatgaagacgctgctgacgatgcttccaaaggcccactgctgggactgctaggggcgtcaccaagcaaaaagggtacggcagcggcagaagcagctgcagcagctgcagaactagagatggaagatatgttgggagaagacggcgagctcctccctcctgacgtcgcagctgcccaagcccaagcgcgcaagaccctcgaagccttcctcaataccaccatctgcacagcctgcggcgtcaagatcaagcggccgctcggggtagggcttgcgcgcgagctgggcatgcttgaggagggcgagggcgccgtggaccgaggcctgccgctctgtcaccggtgcgcttcggatccacccacgcttatggtcgacatgcaggccaaggtcaacagagccgagaaaagctacgtggagattatgaaggtgtgtcagagctgtgcgggctttgcgttatccgaggaggtgccctgcgatagcaaggattgccctgtcttttactcgagggtgaagcagaggacgaaggtaacggcggtaaagagggtgatggagccgttgatcaagttgtttggagagttggaattggataaggcgagtagtgaggatgagggtggcgacgaggagggtaattgggatctggaagggagaggtgaggtggttgacgaaagtggtgtagaaatgcaagaagacgcaagagtaaggtatgaggaggagaaagtgagattcgagaccattgtcaagggcaaggttagagccatgagtgaggagttggtggagaggaaagagattattgacaacagttataagagcctgaaggcggcatcgttggaatggtag

SEQ ID NO: 2704 - protein, 1926 aa, Neurospora crassa
MEFLRLRLNCIDHYQATPTRYDPQFDQDVRFSRSRKAAKVPVIRVFGSTDKGQKVCAHIHGAFPYLYVEYDGNLEPNKDHALAISYRKDPIRDRPKYVARISLTKGIPFYGFHVGYRFYLKIYLFNPVVMSRLVDLLQQGVIMSRKFQPYEAHLQYLLQFMADYNLYGCNYLDAAMATFRAPVPKHDSNIEGREAEHHWDDTTIPPELITDNYSLPRASHCSLEVDICVEDILNRKQVKERRLHHDFIEKEQPVSSQEKLVHSMAGLWTDETNRRKKRMGITDPEVNPFPPEVLVSMSADPRQSQVMGWVHEAEYRAGIQQLVAQEQNNTDGRQETFSSFVQPVPFEETIKTTLESVEDLYPDNLSQALQIEAQFFHMNAHHPISIDVDERSIFQLTREPYAKHTRHEYAGRISPGEPLNGVGEGFGVGDSMIYPMDGRIRVYQPRASIRHKLLKIAQTYSSNIPANTGRQAGILGPGERQRRSLKHPRPPGEVDHGAPAKRQVLQAEYSRESLHIKADPPQRALRKAPRNAHEQTQGAGQPGPQRKLQSNPPERVYEEPNKRVHEEAQPKVHRKAQQRSREHDQKQGQQIIQEQTQDHDQGGCQKEVPEDSAFTTPALTVQPMKPNNQDPAGEELSVNSLRVEPPKPKTSQPMKSAMKQSFTQEFQNRTINFPVVKDPQDPNTRARLSQKSGSQKNEGNVTRKQLAFDPQPTILGPSAQAKPGQTKPNLKSSSRPLDSAPVASAPALLWSGSKKMFVLNKKPPSLSEVRCTMQVHGLPDVIYQDAYYSKDEDVPSRPREYAGREYRLDGSSVPWLPDFDPTGTSSATYGEKPTSGADWPMLEAIYEAQQEECAMRGWEIADPPPSFKEVSNWWTDEQNDRNPKRCHSTPLRIKTYRSQIAGVTPKNKHGFEHPEKTKSESKQDQAQYMSAMSLEVHVNTRGKLVPDPEEDEVQCVFWYLRSEVNALRGTQTPDDTARGIIVFSEDSLLADRIRKHTSVPVVQETTELDMMVRMVEIVRNHDPDIFTGYEVHGSSWGYLIERARIKYELDLCDEFSRMKSQSNGRIGKDADRWGFNTTSSIRITGRHMINIWRAMRGELNLLQYTMENVVWHLLHRRIPHYSWKTLSDWYLSDRPKDLDKVLRYYLTRTRLDIEILEKNELIPRTSEQARLLGVDFFSVFSRGSQFKVESIMFRIAKPENFLLPSPSRKQVGAQNALECLPLVMEPQSAFYSSPLLVLDFQSLYPSVMIAYNYCYSTFLGRIVSWRGRNKMGFMDYKRQEGLLSLLKDYINIAPNGMMYTKPHIRKSLLAKMLTEILETRIMVKSGMKQDMDDRAIQQLLNNRQLALKLLANVTYGYTSASFSGRMPCSEIADSIVQTGRETLERAIAFIHSVQKWDAEVVYGDTDSLFVSLKGRTREQAFEIGQEIADAVTKLNPRPVKLKFEKVYHPCVLLAKKRYVGYKYESRDQNVPVFDAKGIETVRRDGTPAEQRIEEQALKILFETADLSQVKSYFQEQCHKIMRGAVSVQDFCFAREVKLGTYSTSGRGGPAPAGALIATKKMKEDARAEPQYGERVPYVVMAGAPGMRLVDRCVEPEELLNNAHATLDADYYINKNIIPPLERIFNLVGANVRTWYEEMPKVQVLRKVAEDEDAADDASKGPLLGLLGASPSKKGTAAAEAAAAAAELEMEDMLGEDGELLPPDVAAAQAQARKTLEAFLNTTICTACGVKIKRPLGVGLARELGMLEEGEGAVDRGLPLCHRCASDPPTLMVDMQAKVNRAEKSYVEIMKVCQSCAGFALSEEVPCDSKDCPVFYSRVKQRTKVTAVKRVMEPLIKLFGELELDKASSEDEGGDEEGNWDLEGRGEVVDESGVEMQEDARVRYEEEKVRFETIVKGKVRAMSEELVERKEIIDNSYKSLKAASLEW

SEQ ID NO: 2705 - DNA, 5781 bp, Neurospora crassa
  CDS (1)..(5781)
atggaatttttaagacttcgattgaactgtattgatcactaccaagccacgccaaccagatatgatccccagtttgaccaagatgtgcgcttttcgcgttcgcggaaggccgccaaagtccctgtaattcgggtgttcggatcgaccgacaagggccagaaagtctgcgctcatattcatggtgcctttccctatctgtatgtcgagtatgacggaaatctagaacccaacaaggatcatgcgttagctatcagctaccggaaagatcccattcgcgatcggcccaaatatgtagcacggatttcgctgacaaaaggtatacccttttatggcttccatgtgggttatcgcttctatctcaaaatttacctgttcaacccggtggtcatgtcgcgtctcgtcgatctccttcagcaaggtgttattatgagtcggaaatttcaaccctacgaggcccatctgcagtatctccttcagttcatggctgattacaacctgtacggctgtaactacctggatgcggcgatggccacctttcgagcacctgtaccgaagcatgacagcaacattgaaggccgtgaggctgaacatcactgggacgatacaacgatcccgccagaactgattacggataattacagccttccccgggctagccactgctcccttgaagtggacatctgcgtcgaagacatcctgaatcgaaagcaagtcaaagagcgaaggcttcatcatgattttatcgaaaaggagcagccggtgtcaagccaagaaaagctggtgcacagcatggctggactctggacggatgagacaaaccgcaggaaaaagcgtatgggaataacggaccctgaagtcaacccttttcctccggaagtcttggtatcaatgtctgcggacccacgtcaatcacaggtgatggggtgggttcatgaagctgagtaccgtgctggtattcaacaattggttgctcaggaacagaacaacacagatggacgtcaggagactttctccagctttgtgcaaccagttccatttgaagaaactatcaagactactttagagtcagtggaagacttatacccagacaacttgagccaagctctgcaaatcgaagcacaatttttccacatgaatgcacaccatcccatcagtatcgatgtcgacgaacgaagcatttttcagctgacacgcgagccctatgcaaaacacactcgacacgaatacgcgggcagaatctcaccgggggagcctttgaatggtgttggagaaggatttggtgtaggggattcaatgatttatcctatggatgggcggatccgtgtataccaacccagagcttccatccgtcataaacttttgaagattgcccagacttactcttccaacataccagccaatacaggtagacaagccgggattcttggtcctggagagcgacaacgaagatctctcaagcatcccaggccgccgggagaagttgatcatggtgcacctgcaaaacgtcaggtgctccaagctgagtactcaagggagtcacttcacataaaagccgaccctccgcaaagagctttgagaaaggctccgagaaacgcccatgaacaaactcaaggtgcaggtcagccagggcctcagagaaagctccagagtaaccctccggaaagggtttacgaggagccaaacaagagggttcacgaggaggctcaaccaaaggtccatcgaaaggcccagcaaaggtctcgggaacatgaccagaaacagggccaacagataatacaggaacaaactcaagatcatgatcagggaggatgccagaaggaagttccagaagattcggcattcacgacgccagctctgacagtccagccaatgaaacccaataatcaagatccagcaggagaggaactatcggtgaatagtctgcgggtcgagccaccaaaacctaagacatctcagcccatgaagtctgctatgaagcagagcttcacacaagagttccaaaaccgtacgatcaactttcccgtcgtcaaagatccacaagatcctaacacaagggcgcgactgagccaaaagagtggttcgcagaaaaacgagggtaacgtcaccagaaagcaacttgccttcgaccctcaacccaccattttggggccatcggctcaggcgaaacccggtcagactaaacccaacctaaaatcgtcgtccaggccccttgactcggcccctgtggcttcggctccggcactcttgtggagtggctcaaagaaaatgtttgtcttgaacaagaaacctccatccctgagcgaagtccgctgtaccatgcaggtacatggcctacctgatgtcatctatcaagacgcatattacagtaaggatgaggatgttccctccagaccgagagaatatgcaggcagggaataccgacttgacggtagctctgttccttggctccccgatttcgacccgactggcacatcttcggcgacatatggcgagaaaccaacctccggtgccgactggccgatgctggaggcaatctatgaggctcaacaagaggaatgtgcgatgaggggctgggaaatagcagatcctcctccttctttcaaggaagtcagtaattggtggacagatgaacaaaacgatcgcaatccaaaacgatgccattccacacccctaaggattaaaacctaccgctcccaaattgcgggcgtgacgccaaagaacaagcatggcttcgaacatcccgaaaagacaaaatctgaaagcaaacaggatcaggcacagtacatgagcgccatgagcctagaggtacatgttaacacccggggcaagctagtaccggatcctgaagaagacgaagtgcagtgtgtgttttggtatctgcggtccgaagtaaacgctctccgcggaactcagacgccggatgatacggcacggggcattatcgttttctcagaggatagtctgcttgcagatagaatccgaaagcacacatccgtgccggtagttcaagagacaacagaacttgatatgatggtccggatggtcgagattgtgcggaaccatgatcccgatatcttcacgggatatgaggtacatggcagttcatggggctaccttattgagcgagcgagaataaagtatgagctcgacctctgtgatgagttctcacgcatgaagtctcagtcaaatgggcgtatcggtaaggatgcggatcgctggggcttcaacacgacatcctcgattcgaattacaggacggcacatgatcaacatttggagagccatgagaggcgaactcaatcttctacagtataccatggagaatgttgtttggcatctgctacaccgtcggattcctcattacagttggaagacattatcggattggtatctgagcgatcgaccgaaggatctggataaagttctccgatattacctgacgagaacgcggcttgatattgaaatcctggaaaagaacgagctcattcctaggacaagcgagcaagcaagactgcttggtgttgactttttttctgtcttctccagaggatcgcagttcaaggtagagtccatcatgttcaggatagccaaacccgagaacttccttctcccttctccaagcagaaagcaagtgggtgcacaaaacgctctggagtgtctacccttagtgatggaaccgcagagtgcattctacagcagtcctttgcttgttcttgactttcagagtctgtatcccagtgtcatgatcgcctacaactactgctactcgaccttccttgggcgtatcgtcagctggcgaggtagaaacaaaatgggtttcatggactacaagaggcaagaggggcttcttagtctactcaaagattacatcaacatcgccccaaacggcatgatgtacacaaagcctcatattcgcaagtcacttcttgcaaagatgcttaccgagattctcgaaactcgtatcatggtcaagtccggtatgaagcaagacaaggatgatagggcgattcagcaactgctgaataaccggcagctggcgctgaagctcctcgccaacgtcacctacggttacacatcggcctcgttctcaggtcgtatgccctgctccgagattgccgacagcatcgtccaaaccggtcgcgaaacccttgagcgggccatagccttcattcatagcgtccaaaaatgggacgccgatgttgtctacggagacaccgacagtcttttcgtctctctcaagggccgcacccgcgaacaggcctttgagatcggccaagagatcgccgacgctgtcaccaagttgaatccgcggcccgtcaagctcaagttcgaaaaggtctaccacccatgcgtactcctcgccaaaaagcgctacgtcggctacaagtacgagagtcgggaccagaccgtgcccgtgttcgacgccaagggcatcgagacggtccggcgcgacggcacacccgccgagcaacggatcgaggagaaggcgctcaaaatcctctttgagactgccgatctcagccaggtcaagagttacttccaggagcagtgccacaagattatgcgcggcgccgtgtccgtgcaggatttttgcttcgcgcgtgaggtcaagctgggcacgtacagcacgtccggtcgcggcggcccggctcccgctggcgcgctcattgccaccaaaaagatgaaggaggacgcgcgggcggagccgcaatatggcgaacgggtgccatatgtggtgatggctggcgcgccggggatgaggctggtagaccggtgcgtggaaccggaggagctgttgaataacgcacatgctacgttggatgcggactactacattaacaagaacatcattccgccgctagagaggatcttcaacttggtcggcgcgaacgtgaggacttggtatgaggagatgcccaaggttcaagttttgcggaaggtggcggaggatgaagacgctgctgacgatgcttccaaaggcccactgctgggactgctaggggcgtcaccaagcaaaaagggtacggcagcggcagaagcagctgcagcagctgcagaactagagatggaagatatgttgggagaagacggcgagctcctccctcctgacgtcgcagctgcccaagcccaagcgcgcaagaccctcgaagccttcctcaataccaccatctgcacagcctgcggcgtcaagatcaagcggccgctcggggtagggcttgcgcgcgagctgggcatgcttgaggagggcgagggcgccgtggaccgaggcctgccgctctgtcaccggtgcgcttcggatccacccacgcttatggtcgacatgcaggccaaggtcaacagagccgagaaaagctacgtggagattatgaaggtgtgtcagagctgtgcgggctttgcgttatccgaggaggtgccctgcgatagcaaggattgccctgtcttttactcgagggtgaagcagaggacgaaggtaacggcggtaaagagggtgatggagccgttgatcaagttgtttggagagttggaattggataaggcgagtagtgaggatgagggtggcgacgaggagggtaattgggatctggaagggagaggtgaggtggttgacgaaagtggtgtagaaatgcaagaagacgcaagagtaaggtatgaggaggagaaagtgagattcgagaccattgtcaagggcaaggttagagccatgagtgaggagttggtggagaggaaagagattattgacaacagttataagagcctgaaggcggcatcgttggaatggtag

SEQ ID NO: 2706 - protein, 1926 aa, Neurospora crassa
MEFLRLRLNCIDHYQATPTRYDPQFDQDVRFSRSRKAAKVPVIRVFGSTDKGQKVCAHIHGAFPYLYVEYDGNLEPNKDHALAISYRKDPIRDRPKYVARISLTKGIPFYGFHVGYRFYLKIYLFNPVVMSRLVDLLQQGVIMSRKFQPYEAHLQYLLQFMADYNLYGCNYLDAAMATFRAPVPKHDSNIEGREAEHHWDDTTIPPELITDNYSLPRASHCSLEVDICVEDILNRKQVKERRLHHDFIEKEQPVSSQEKLVHSMAGLWTDETNRRKKRMGITDPEVNPFPPEVLVSMSADPRQSQVMGWVHEAEYRAGIQQLVAQEQNNTDGRQETFSSFVQPVPFEETIKTTLESVEDLYPDNLSQALQIEAQFFHMNAHHPISIDVDERSIFQLTREPYAKHTRHEYAGRISPGEPLNGVGEGFGVGDSMIYPMDGRIRVYQPRASIRHKLLKIAQTYSSNIPANTGRQAGILGPGERQRRSLKHPRPPGEVDHGAPAKRQVLQAEYSRESLHIKADPPQRALRKAPRNAHEQTQGAGQPGPQRKLQSNPPERVYEEPNKRVHEEAQPKVHRKAQQRSREHDQKQGQQIIQEQTQDHDQGGCQKEVPEDSAFTTPALTVQPMKPNNQDPAGEELSVNSLRVEPPKPKTSQPMKSAMKQSFTQEFQNRTINFPVVKDPQDPNTRARLSQKSGSQKNEGNVTRKQLAFDPQPTILGPSAQAKPGQTKPNLKSSSRPLDSAPVASAPALLWSGSKKMFVLNKKPPSLSEVRCTMQVHGLPDVIYQDAYYSKDEDVPSRPREYAGREYRLDGSSVPWLPDFDPTGTSSATYGEKPTSGADWPMLEAIYEAQQEECAMRGWEIADPPPSFKEVSNWWTDEQNDRNPKRCHSTPLRIKTYRSQIAGVTPKNKHGFEHPEKTKSESKQDQAQYMSAMSLEVHVNTRGKLVPDPEEDEVQCVFWYLRSEVNALRGTQTPDDTARGIIVFSEDSLLADRIRKHTSVPVVQETTELDMMVRMVEIVRNHDPDIFTGYEVHGSSWGYLIERARIKYELDLCDEFSRMKSQSNGRIGKDADRWGFNTTSSIRITGRHMINIWRAMRGELNLLQYTMENVVWHLLHRRIPHYSWKTLSDWYLSDRPKDLDKVLRYYLTRTRLDIEILEKNELIPRTSEQARLLGVDFFSVFSRGSQFKVESIMFRIAKPENFLLPSPSRKQVGAQNALECLPLVMEPQSAFYSSPLLVLDFQSLYPSVMIAYNYCYSTFLGRIVSWRGRNKMGFMDYKRQEGLLSLLKDYINIAPNGMMYTKPHIRKSLLAKMLTEILETRIMVKSGMKQDKDDRAIQQLLNNRQLALKLLANVTYGYTSASFSGRMPCSEIADSIVQTGRETLERAIAFIHSVQKWDADVVYGDTDSLFVSLKGRTREQAFEIGQEIADAVTKLNPRPVKLKFEKVYHPCVLLAKKRYVGYKYESRDQTVPVFDAKGIETVRRDGTPAEQRIEEKALKILFETADLSQVKSYFQEQCHKIMRGAVSVQDFCFAREVKLGTYSTSGRGGPAPAGALIATKKMKEDARAEPQYGERVPYVVMAGAPGMRLVDRCVEPEELLNNAHATLDADYYINKNIIPPLERIFNLVGANVRTWYEEMPKVQVLRKVAEDEDAADDASKGPLLGLLGASPSKKGTAAAEAAAAAAELEMEDMLGEDGELLPPDVAAAQAQARKTLEAFLNTTICTACGVKIKRPLGVGLARELGMLEEGEGAVDRGLPLCHRCASDPPTLMVDMQAKVNRAEKSYVEIMKVCQSCAGFALSEEVPCDSKDCPVFYSRVKQRTKVTAVKRVMEPLIKLFGELELDKASSEDEGGDEEGNWDLEGRGEVVDESGVEMQEDARVRYEEEKVRFETIVKGKVRAMSEELVERKEIIDNSYKSLKAASLEW

SEQ ID NO: 2707 - DNA, 5781 bp, Neurospora crassa
  CDS (1)..(5781)
atggaatttttaagacttcgattgaactgtattgatcactaccaagccacgccaaccagatatgatccccagtttgaccaagatgtgcgcttttcgcgttcgcggaaggccgccaaagtccctgtaattcgggtgttcggatcgaccgacaagggccagaaagtctgcgctcatattcatggtgcctttccctatctgtatgtcgagtatgacggaaatctagaacccaacaaggatcatgcgttagctatcagctaccggaaagatcccattcgcgatcggcccaaatatgtaacacggatttcgctgacaaaaggtatacccttttatggcttccatgtgggttatcgcttctatctcaagatttacctgttcaacccggtggtcatgtcgcgtctcgtcgatctccttcagcaaggtgttattatgagtcggaaatttcaaccatacgaggcccatctgcagtatctccttcagttcatggctgattacaacctgtacggctgtaactacctggatgcggcgatggccacctttcgagcacctgtaccgaagcatgacagcaacattgaaggccgtgaggctgaacatcactgggacgatacaacgatcccgtcagagctgattacggataattacagccttccccgggctagccactgctcccttgaagtggacatctgcgtcgaagacatcctgaatcgaaagcaagtcaaagagcgaaggcttcatcatgattttatcgaaaaggagcagccggtgtcaagccaagaaaagctggtgcacagcatggctggactctggacggatgagacaaaccgcaggaaaaagcgtatgggaataacggaccctgaagtcaacccttttcctccggaagtcttggtatcaatgtctgcggacccacgtcaatcacaggtgatggggtgggttcatgaagctgagtaccgtgctggtattcaacaattggttgctcaggaacagaacaacacagatggacgtcaggagactttctccagctttgtgcaaccagttccatttgaagagactatcaagactactttagagtcagtggaagacttatacccagacaacttgagccaagctctgcaaatcgaagcacaatttttccacatgaatgcacaccatcccatcagtatcgatgtcgacgaacgaagcatttttcagctgacacgcgagccgtatgcaaaacacactcgacacgaatacgcgggcagaatctcaccggaggagcctttgaatggtgttggagaaggatttggtgtgggggattcaatgatttatcctatggatgggcggatccgtgtataccaacccagagcttccatccgtcataaacttttgaagattgcccagacttactcttccaacataccagccaatacaggtagacaagccgggattcttggtcctggagagcgacaacgaagatctctcaagcatcccaggccgccgggagaagttgatcatggtgcacctgcaaaacgtcaggtgctccaagctgagtactcaagggagtcacttcacataaaagccgaccctccgcaaagagctttgagaaaggctccgagaaacgcacatgaacaaactcaaggtgcaggtcagccagggcctcagagaaagctccagagtaaccctccggaaagggtttacgaggaaccaaacaagagggttcacgaagaggctcaaccaaaggtccatcgaaaggcccagcaaaggtctcgggaacatgaccagaaacagggccaacagatgatacaggaacaaactcaagatcatgatcacggaggatgccagaaagaagttccagaagattcggcattcacgacgccagctctgacagtccagccaatgaaacccaataatcaagatccagcaggagaggaactatcggtgaatagtctgcgggtcgagccaccaaaacctaagacatctcagcccatgaagtctgctatgaagcagagcttcacacaagagttccaaaaccgtacgatcaactttcccgtcgtcaaagatccacaagatcctaacacaagggcgcgactgagccaaaagagtggttcgcagaaaaacgagggtaacgtcaccagaaagcaacttgccttcgaccctcaacccaccattttggggccatcggctcaggcgaaacccggtcagacaaaacccaacctaaaatcatcgtccaggccccttgactcggcccctgtggctttggctccagcactcttgtggagtggctcaaagaaaatgtttgtcttgaacaacaaacctccatccctgagcgaagtccgctgtaccatgcaggtacatggcctacctgatgtcatctatcaagacgcatattacagtaaggatgaggatgttccctccagaccgagagaatatgcaggcagggaataccgacttgacggtagctctgttccttggctccccgatttcgacccgactggcacatcttcggcgacatatggcgagaaaccaacctccggtgccgactggccgatgctggaggtaatctatgaggctcaacaagaggaatgtgcgatgaggggttgggaaatagcagatcctcctccttctttcaaggaagtcagtaattggtggacagatgaacaaaatgatcgcaatccaaaacgatgccattccacacccctaaggattaaaacctaccgctcccaaattgcgggcgtgacgccaaagatcaagcatggcttcgaacatcccgaaaagacaaaatctgaaagcaaacaggatcaggcacagtacatgagcgccatgagcctagaggtacatgttaacacccggggcaagctagtaccggatcctgaagaagacgaagtgcagtgtgtgttttggtatctgcggtccgaagtaaacgctctccgcggaactcagacgccggatgatacggcacggggcattatcgttttctcagaggatagtctgcttgcagatagaatccgaaagcacacatccgtgccggtggttcaagagacaacagaacttgatatgatggtccggatggtcgagattgtgcggaaccatgatcccgatatcttcacgggatatgaggtacatggcagttcatggggctaccttattgagcgagcgagaataaagtatgagctcgacctctgtgatgagttctcacgcatgaagtctcagtcaaatgggcgtatcggtaaggatgcggatcgctggggcttcaacacgacatcctcgattcgaattacaggacggcacatgatcaacatttggagagccatgagaggcgaactcaatcttctacagtataccatggagaatgttgtttggcatctgctacaccgtcggattcctcattacagttggaagacattatcggattggtatctgagcgatcgaccgaaggatctggataaagttctccgatattacctgacgagaacgcggcttgatattgaaatcctggaaaagaacgagctcattcctaggacaagcgagcaagcaagactgcttggtgttgactttttttctgtcttctccagaggatcgcagttcaaggtagagtccatcatgttcaggatagccaaacccgagaacttccttctcccttctccaagcagaaagcaagtgggtgcacaaaacgctctggagtgtctacccttagtgatggaaccgcagagtgcattctacagcagtcctttgcttgttcttgactttcagagtctgtatcccagtgtcatgatcgcctacaactactgctactcgaccttccttgggcgtatcgtcagctggcgaggtagaaacaaaatgggtttcatggactacaagaggcaagaggggcttcttagtctactcaaagattacataaacatcgccccaaacggcatgatgtacacaaagcctcatattcgcaagtcacttcttgcaaagatgcttaccgagattctcgaaactcgtatcatggtcaagtccggtatgaagcaagacatggatgatagggcgattcagcaactgctgaataaccggcagctggcgctgaagctcctcgccaacgtcacctacggttacacatcggcctcgttctcaggtcgtatgccctgctccgagattgccgacagcatcgtccaaaccggtcgcgaaacccttgagcgggccatagccttcattcatagcgtccaaaaatgggacgccgaagttgtctacggagacaccgacagtcttttcgtctctctcaagggtcgcacccgcgaacaggcctttgagatcggccaagagatcgccgacgctgtcaccaagttgaatccgcggcccgtcaagctcaagttcgaaaaggtctaccacccatgcgtactcctcgccaaaaagcgctacgtcggctacaagtacgagagtcgggaccagaccgtgcccgtgttcgacgccaagggcatcgagacggtccggcgcgacggcacacccgccgagcaacggatcgaggagaaggcgctcaaaatcctctttgagactgccgatctcagccaggtcaagagttacttccaggagcagtgccacaagattatgcgcggcgccgtgtccgtgcaggatttttgcttcgcgcgtgaggtcaagctgggcacgtacagcacgtctggtcgcggcggcccggctcccgctggcgcgctcattgccaccaaaaagatgaaggaggacgcgcgggcggagccgcaatatggcgaacgggtgacatatgtggtgatggccggcgcgccggggatgaggctggtagaccggtgcgtggaacccgaggagctgttgaataacgcacatgctacgttggatgcggactactacattaacaagaacatcattccgccgctagagaggatcttcaacttggtcggcgcgaacgtgaggacttggtatgaggagatgcccaaggttcaagtcttgcggaaggtggcggaggatgaagacgctgatgacgatgcttccaaaggcccactgctgggactgctaggggcgtcaccaagcaaaaagggtacggcagcggcagaagcagctgcagcagctgcagaactagagatggaagatatgttgggagaagacggcgagctcctccctcctgacgtcgcagctgcccaagcccaagcgcgcaagaccctcgaagccttcctcaataccaccatctgcacagcctgcggcgtcaagatcaagcggccgctcggggtagggcttgcgcgcgagctgggcatgcttgaggagggcgagggcgccgtggaccgaggcctgccgctctgtcaccggtgcgcttcggatccacccacgcttatggtcgacatgcaggccaaggtcaacagagccgagaaaagctacgtggagattatgaaggtgtgtcagagctgtgcgggctttgcgttatccgaggaggtgccctgcgatagcaaggattgccctgtcttttactcgagggtgaagcagaggacgaaggtaacggcggtaaagagggtgatggagccgttgatcaagttgtttggagagttggaattggataaggcgagtagtgaggatgagggtggcgacgaggagggtatttgggatctggaagggagaggtgaggtggttgacgaaagtggtgtagaaatgcaagaagacgcaagagtaaggtatgaggaggagaaagtgagattcgagaccattgtcaagggcaaggttagagccatgagtgaggagttggtggagaggaaagagattattgacaacagttataagagcctgaaggcggcatcgttggaatggtag

SEQ ID NO: 2708 - protein, 1926 aa, Neurospora crassa
MEFLRLRLNCIDHYQATPTRYDPQFDQDVRFSRSRKAAKVPVIRVFGSTDKGQKVCAHIHGAFPYLYVEYDGNLEPNKDHALAISYRKDPIRDRPKYVTRISLTKGIPFYGFHVGYRFYLKIYLFNPVVMSRLVDLLQQGVIMSRKFQPYEAHLQYLLQFMADYNLYGCNYLDAAMATFRAPVPKHDSNIEGREAEHHWDDTTIPSELITDNYSLPRASHCSLEVDICVEDILNRKQVKERRLHHDFIEKEQPVSSQEKLVHSMAGLWTDETNRRKKRMGITDPEVNPFPPEVLVSMSADPRQSQVMGWVHEAEYRAGIQQLVAQEQNNTDGRQETFSSFVQPVPFEETIKTTLESVEDLYPDNLSQALQIEAQFFHMNAHHPISIDVDERSIFQLTREPYAKHTRHEYAGRISPEEPLNGVGEGFGVGDSMIYPMDGRIRVYQPRASIRHKLLKIAQTYSSNIPANTGRQAGILGPGERQRRSLKHPRPPGEVDHGAPAKRQVLQAEYSRESLHIKADPPQRALRKAPRNAHEQTQGAGQPGPQRKLQSNPPERVYEEPNKRVHEEAQPKVHRKAQQRSREHDQKQGQQMIQEQTQDHDHGGCQKEVPEDSAFTTPALTVQPMKPNNQDPAGEELSVNSLRVEPPKPKTSQPMKSAMKQSFTQEFQNRTINFPVVKDPQDPNTRARLSQKSGSQKNEGNVTRKQLAFDPQPTILGPSAQAKPGQTKPNLKSSSRPLDSAPVALAPALLWSGSKKMFVLNNKPPSLSEVRCTMQVHGLPDVIYQDAYYSKDEDVPSRPREYAGREYRLDGSSVPWLPDFDPTGTSSATYGEKPTSGADWPMLEVIYEAQQEECAMRGWEIADPPPSFKEVSNWWTDEQNDRNPKRCHSTPLRIKTYRSQIAGVTPKIKHGFEHPEKTKSESKQDQAQYMSAMSLEVHVNTRGKLVPDPEEDEVQCVFWYLRSEVNALRGTQTPDDTARGIIVFSEDSLLADRIRKHTSVPVVQETTELDMMVRMVEIVRNHDPDIFTGYEVHGSSWGYLIERARIKYELDLCDEFSRMKSQSNGRIGKDADRWGFNTTSSIRITGRHMINIWRAMRGELNLLQYTMENVVWHLLHRRIPHYSWKTLSDWYLSDRPKDLDKVLRYYLTRTRLDIEILEKNELIPRTSEQARLLGVDFFSVFSRGSQFKVESIMFRIAKPENFLLPSPSRKQVGAQNALECLPLVMEPQSAFYSSPLLVLDFQSLYPSVMIAYNYCYSTFLGRIVSWRGRNKMGFMDYKRQEGLLSLLKDYINIAPNGMMYTKPHIRKSLLAKMLTEILETRIMVKSGMKQDMDDRAIQQLLNNRQLALKLLANVTYGYTSASFSGRMPCSEIADSIVQTGRETLERAIAFIHSVQKWDAEVVYGDTDSLFVSLKGRTREQAFEIGQEIADAVTKLNPRPVKLKFEKVYHPCVLLAKKRYVGYKYESRDQTVPVFDAKGIETVRRDGTPAEQRIEEKALKILFETADLSQVKSYFQEQCHKIMRGAVSVQDFCFAREVKLGTYSTSGRGGPAPAGALIATKKMKEDARAEPQYGERVTYVVMAGAPGMRLVDRCVEPEELLNNAHATLDADYYINKNIIPPLERIFNLVGANVRTWYEEMPKVQVLRKVAEDEDADDDASKGPLLGLLGASPSKKGTAAAEAAAAAAELEMEDMLGEDGELLPPDVAAAQAQARKTLEAFLNTTICTACGVKIKRPLGVGLARELGMLEEGEGAVDRGLPLCHRCASDPPTLMVDMQAKVNRAEKSYVEIMKVCQSCAGFALSEEVPCDSKDCPVFYSRVKQRTKVTAVKRVMEPLIKLFGELELDKASSEDEGGDEEGIWDLEGRGEVVDESGVEMQEDARVRYEEEKVRFETIVKGKVRAMSEELVERKEIIDNSYKSLKAASLEW

SEQ ID NO: 2709 - DNA, 5781 bp, Neurospora crassa
  CDS (1)..(5781)
atggaatttttaagacttcgattgaactgtattgatcactaccaagccacgccaaccagatatgatccccagtttgaccaagatgtgcgcttttcgcgttcgcggaaggccgccaaagtccctgtaattcgggtgttcggatcgaccgacaagggccagaaagtctgcgctcatattcatggtgcctttccctatctgtatgtcgagtatgacggaaatctagaacccaacaaggatcatgcgttagctatcagctaccggaaagatcccattcgcgatcggcccaaatatgtagcacggatttcgctgacaaaaggtatacccttttatggcttccatgtgggttatcgcttctatctcaagatttacctgttcaacccggtggtcatgtcgcgtctcgtcgatctccttcagcaaggtgttattatgagtcggatatttcaaccctacgaggcccatctgcagtatctccttcagttcatggctgattacaacctgtacggctgtaactacctggatgcggcgatggccacctttcgagcacctgtaccgaagcatgacagcaacattgaaggccgtgagtctgaacattactgggacgatacaacgatcccgccagagctgattacggataattacagccttccccgggctagccactgctcccttgaagtggacatctgcgtcgaagacatcctgaatcgaaagcaagtcaaagagcgaaggcttcatcatgattttatcgaaaaggagcagccggtgtcaagccaagaaaagctggtgcacagcatggctggactctggacggatgagacaaaccgcaggaaaaagcgtatgggaataacggaccctgaagtcaacccttttcctccggaagtcttggtatcaatgtctgcggacccacgtcaatcacaggtgatggggtgggttcatgaagctgagtaccgtgctggtattcaacaattggttgctcaggaacagaacaacacagatggacgtcaggagactttctccagctttgtgcaaccagttccatttgaagaaactatcaagactacttcagagtcagtggaagacttatacccagacaacttgagccaagctctgcaaatcgaagcacaattttttcacatgaatgcacaccatcccatctttatcgatgtcgacgaacgaagcatttttcagctgacacgcgagccgtatgcaaaacacactcgacacgaatacgcgggcagaatctcaccggaggagcctttgaatggtgttggagaaggatttggtgtgggggattcaatgatttatgctatggatgggcggatccgtgtataccaacccagagcttccctccgtcataaacttttgaagattgcccagacttactcttccaacataccagccaatacaggtagacaagccgggattcttggtcctggagagcgacaacgaagatctctcaagcatcccaggccgccgggagaagttgatcatggtgcacctgcaaaacgtcaggtgctccaagctgagtactcaagggagtcacttcacataaaagccgaccctccgcaaagagctttgagaaaggctccgagaaacgcacatgaacaaactcaaggtgcaggtcagccagggcctcagagaaagctccagagtaaccctccggaaagggtttacgaggaaccaaacaagagggttcacgaggaggctcaaccaaaggtccatcgaaaggcccagcaaaggtctctggaacatgaccagaaacagggccaacaggtaatacaggaacaaactcaagatcatgatcacggaggatgccagaaggaagtttcagaagattcggcattcacgacgccagctctgacagtccagccaattaaacccaataatcaagatccagcagtagaggaactatcggtgaatagtctgcgggtcgagccaccaaaacctaagacatctcagcccatgaagtctgctatgaagcagagcttcacacaagagttccaaaaccgtacgatcaactttcccgtcgtcaaagatccacaagatcctaacacaagggcgcgactgagccaaaagagtggttcgcagaaaaacgagggtaacgtcaccagaaagcaacttgccttcgaccctcaacccaccattttggggccatcggctcaggcgaaacccggtcagactaaacccaacctaaaatcgtcgtccaggccccttgactcggcccctgtggctttggctccggcactcttgtggagtggctcaaagaaaatgtttgtcttgaacaataaacctccatccctgagcgaagtccgctgtaccatgcaggtacatggcctacctgatgtcatctatcaagacgcatattacagtaaggatgaggatgttccctccagaccgagagaatatgcaggcagggaataccgacttgacggtagctctgttccttggctccccgatttcgacccgactggcacatcttcggcgacatatggcgagaaaccaacctccggtgccgactggccgatgctggaggtaatctatgaggctcaacaagaggaatgtgcgatgaggggttgggaaatagcagatcctcctccttctttcaaggaagtcagtaattggtggacagatgaacaaaatgatcgcaatccaaaacgatgccattccacacccctaaggattaaaacctaccgctcccaaattgcgggcgtgacgccaaagatcaagcatggcttcgaacatcccgaaaagacaaaatctgaaagcaaacaggatcaggcacagtacatgagcgccatgagcctagaggtacatgttaacacccggggcaagctagtaccggatcctgaagaagacgaagtgcagtgtgtgttttggtatctgcggtccgaagtaaacgctctccgcggaactcagacgccggatgatacggcacggggcattatcgttttctcagaggatagtctgcttgcagatagaatccgaaagcacacatccgtgccggtggttcaagagacaacagaacttgatatgatggtccggatggtcgagattgtgcggaaccatgatcccgatatcttcacgggatatgaggtacatggcagttcatggggctaccttattgagcgagcgagaataaagtatgagctcgacctctgtgatgagttctcacgcatgaagtctcagtcaaatgggcgtatcggtaaggatgcggatcgctggggcttcaacacgacatcctcgattcgaattacaggacggcacatgatcaacatttggagagccatgagaggcgaactcaatcttctacagtataccatggagaatgttgtttggcatctgctacaccgtcggattcctcattacagttggaagacattatcggattggtatctgagcgatcgaccgaaggatctggataaagttctccgatattacctgacgagaacgcggcttgatattgaaatcctggaaaagaacgagctcattcctaggacaagcgagcaagcaagactgcttggtgttgactttttttctgtcttctccagaggatcgcagttcaaggtagagtccatcatgttcaggatagccaaacccgagaacttccttctcccttctccaagcagaaagcacgtgggtgcacaaaacgctctggagtgtctacccttagtgatggaaccgcagagtgcattctacagcagtcctttgcttgttcttgactttcagagtctgtatcccagtgtcatgatcgcctacaactactgctactcgaccttccttgggcgtatcgtcagctggcgaggtagaaacaaaatgggtttcatggactacaagaggcaagaggggcttcttagtctactcaaagattacatcaacatcgccccaaacggcatgatgtacacaaagcctcatattcgcaagtcacttcttgcaaagatgtctaccgagattctcgaaactcgtatcatggtcaagtccggtatgaagcaagacaaggatgatagggcgattcagcaactgctgaataaccggcagctggcgctgaagctcctcgccaacgtcacctacggttacacatcggcctcgttctcaggtcgtatgccctgctccgagattgccgacagcatcgtccaaaccggtcgcgaaacccttgagcgggccatagccttcattcatagcgtccaaaaatgggacgccgatgttgtctacggagacaccgacagtcttttcgtctctctcaagggccgcacccgcgaacaggcctttgagatcggccaagagatcgccgacgctgtcaccaagttgaatccgcggcccgtcaagctcaagttcgaaaaggtctaccacccatgcgtactcctcgccaaaaagcgctacgtcggctacaagtacgagagtcgggaccagaccgtgcccgtgttcgacgccaagggcatcgagacggtccggcgcgacggcacacccgccgagcaacggatcgaggagaaggcgctcaaaatcctctttgagactgccgatctcagccaggtcaagagttacttccaggagcagtgccacaagattatgcgcggcgccgtgtccgtgcaggatttttgcttcgcgcgtgaggtcaagctgggcacgtacagcacgtccggtcgcggcggcccggctcccgctggcgcgctcattgccaccaaaaagatgaaggaggacgcgcgggcggagccgcaatatggcgaacgggtgccatatgtggtgatggccggcgcgccggggatgaggctggtagaccggtgcgtggaacccgaggagctgttgaataacgcacatgctacgttggatgcggactactacattaacaagaacatcattccgccactagagaggatcttcaacttggtcggcgcgaacgtgaggacttggtatgaggagatgcccaaggttcaagtcttgcggaaggtggcggaggatgaagacgctgctgacgatgcttccaaaggcccactgctgggactgctaggggcgtcaccaagcaaaaagggtacggcagcggcagaagcagctgcagcagctgcagaactagagatggaagatatgttgggagaagacggcgagctcctccctcctgacgtcgcagctgcccaagcccaagcgcgcaagaccctcgaagccttcctcaataccaccatctgcacagcctgcggcgtcaagatcaagcggccgctcggggtagggcttgcgcgcgagctgggcatgcttgaggagggcgagggcgccgtggaccgaggcctgccgctctgtcaccggtgcgcttcggatccacccacgcttatggtcgacatgcaggccaaggtcaacagagccgagaaaagctacgtggagattatgaaggtgtgtcagagctgtgcgggctttgcgttatccgaggaggtgccctgcgatagcaaggattgccctgtcttttactcgagggtgaagcagaggacgaaggtaacggcggtaaagagggtgatggagccgttgatcaagttgtttggagagttggaattggataaggcgagtagtgaggatgagggtggcgacgaggagggtaattgggatctggaagggagaggtgaggtggttgacgaaagtggtgtagaaatgcaagaagacgcaagagtaaggtatgaggaggagaaagtgagattcgagaccattgtcaagggcaaggttagagccatgagtgaggagttggcggagaggaaagagattattgacaacagttataagaccctgaaggcggcatcgttggaatggtaa

SEQ ID NO: 2710 - protein, 1926 aa, Neurospora crassa
MEFLRLRLNCIDHYQATPTRYDPQFDQDVRFSRSRKAAKVPVIRVFGSTDKGQKVCAHIHGAFPYLYVEYDGNLEPNKDHALAISYRKDPIRDRPKYVARISLTKGIPFYGFHVGYRFYLKIYLFNPVVMSRLVDLLQQGVIMSRIFQPYEAHLQYLLQFMADYNLYGCNYLDAAMATFRAPVPKHDSNIEGRESEHYWDDTTIPPELITDNYSLPRASHCSLEVDICVEDILNRKQVKERRLHHDFIEKEQPVSSQEKLVHSMAGLWTDETNRRKKRMGITDPEVNPFPPEVLVSMSADPRQSQVMGWVHEAEYRAGIQQLVAQEQNNTDGRQETFSSFVQPVPFEETIKTTSESVEDLYPDNLSQALQIEAQFFHMNAHHPIFIDVDERSIFQLTREPYAKHTRHEYAGRISPEEPLNGVGEGFGVGDSMIYAMDGRIRVYQPRASLRHKLLKIAQTYSSNIPANTGRQAGILGPGERQRRSLKHPRPPGEVDHGAPAKRQVLQAEYSRESLHIKADPPQRALRKAPRNAHEQTQGAGQPGPQRKLQSNPPERVYEEPNKRVHEEAQPKVHRKAQQRSLEHDQKQGQQVIQEQTQDHDHGGCQKEVSEDSAFTTPALTVQPIKPNNQDPAVEELSVNSLRVEPPKPKTSQPMKSAMKQSFTQEFQNRTINFPVVKDPQDPNTRARLSQKSGSQKNEGNVTRKQLAFDPQPTILGPSAQAKPGQTKPNLKSSSRPLDSAPVALAPALLWSGSKKMFVLNNKPPSLSEVRCTMQVHGLPDVIYQDAYYSKDEDVPSRPREYAGREYRLDGSSVPWLPDFDPTGTSSATYGEKPTSGADWPMLEVIYEAQQEECAMRGWEIADPPPSFKEVSNWWTDEQNDRNPKRCHSTPLRIKTYRSQIAGVTPKIKHGFEHPEKTKSESKQDQAQYMSAMSLEVHVNTRGKLVPDPEEDEVQCVFWYLRSEVNALRGTQTPDDTARGIIVFSEDSLLADRIRKHTSVPVVQETTELDMMVRMVEIVRNHDPDIFTGYEVHGSSWGYLIERARIKYELDLCDEFSRMKSQSNGRIGKDADRWGFNTTSSIRITGRHMINIWRAMRGELNLLQYTMENVVWHLLHRRIPHYSWKTLSDWYLSDRPKDLDKVLRYYLTRTRLDIEILEKNELIPRTSEQARLLGVDFFSVFSRGSQFKVESIMFRIAKPENFLLPSPSRKHVGAQNALECLPLVMEPQSAFYSSPLLVLDFQSLYPSVMIAYNYCYSTFLGRIVSWRGRNKMGFMDYKRQEGLLSLLKDYINIAPNGMMYTKPHIRKSLLAKMSTEILETRIMVKSGMKQDKDDRAIQQLLNNRQLALKLLANVTYGYTSASFSGRMPCSEIADSIVQTGRETLERAIAFIHSVQKWDADVVYGDTDSLFVSLKGRTREQAFEIGQEIADAVTKLNPRPVKLKFEKVYHPCVLLAKKRYVGYKYESRDQTVPVFDAKGIETVRRDGTPAEQRIEEKALKILFETADLSQVKSYFQEQCHKIMRGAVSVQDFCFAREVKLGTYSTSGRGGPAPAGALIATKKMKEDARAEPQYGERVPYVVMAGAPGMRLVDRCVEPEELLNNAHATLDADYYINKNIIPPLERIFNLVGANVRTWYEEMPKVQVLRKVAEDEDAADDASKGPLLGLLGASPSKKGTAAAEAAAAAAELEMEDMLGEDGELLPPDVAAAQAQARKTLEAFLNTTICTACGVKIKRPLGVGLARELGMLEEGEGAVDRGLPLCHRCASDPPTLMVDMQAKVNRAEKSYVEIMKVCQSCAGFALSEEVPCDSKDCPVFYSRVKQRTKVTAVKRVMEPLIKLFGELELDKASSEDEGGDEEGNWDLEGRGEVVDESGVEMQEDARVRYEEEKVRFETIVKGKVRAMSEELAERKEIIDNSYKTLKAASLEW

SEQ ID NO: 2711 - DNA, 5211 bp, Magnaporthe grisea 70
  CDS (1)..(5211)
atggacgtgttcaaggtgcgtctgaactgcatcgatcactaccaagccacgcccacgcaatatgacccctgtctccgaaacgatgttcggcattcccaactattcaaggagcccaaggttccggtgattcgcgtctttggctcaacccagactggtcaaaaagtctgcgcgcatatacatggcgcgtttccctatctcttcattgagtataatgggaagttggatcaagaagaagttggcgcattttcataccgactgcatctgtcgattgaccatgccctcgctgtcagctataggcaggatgcctatgctcgggacacgcccaagtatgtggcgcgtataacgctcgttaagggcgttcccttctatggcttccatgttggctacaagtattatctcaagatttatatgctcaaccccgttgtcatgacgcgactggccgatctgctgcaccaaggtgtcattatgaaacgaaaatttcaaccatacgaggctcatttgcagtacatcttgcaattcatgaccgactacaacctttatggctgcgggtacatcgaggccagcagtgtcaaattccgtgccccagtgcctcagatagacgacgatgacatggacagcgtcatgactccccatatctggcacaaccagtcgatatcccaaaagcagatcacagatcatcactctctgcctagggccagtcattgccccatcgaagttgatatatgcgtacaggacatcctcaatcgtaaagatgtcaaggaacgcagacttcatcatgattttgtcgagcggctgaaccccttacctaccgatatgaagctggtagctagcatggcagggctgtggagggacgaaacgaaacgtcgaaaaagacagctgggcatctccgatccgaaaagcagtccatttcctgctgaggcgcttgtctccatgtcgcacgatccgcgagactcgcagcctgccggctggctacacgaggaagagttccgtgcagagattgaagagctcataacaaccgagagagccaatgacgacacagacatcacattcgactcgtttgtgccagaaccgcctcctcttgattcggccatcaagactgtacttgagtctgtcgaggatctctaccctcaacacttggaggcatccttgggggagatgtcgactatttcggttgattttgaccctgcaagcagtattgacgttgatgagagaggtgcgcgccggctaggcagaccggagactatggacgaagacccttgtccggatgattctgatgaagaaagactgcgagaagcccagcgtttggaggaggcaaagaaagaaaaggctttgcaggactatcccaccacagcttcgataaacggactggttggacttgataccagtagtctgattactggaaagcgaccagagatacccataacacaggagctcatcgatgctgctattgaggaagatctgttgagcgaggttccagctcctttgcaaacgccaatcttgcgagagggattgaagcgacatgcccacccaaaatatgaggatcatccttcaaaacgaccaaggatacgaccagctcgcataaacaacttgacatttgtcccccctgaggacggtctacgagcccggtatgaacgccgtgctgcgaatgtggccaaagccgaaagccaacccccatcgtcttcccaacgacagacagtggatgaggccgccccgttccgtacgcctttgccgcgcaagtcatctatgatgcacaactcggcatccaagtctgttaatcgtaagctcagttttgctgtcgtcaaagatccgaatgaccctgagacaaagcttcgattgagccaaaattccaactcgcaaggcagcgacacatctgaaaccccgaagcttctttcttttgattcgtcgttgccagatccggaggaggcctcaccgcagaaggaagaaaaccaagaattctaccaggtgggccagttgccaaatccctttggaccctccgacaagtctcaggaacatgaccactcagaagatgaagtctttgcacatacctcaatggtacctgttagccatgttctccccccgaccgcagaggaggtctgcgcaactatggcggactacggaatacccgatgttgtataccgggacgcatattacagtaaagagaaagatgtgccacttcgtccaagagagtttgctgggcgtcaatttcggctccggggtaacacgttaccatacctacccgagttcactgctgatagggctgcaccggatgcatgggccgttccagaggcacgactaccagacaaatcaaaacttaaaattgaggaggagatacgccggaataaatgtacaatcaagacatgggaaattgcacaaccacctccgacgtttgaagaagtatcgggctggtgggaggaaaaggagattaagaagaaagagtccggatcgaggccaaagagccatccggcctctccacagtcgacacagttggctcgtcgccagctttcacagatcgaaggagcgacgcccaagaacaaacatggcttcaggtactcgcagaagcaaaagactaccagcgttcagcatgaggttgcttacatgagcacaatgagtatcgagatccatgttaacaccaggggaaaacttgtccctgatccggagaaggacgaggtcaagtgcatattctggtgcgttaggtcagatgataaatctaacgaggctagcagccaggctcctgatggtttacaatcgggcgtcgtggttctatctgaagaaggcaccctggctgaacgcatcaagcaccaaataaagggtgagctattggaagaaacatccgagctcgacctcatggttcgtatggttgagattgttcgaacgcacgacccagatatcctgacaggctacgaggtccatggtggctcttggggctatttgattgagcgcgcaagatgcatgtacgactataatctctgtgacgagttctcccgtatgaagtcgcagtctcatggaagatatggcaaagacgcagaccgatggggtttcaacactacttcgacaatccgagtgacgggtagacacatgatcaacatctggcgtgcgatgcgaggagagctcaacctacttcaatatacaatggaaaatgtcgtctggcatctgctacaccgtcggataccacactactcgtggcagacgctcaccacgtggtatggtagtggacggcacggcgatcttgataaactactacgctactaccaaacaaggacgaggcttgatattgagatccttgaggagaatgggctgatctcgcgaacgagcgagcaggcaagattgcttggcgtcgacttcttttcagtgttctcacgtggatcacagttcaaggttgagtctatcatgtttcggatcgccaagcccgaaaactttatgctcgtatcaccgagtcgaaagcaggttggcgggcaaaatgcattagagtgtttgccgctggtgatggagccacaaagtgcattttataacagtccagtgctggtgctagacttccagagtttgtatcccagcgtcatgattgcctacaactactgctactcgacgttcctggggcggatcgtggattggcgtggaaccaacaagatgggatttgccgagtatagaaggcgaaagcggctactcgagttgttgcaagagcacatcaacattgcaccaaacggcgtcatgtataccaaacctgagatcaggaagtcgctgcttgccaagatgttgacagagattctggaaacaagagtcatggtcaagagtggcatgaaacaagacaaagacgacaaaaccctccagcaattgctaaacaataggcaactggctctcaagctgctggcaaacgtcacatatggctacacgtctgcgtcattctcgggcaggcttccgtgttcggagattgccgatagcattgtacagacaggccgtgaaactctggagcgagccattgccttcattcactctgtcccgagatggggcgctgaagttgtctacggggacacagacagcctttttatccacctcaagggtcgcacaaaagagcaggcctttgagattggaaacgaaatggccaaggcaattactgacatgaacccgcggcccatgaagctcaagtttgagaaggtctacctaccatgcgttttgctagccaaaaagcgctacgttgggtacaagtacgaacacgtcgatcaacaagttcccgattttgatgccaagggcatagagacagtccgccgtgacgggacgccagcggagcaaaagatcgaggaaaaggcgctgcggctgctctttgagacggcggacctaagccaaatcaaggagtactttcaacgacaatgcaacaaaatcatgcgtggtcaagtgtcaatccaagacttttgcttcgccaaggaggtcaagctgggcacatatagcgaccgcaacggtgtaggccccgcaccgcctggcgcgctcattagcacaaagaagatgctggccgatccgcgagcggaaccacaatacggcgaacgtgttctttatgtcgtcgtcacaggcgcccctggcgcgaggcttgccgacaggtgcgtcccgcccgaagacatgctatcgcccgccggtgcgcacctacgacttgatgccgactactacatatccaagaacctgattccgccgctggagcgcatcttcaacttggtcggagcgcacatcagaggttggtacgatgagcttcccaaagtgcagcaggtaaggcgcgtcgtggtcgattctgggaacgggcacaacagctggttcgggagcatcatggggaacaatggcgcacaaaaggccaaaaaggtcacgcttgaaagctatctgcaagtgatgaactgtgcagtatgcaatgtccgcatccgccccgctacccagaaaaagaaaacgccggcaccccggcagcaactaccaccagtacagtaccaccccctgtttgggctggcgcacgagcgcaagcggttttccgaggtggcagatgtgtgtcggagctgtgccggcttggcaccgggcgacgtcgcaagtgtacatgactgcgatagcaaggactgtccggtcttttacacgcgggtcaaacaggccacgaagcttcgaacggaaatgagtattgtcgagccggtgatcaagcaattggaagcgagggttgccaaaatgaggaaacaggcttgggaatggtag

SEQ ID NO: 2712 - protein, 1736 aa, Magnaporthe grisea 70
MDVFKVRLNCIDHYQATPTQYDPCLRNDVRHSQLFKEPKVPVIRVFGSTQTGQKVCAHIHGAFPYLFIEYNGKLDQEEVGAFSYRLHLSIDHALAVSYRQDAYARDTPKYVARITLVKGVPFYGFHVGYKYYLKIYMLNPVVMTRLADLLHQGVIMKRKFQPYEAHLQYILQFMTDYNLYGCGYIEASSVKFRAPVPQIDDDDMDSVMTPHIWHNQSISQKQITDHHSLPRASHCPIEVDICVQDILNRKDVKERRLHHDFVERLNPLPTDMKLVASMAGLWRDETKRRKRQLGISDPKSSPFPAEALVSMSHDPRDSQPAGWLHEEEFRAEIEELITTERANDDTDITFDSFVPEPPPLDSAIKTVLESVEDLYPQHLEASLGEMSTISVDFDPASSIDVDERGARRLGRPETMDEDPCPDDSDEERLREAQRLEEAKKEKALQDYPTTASINGLVGLDTSSLITGKRPEIPITQELIDAAIEEDLLSEVPAPLQTPILREGLKRHAHPKYEDHPSKRPRIRPARINNLTFVPPEDGLRARYERRAANVAKAESQPPSSSQRQTVDEAAPFRTPLPRKSSMMHNSASKSVNRKLSFAVVKDPNDPETKLRLSQNSNSQGSDTSETPKLLSFDSSLPDPEEASPQKEENQEFYQVGQLPNPFGPSDKSQEHDHSEDEVFAHTSMVPVSHVLPPTAEEVCATMADYGIPDVVYRDAYYSKEKDVPLRPREFAGRQFRLRGNTLPYLPEFTADRAAPDAWAVPEARLPDKSKLKIEEEIRRNKCTIKTWEIAQPPPTFEEVSGWWEEKEIKKKESGSRPKSHPASPQSTQLARRQLSQIEGATPKNKHGFRYSQKQKTTSVQHEVAYMSTMSIEIHVNTRGKLVPDPEKDEVKCIFWCVRSDDKSNEASSQAPDGLQSGVVVLSEEGTLAERIKHQIKGELLEETSELDLMVRMVEIVRTHDPDILTGYEVHGGSWGYLIERARCMYDYNLCDEFSRMKSQSHGRYGKDADRWGFNTTSTIRVTGRHMINIWRAMRGELNLLQYTMENVVWHLLHRRIPHYSWQTLTTWYGSGRHGDLDKLLRYYQTRTRLDIEILEENGLISRTSEQARLLGVDFFSVFSRGSQFKVESIMFRIAKPENFMLVSPSRKQVGGQNALECLPLVMEPQSAFYNSPVLVLDFQSLYPSVMIAYNYCYSTFLGRIVDWRGTNKMGFAEYRRRKRLLELLQEHINIAPNGVMYTKPEIRKSLLAKMLTEILETRVMVKSGMKQDKDDKTLQQLLNNRQLALKLLANVTYGYTSASFSGRLPCSEIADSIVQTGRETLERAIAFIHSVPRWGAEVVYGDTDSLFIHLKGRTKEQAFEIGNEMAKAITDMNPRPMKLKFEKVYLPCVLLAKKRYVGYKYEHVDQQVPDFDAKGIETVRRDGTPAEQKIEEKALRLLFETADLSQIKEYFQRQCNKIMRGQVSIQDFCFAKEVKLGTYSDRNGVGPAPPGALISTKKMLADPRAEPQYGERVLYVVVTGAPGARLADRCVPPEDMLSPAGAHLRLDADYYISKNLIPPLERIFNLVGAHIRGWYDELPKVQQVRRVVVDSGNGHNSWFGSIMGNNGAQKAKKVTLESYLQVMNCAVCNVRIRPATQKKKTPAPRQQLPPVQYHPLFGLAHERKRFSEVADVCRSCAGLAPGDVASVHDCDSKDCPVFYTRVKQATKLRTEMSIVEPVIKQLEARVAKMRKQAWEW

SEQ ID NO: 2713 - DNA, 4701 bp, Aspergillus oryzae
  CDS (1)..(4701)
atggagccttttcaagtgcgccttaattgcgtggatcattaccaagccgccccatccgaatttgatcctccgtttccttacagggatccatcaaccgagaaatatgatagacccaaagtgcctgtaattaggatattcggcgctacggaaacaggccaaagagtatgcgtccatgttcacggcgcgtttccgtacctttatgtcccatacgacggtgatttaagcccagaagaagtccgccgtgctattagggatctgcacatctcaattgaccacgcattggctttaagctatcgtcgcaatgcatatgataagaaggccgcctttgttgctcatattaccctagtaaagggcgtccccttctatggctatcatgtcggctatcgtttcttcttcaaggtctatcttctcagccctatctatacgacaagagtagcggacctattgcttcaaggagctatactgaagcgttctttgcagccttacgaaagccacttacaatatatcccgcaatggatgtgtgattatagtttgtacggctgtgcgtatatgaagtgtagcaaagtcaagtttcgatctccagtaccagagtatctcgaattgactaatctatcgcatcgctggcatgatcgatctatacaaccagatagtatctcggatgcgtcagaactcccgaagcaaagtcactgtcccctagaagtggatatttgcgtgcaagatatcttgaatcgtcttgaagtccgcgagagacctatacatcatgattttacggagtttctgaagccagtcgaccagaatgaaaaacttgttccgagcatggaaggactgtggaaggatgagacacacaggcgaaagaaacgtctgggactagctgatcctgacagtagcccgtttgaccccgaggagctagtttcgctatcagctgctacaagggaacagtataaaggagagtggatccatgaggaggaatatcgtcagttgacgctccgtgcagtcgctgaggaaaggcgtcaatatggtggtggcgacgttaatgtcgatgattttctcgtacaggaccccctcgggaaagatgtcaagactgtattagagagtgttgaggatctttatcccgacaacaataacttcccgggtttacaagcacctcaggatctcgaaataggtgaatctgcgaatgaaggtgcctatactgatgaaaatgcggccttacctgtagcgtccgatagttcagatgacgataacattgccgatcttttctcggaaggtaacgatgaagaggaaagagatgtttttgacgaccctctggcagatgtattttctgagctaccctctgacgaacaccgagagccgaatgcgcccctggctcacacttccaccgattataagccattcttcgaccggacagaaggctcttcaagcagacatagtactaactcttatgcacaaggtcagctggaacatatcaatagccaggcgaagatcagagaggacatacggagggcagagagaaccctcaagcgttcagaaagtgaagtaattgatcatgtccactttaacaagcggccgaactcttttctatcagtgatggcaccgatgatctatgaaactttcaacataccacagaacacgcggatatgctgtttacggcgcccctgccccagtcctagtgaggtgttgtctacccttagcgattatgactatccggctgttatctatgacaaagcccattacagtgaccagggtgatgtgccagatcgtccacgagactatgcaggcagggaattccgcttacaaggcagtgggatacattatctccctgactttgatcccaccggccggtcacctgcgatgcttggcgaacaaacttcgatactaagagatagacaagagcaagagcaaattgaccagcatctcagggagtcttgtacctctagagtgtgggagttcgcccccgtgccgccaagccgctccgaagttatacagtggttcgagagcagacaacaagaaccgaaggctgaaactgtgcagccagagaggcatttacacgaaccgaacacaaagcttaacgtcctctcacagatcgagggcccaacgcaaaagaacgaatatggatttaagtattcacagaaaggaaggtctactagtgtcgaacatcagacccagtatatgagcataatgagcttagaggttcatgttaatacgcgtggagtacttgccccaaacccagaagaggatgagatatcctgcatctcttggtgtatacagtcagatgacgaggatctcgacgttaatagtcacctttcgggtgtccgtgttggtatggtatttcagggtgaatatgacaaacccgaagaaacgctttctaaggctttgagaatcgacttggaacatgagccaacggagctggacttgattaacagactagtggatcttgttagactgtatgacccagacattatcaccgggtatgaagttcacaacggctcttggggatacgtgattgagagagctagaaagaagtatgattttgacatatgtgacgaactatcgagagtgaagtcacaggcgcacggcaggtttggtaaggatgctgaccgatggggattcaaccacacatcttccattcgagtaagcggacgacatatgatcaatatctggcgagccatgaggagtgagctgaacctgcttcaatatagcatggagaacgtcgtattccacctattgcatcgacgaatacctcattactcgtttcgcgatctcactgaatggtaccagagtggaaagcctcgcgatctaatgaaagtcgtcgactatttcgtctctcgagtgcaaatgaatcttgagatcctagaatcaaatgagctagtaccgagaatcagtgagcaggcacgactgctaggcatcgacttctactcggtgttttctcgaggttcccagttcaaagtcgagtctttgatgttccggattgcaaaacccgagaacttcctactcgtttcaccgagcaagaaacaagttggccagcaaaatgctctcgaatgtcttccattggtaatggaaccccagagtgacttctataccagtcccctcatagtcttggatttccaatcactgtatcctagcatcatgattgcctataattactgctactcgaccttcctgggacgagtacatcaatggcgaggccgagacaagatgggatttacagaataccaaagacagccacgactgctagaactattcaaggacaagatcaacatcgcaccaaacggcatgatgtacgcgaagcccgaagtacgtagatcgctgctcgcaaggatgctcgccgagatcctcgagacacgggtcatggtcaagaccggaatgaagatggacaaggacgacaaggcgctgcaacgtcttctcaacaacagacaactcgccctcaaattaatagcgaacgtcacgtacggctacacatcagcatcattttcagggcgaatgccctgttccgaaatagcagacagcatcgtccaatcggggcgagagacactagaaaaagccattgccctgatccattctgtagagcgctggggcgccgaggtcgtatacggagacacagacagtctcttcgtctacctcaaaggacgcactcgcgacgaagccttcgacatcggcgaagaaatcgccaaagccgtaacagaaacgaacccctcgccagtcaaactcaagttcgaaaaagtctaccacccatgcgttcttctagccaagaaacgctacgtcggcttcaaatacgagcacagagaccagaaagaacccgagttcgacgcaaagggtatcgaaacagtccgccgagacggcacaccagccgagcagaagatcgaagaaaaggccctgaagctcctcttccgcacggcagatctaagccaagtgaaacgctacttccagaaacagtgcacgaagatcctccaaggacgagtctccattcaagacttctgcttcgctagagaagtaaagctcggcacatatagcgagcgaggcctacctcccccgggcgccttaatcagcaccaagaaaatgctcgaagatccccgtctagagccccagtatggagaacgagtaccttacgtcgtcgtaacaggtgctccaggttcaaggttgatcgaccgctgcgtaccacccgagacactcctacatgatgcacaattagaactcgatgccgaatactacattactaagaacatcatcccgcctctagaacgaatcttcaacctcgtgggcgccaacgtccgccagtggtatgatgaaatgcccaaagtgcaacgtattcgccgggtagaaggaacggtaacttctaccggcaaggacgccagaaagactacccttgaatcatatatgaaatcttcaacctgtatcgtctgcaaagccaagctggatgatactgatgttccggtctgtgctgagtgcatacgacagccgcatatctctttgcttgatttggttactcgccaacgacatgcggagaagagcgtttctgatcttctgcgtgtttgccggtcttgtatgggtgttccgtttggtgatgaggtgaagtgtgatagcaaggattgtcctgttttctattcgaggactagatatgtggctaattggaggcatactaaggccgttttggaccccgtgatcaagttattgcaggataagagtgagagtgagctagaatggtag

SEQ ID NO: 2714 - protein, 1566 aa, Aspergillus oryzae
MEPFQVRLNCVDHYQAAPSEFDPPFPYRDPSTEKYDRPKVPVIRIFGATETGQRVCVHVHGAFPYLYVPYDGDLSPEEVRRAIRDLHISIDHALALSYRRNAYDKKAAFVAHITLVKGVPFYGYHVGYRFFFKVYLLSPIYTTRVADLLLQGAILKRSLQPYESHLQYIPQWMCDYSLYGCAYMKCSKVKFRSPVPEYLELTNLSHRWHDRSIQPDSISDASELPKQSHCPLEVDICVQDILNRLEVRERPIHHDFTEFLKPVDQNEKLVPSMEGLWKDETHRRKKRLGLADPDSSPFDPEELVSLSAATREQYKGEWIHEEEYRQLTLRAVAEERRQYGGGDVNVDDFLVQDPLGKDVKTVLESVEDLYPDNNNFPGLQAPQDLEIGESANEGAYTDENAALPVASDSSDDDNIADLFSEGNDEEERDVFDDPLADVFSELPSDEHREPNAPLAHTSTDYKPFFDRTEGSSSRHSTNSYAQGQLEHINSQAKIREDIRRAERTLKRSESEVIDHVHFNKRPNSFLSVMAPMIYETFNIPQNTRICCLRRPCPSPSEVLSTLSDYDYPAVIYDKAHYSDQGDVPDRPRDYAGREFRLQGSGIHYLPDFDPTGRSPAMLGEQTSILRDRQEQEQIDQHLRESCTSRVWEFAPVPPSRSEVIQWFESRQQEPKAETVQPERHLHEPNTKLNVLSQIEGPTQKNEYGFKYSQKGRSTSVEHQTQYMSIMSLEVHVNTRGVLAPNPEEDEISCISWCIQSDDEDLDVNSHLSGVRVGMVFQGEYDKPEETLSKALRIDLEHEPTELDLINRLVDLVRLYDPDIITGYEVHNGSWGYVIERARKKYDFDICDELSRVKSQAHGRFGKDADRWGFNHTSSIRVSGRHMINIWRAMRSELNLLQYSMENVVFHLLHRRIPHYSFRDLTEWYQSGKPRDLMKVVDYFVSRVQMNLEILESNELVPRISEQARLLGIDFYSVFSRGSQFKVESLMFRIAKPENFLLVSPSKKQVGQQNALECLPLVMEPQSDFYTSPLIVLDFQSLYPSIMIAYNYCYSTFLGRVHQWRGRDKMGFTEYQRQPRLLELFKDKINIAPNGMMYAKPEVRRSLLARMLAEILETRVMVKTGMKMDKDDKALQRLLNNRQLALKLIANVTYGYTSASFSGRMPCSEIADSIVQSGRETLEKAIALIHSVERWGAEVVYGDTDSLFVYLKGRTRDEAFDIGEEIAKAVTETNPSPVKLKFEKVYHPCVLLAKKRYVGFKYEHRDQKEPEFDAKGIETVRRDGTPAEQKIEEKALKLLFRTADLSQVKRYFQKQCTKILQGRVSIQDFCFAREVKLGTYSERGLPPPGALISTKKMLEDPRLEPQYGERVPYVVVTGAPGSRLIDRCVPPETLLHDAQLELDAEYYITKNIIPPLERIFNLVGANVRQWYDEMPKVQRIRRVEGTVTSTGKDARKTTLESYMKSSTCIVCKAKLDDTDVPVCAECIRQPHISLLDLVTRQRHAEKSVSDLLRVCRSCMGVPFGDEVKCDSKDCPVFYSRTRYVANWRHTKAVLDPVIKLLQDKSESELEW

SEQ ID NO: 2715 - DNA, 5781 bp, Neurospora tetrasperma
  CDS (1)..(5781)
atggaatttttaagacttcgattgaactgtatagatcactaccaagccacgtcaaccggatatgatccccagtttgaccaagatgtgcgcttttcgcgttcgcggaaggccgccaaagtccctgtaattcgggtgttcggatcgaccgacaagggccagaaagtctgcgctcatattcatggtgcctttccctatctgtatgtcgagtatgacggaaatctagaacccaacaaggatcatgcgttagctatcagctaccggaaagatcccattcgcgatcggcccatatatgtagcacggattacgctgacaaaaggtatacccttttatggcttccatgtgggttatcgcttctatctcaaaatttacctgttcaacccggtggtcatgtcgcgtctcgtcgatctccttcagcaaggtgttattatgagtcggaaatttcaaccttacgaggcccatctgcagtatctccttcagttcatggctgattacaacctgtacggctgtaactacctggatgcggcgatggccacctttcgagcgcctgtaccgaagcatgacagcaacatcgaaggccgtgagactgaacatcactgggacgatgcaacgatcccgccagagctgattacggatgattacagccttccccgggctagccactgctcccttgaagtggacatctgcgtcgaagacatcctgaatcgaaagcaagtcgaagagcgaaggcttcatcatgatttcatcgaaaaggagcagccggtgtcaagccaagaaaagctggtgcacagcatggctggactctggacggatgagacaaaccgcaggaaaaagcgtatgggaataacggaccctgaagttaacccctttcctccggaagtcttggtatcaatgtctgcggacccacgtcaatcacaggtgatggggtgggttcatgaagctgagtaccgtgctggtattcaacaattggttgctcaggaacagaacaacacagatggacgtcagcagactttctccggctttgtgcaaccagttccatttgaagaaactatcaagactactttagagtcagtggaagacttatacccagacaacttgagccaagctctgcaaattgaagcacaattttttcacacgaatgcacagcatctcatcagtatcgatgtcgacgaacgaagcatctttcagctaatacgcgagccatatgcaaaacacactcgacacgaatacgcgggcagaatctcaccggaggagcctttgaatggtgttggagaaggatttggtgtgggggattcaatgatttatcctatggatgggcggatccgtgtataccaacccagagcttccatccgtcataaacttttgaagattgcccagacttactcttccaatcaaccagccaatacaggtagacaagccggggttcttggtcctggagagcgacaacgaagatctctcaagcatcccaggccgccgggagaagttgatcatggtgcacctgcaaaacatcaggtgctccaagctgaggactcaagggagtcacttcacatgaaagccgaccctccgcaaagagctttggaagaggctccgagaaacgcccatgaacaaactcaaggtgcaggtcagccagggcctcagagaaagctccagagtaaccctcccgaaagggtttacgaggagccaaacaagagggttcacgaggaggctcaaccaaaggtccatcgaaaggcccagcaaaggtctcgggaacatgaccagaaacagggccaacagaaaatacaggaacaaactcaagatcatgatcagggaggataccagaaggaagttccagaagattcggcatttacgacgccagctcggacagtccagccaatgaaacccaataatcaggatccagcaggagaggaactattggtgaatagtctgcgggtcgagccaccaaaacctaagacatctcagcccatgaagtctgctatgaagcagagctttgcacaagagtcccaaagccgtacgatcaactttcccgtcgtcaaagatccacaagatcctaacacaagggcgcgactgagccaaaagagtggttcgcagaagaacgagggtaacgtcaccagaaagcaacttgccttcgaccctcaacccaccattttggggccatcggctcaggcgaggcccgatcagactaaacccaacctaaaatcgtcgtccagaccccttgactcggcccctgtggcttcggctgcggcactcttgtggagtggctcaaagaaaatgtttgtcctgaacaataaacctccatccctgagcgaagtccgctgtaccatgcaggtacatggcctacctgatgtcatctatcaagacgcatattacagtaaggatgaggatgttccctccagaccgagagaatatgcaggcagggaataccgacttgacggtagctctgttccttggctccccgatttcgacccgactggcacatcgtcggcgacatatggcgagaaaccgacctccggtgccgactggccgatgctggaggcaatctatgaggctcaacaagaggaatgtgcgatgaggggttgggaaatagcagatcctcctccttctttcaaggaagtcagtaattggtggacagatgaacaaaacaatcgcaatccaaaacgatgccattccacacccctcaggattaaaacctaccgctcccaaattgcgggcgtgacgccaaagaacaagcatggcttcgaacatcccgaaaagacaaaatctgaaagcaaacaggatcaggcacagtacatgagcgccatgagcctagaggtacatgttaacacccggggcaagctagtaccggatcctgaagaagacgaagtgcagtgtgtgttttggtatttgcggtccgaagtaaacgctctccgcggaactcagacgccggatgatacggcacggggcattgtcgttttctcagaggatggtctgcttgcagatagaatccgaaagcacacatccgtgccggtggttcaagagacaacagaacttgatatgatggtccggatggtcgagattgtgcggaaccatgatcccgatatcttcacaggatatgaggtgcatggcagttcatggggctaccttattgagcgagcgaggataaagtatgatctcgacctctgtgatgagttctcacgcatgaagtctcagtcaaatgggcgtatcggtaaggatgtggatcgctggggcttcaacacgacatcctcgatacgaataacaggacgacacatgatcaacatttggagagccatgagaggcgaactcaatcttctacagtataccatggagaatgttgtttggcatctgctacaccgtcggattcctcattacagttggaagactttatcggattggtatctgagcgatcgaccgaaggatctcgataaagttctccgatattacctgacgagaacgcgacttgatattgaaattctggaaaagaatgagctcattcctaggacaagcgagcaagtaagactgcttggtgttgactttttttctgtcttctccagaggatcgcaattcaaggtagagtccatcatgttcaggatagccaaacccgagaacttccttctcgcttctccaagcaggaagcaagtgggtgcacaaaacgctttggagtgtctacccttagtgatggaaccgcagagtgcattctacagctgtcctttgcttgttcttgactttcagagtctgtatcccagtgtcatgatcgcctacaactactgctactcgaccttccttgggcgtatcgtcagctggcgaggtaaaaacaaaatgggtttcatggactacaagaggcaagaggggcttcttagtctactcaaagattacatcaacatcgccccaaacggtatgatgtacacaaagcctcatattcgcaagtcacttcttgcaaagatgcttaccgagattcttgaaactcgtatcatggtcaagtccggtatgaagcaagacaaggatgatagggcgattcagcaactgctgaataaccggcagctggcgctgaagctcctcgccaacgtcacctacggttacacatcggcctcgttctcaggtcgtatgccctgctccgagattgccgacagcatcgtccaaaccggtcgcgaaacccttgagcgggccatagccttcattcatagcgtccagaagtgggacgccgaggttgtctacggcgacaccgacagtcttttcgtctctctcaagggccgcacccgcgaacaggcctttgagatcggccaagagatcgccgacgctgtcagcaagttgaatccgcggcccgtcaagctcaagtttgaaaaggtctatcacccatgcatactcctcgccaaaaagcgctacgtcggctacaagtacgagagtcgggaccagaccgtgcccgtgttcgacgccaagggcatcgagacggtccggcgcgacggcacacccgccgagcaacggatcgaggagaaggcgctcaaaatcctctttgagactgccgatctcagccaggtcaagagttacttccaagagcagtgccacaagattatgcgcggcgccgtgtccgtgcaggacttttgcttcgcgcgcgaagtcaaactgggcacgtacagcacgtccggtcgcggcggcccggctcccgctggcgcgctgattgccaccaaaaagatgaaggaggacgcgcgggcggagccgcaatatggcgaacgggtgccatatgtggtgatggccggcgcgccgggaatgaggctggtggaccggtgcgtggaacccgaggagctgctgaataacgcacatgctacgttggatgcagagtactacattaacaagaacatcattccgccgctagagaggattttcaacttggtcggcgcgaacgtgaggacttggtatgaggagatgcccaaggttcaagtcttgcggaaggtggtggaggatgaagacgctgctgacgatgcttccagaggcccactactgggactgctaggggcgtcaccaagcaaaaagggtacggcagcggcagaagcagctgcagcagctgcagaactagagatggaagatatgttgggagaagacggcgagctcctccctcctgacgtcgcagctgcccaagcccaagcgcgcaagaccctcgaagccttcctcaataccaccatttgcacagcctgcggcgtcaagatcaagcggccgctcggggtagggcttgcgcgcgagctgggcatgcttgaggagggcgagggcgccgtggaccgaggcctgccgctctgtcaccggtgcgcttcggatccacccacgcttatggtcgacatgcaggccaaggtcaacagagccgagaaaagctacgtggagattatgaaggtgtgtcagagctgtgcgggctttgcgtcatccgaggaggtgccctgcgatagcaaggattgccctgtcttttactcgagggtgaagcagaggacgaaggtaacggcggtaaagagggtgatggagccgctaatcaagttgtttggagagttggaattggataaggcgagtagtgaggatgagggtggcgacgaggagggtaattgggatctggaagggagaggtgaggtggttgacgaaagtggtgtagaaatgcaagaagacgcaggagtaaggtatgaggaggagaaagtgagattcgaaaccattgtcaagggcaaggttagagccatgagtgaggagttggcggagaggaaagagattattgacaacagttataagagcctgaaggcggcatcgttggaatggtaa

SEQ ID NO: 2716 - protein, 1926 aa, Neurospora tetrasperma
MEFLRLRLNCIDHYQATSTGYDPQFDQDVRFSRSRKAAKVPVIRVFGSTDKGQKVCAHIHGAFPYLYVEYDGNLEPNKDHALAISYRKDPIRDRPIYVARITLTKGIPFYGFHVGYRFYLKIYLFNPVVMSRLVDLLQQGVIMSRKFQPYEAHLQYLLQFMADYNLYGCNYLDAAMATFRAPVPKHDSNIEGRETEHHWDDATIPPELITDDYSLPRASHCSLEVDICVEDILNRKQVEERRLHHDFIEKEQPVSSQEKLVHSMAGLWTDETNRRKKRMGITDPEVNPFPPEVLVSMSADPRQSQVMGWVHEAEYRAGIQQLVAQEQNNTDGRQQTFSGFVQPVPFEETIKTTLESVEDLYPDNLSQALQIEAQFFHTNAQHLISIDVDERSIFQLIREPYAKHTRHEYAGRISPEEPLNGVGEGFGVGDSMIYPMDGRIRVYQPRASIRHKLLKIAQTYSSNQPANTGRQAGVLGPGERQRRSLKHPRPPGEVDHGAPAKHQVLQAEDSRESLHMKADPPQRALEEAPRNAHEQTQGAGQPGPQRKLQSNPPERVYEEPNKRVHEEAQPKVHRKAQQRSREHDQKQGQQKIQEQTQDHDQGGYQKEVPEDSAFTTPARTVQPMKPNNQDPAGEELLVNSLRVEPPKPKTSQPMKSAMKQSFAQESQSRTINFPVVKDPQDPNTRARLSQKSGSQKNEGNVTRKQLAFDPQPTILGPSAQARPDQTKPNLKSSSRPLDSAPVASAAALLWSGSKKMFVLNNKPPSLSEVRCTMQVHGLPDVIYQDAYYSKDEDVPSRPREYAGREYRLDGSSVPWLPDFDPTGTSSATYGEKPTSGADWPMLEAIYEAQQEECAMRGWEIADPPPSFKEVSNWWTDEQNNRNPKRCHSTPLRIKTYRSQIAGVTPKNKHGFEHPEKTKSESKQDQAQYMSAMSLEVHVNTRGKLVPDPEEDEVQCVFWYLRSEVNALRGTQTPDDTARGIVVFSEDGLLADRIRKHTSVPVVQETTELDMMVRMVEIVRNHDPDIFTGYEVHGSSWGYLIERARIKYDLDLCDEFSRMKSQSNGRIGKDVDRWGFNTTSSIRITGRHMINIWRAMRGELNLLQYTMENVVWHLLHRRIPHYSWKTLSDWYLSDRPKDLDKVLRYYLTRTRLDIEILEKNELIPRTSEQVRLLGVDFFSVFSRGSQFKVESIMFRIAKPENFLLASPSRKQVGAQNALECLPLVMEPQSAFYSCPLLVLDFQSLYPSVMIAYNYCYSTFLGRIVSWRGKNKMGFMDYKRQEGLLSLLKDYINIAPNGMMYTKPHIRKSLLAKMLTEILETRIMVKSGMKQDKDDRAIQQLLNNRQLALKLLANVTYGYTSASFSGRMPCSEIADSIVQTGRETLERAIAFIHSVQKWDAEVVYGDTDSLFVSLKGRTREQAFEIGQEIADAVSKLNPRPVKLKFEKVYHPCILLAKKRYVGYKYESRDQTVPVFDAKGIETVRRDGTPAEQRIEEKALKILFETADLSQVKSYFQEQCHKIMRGAVSVQDFCFAREVKLGTYSTSGRGGPAPAGALIATKKMKEDARAEPQYGERVPYVVMAGAPGMRLVDRCVEPEELLNNAHATLDAEYYINKNIIPPLERIFNLVGANVRTWYEEMPKVQVLRKVVEDEDAADDASRGPLLGLLGASPSKKGTAAAEAAAAAAELEMEDMLGEDGELLPPDVAAAQAQARKTLEAFLNTTICTACGVKIKRPLGVGLARELGMLEEGEGAVDRGLPLCHRCASDPPTLMVDMQAKVNRAEKSYVEIMKVCQSCAGFASSEEVPCDSKDCPVFYSRVKQRTKVTAVKRVMEPLIKLFGELELDKASSEDEGGDEEGNWDLEGRGEVVDESGVEMQEDAGVRYEEEKVRFETIVKGKVRAMSEELAERKEIIDNSYKSLKAASLEW

SEQ ID NO: 2717 - DNA, 5781 bp, Neurospora tetrasperma
  CDS (1)..(5781)
atggaatttttaagacttcgattgaactgtatagatcactaccaagccacgtcaaccggatatgatccccagtttgaccaagatgtgcgcttttcgcgttcgcggaaggccgccaaagtccctgtgattcgggtgttcggatcgaccgacaagggccagaaagtctgcgctcatattcatggtgcctctccctatctgtatgtcgagtatgacggaaatctagaacccgacaaggatcatgcgttagctatcagctaccggaaagatcccattcgcgatcggcccaaatatgtagcacggattacgctgacaaaaggtatacccttttatggcttccatgtgggttatcgcttctatctcaaaatttacctgttcaacccggtggtcatgtcgcgtctcgtcgatctccttcagcaaggtgttattatgagtcggaaatttcaaccctacgaggcccatctgcagtatctccttcagttcatggctgattacaacctgtacggctgtaactacctggatgcggcgatggccacctttcgagcacctgtaccgaagcatgacagcaacatcgaaggccgcgagactgaacatcactgggacgatgcaacgatcccgccagagctgattacggatgattacagccttccccgggctagccactgctcccttgaagtggacatctgcgtcgaagacatcctgaatcgaaagcaagtcaaagagcgaaggcttcatcatgatttcatcgaaaaggagcagccggtgtcaagccaagaaaagctggtgcacagcatggctggactctggacggatgagacaaaccgcaggaaaaagcgtatgggaataacggaccctgaagtcaacccttttcctccggaagtcttggtatcaatgtctgcggacccacgtcaatcacgggtgatggggtgggttcatgaagctgagtaccgtgctggtattcatcgattggttgctcaggaacagaacaacacagatggacgtcaggagactttctccagctttgtgcaaccagttccatttgaagaaactatcaagactactttagagtcggtggaagacttatacccagacaacttgagccaagctctgcaaatcgaagcacaattttttcacatgaatgcacagcatctcatcagtatcgatgtcgacgaacgaaccatttttcagctaatacgcgagccacatgcaaaacagactcgacacgaatgcgcgggcagaatctcaccggaggagcctttgaatggtgttggagaaggatttgatgtgggggattcaatgacttatcctatggatgggggaatccgtgtataccaacccagaacttccatccgtcataaacttttgaagattgcccagacttactcttccaatcaaccagccaatacaggtagacaagccggggttcttggtcctggagagcgacgacgaagatctctcaagcatcccaggccgccgggagaagttgatcatggtgcacctgcaaaacgtcaggtgctccaagccgaggactcaagggagtcacttcacatgaaagccgaccctccgcaaagagctttggaaaaggctccgagaaacgcccatgaacaaactcaaggtgcaggtcagccagggcctcagagaaagctccagagtaaccctccggaaagggtttacgaggagccaaacaagagggttcacgaggaggctcaaccaaaggtccatcgaaaggcccagcaaaggtctcgggaacatgaccagaaacagggccaacaggaaatccaggaacaaactcaagatcatgatcagggaggagaccagaaggaagttccagaaaattcgacatttacgacgccagctcggacagtccagccagtgaaacccaataatcaggatccagcaggagaggaactattggtgaatagtctgcaggtcgagccaccaaaacataagacatctcagcccatgaagtctgctatgaagcagagctttgcacaagagtcccaaagccgtacgatcaactttcctgtcgtcaaagatccacaagatcctaacacaagggcgcgactgagccaaaagagtggttcgcagaaaaacgagggtaacgtcaccagaaagcaacttgccttcgaccctcaacccaccattttggggccatcggctcaggcgaggcctggtcagactaaacccaacccaaaatcgtcgtccaggccccttgactcggcccctgtggcttcggctccggcactcttgtggaggggctcaaagaaaatgtttgtcctgaacaataaacctccatccctgagcgaagtccgctgtaccatgcaggtacatggcctacctgatgtcatctatcaagacgcatattacagtaaggatgaggatgttccctccagaccgagagaatatgcaggcagggaataccgacttgacggtagctctgttccttggctccccgatttcgacccgactggcacatcttcggcgacatatggcgagaaaccaacctccggtgccgactggccgatgctggaggcaatctatgaggctcaacaagaggaatgtgccatgaggggttgggaaatagcagatcctcctccttctttcaaggaagtcagtaattggtggacagatgaacaaaacgatcgcaatccaaaacgatgccatttcacacccctaaggattaaaacctaccgctcccaaattgcgggcgtgacgccaaagaacaagcatggcttcgaacatcccgaaaagacaaaatctgaaagcaaacagaatcaggcacagtacatgagtgccatgagcctagaggtgcatgttaacacccggggaaagctagtaccggatcctgaagaagacgaagtgcagtgtgtgtttttgtatctgcggtccgaagtaaacgctctccgcggaactcagacgccggatgatacggcacggggcattatcgttttctcagaggatagtctgcttgcagatagaatccgaaagcacacatccgtgccggtggttcaagagacaacagaacttgatatgatggtccggatggtcgagattgtgcggaaccatgatcccgatatctttacgggatatgaggtgcatggcagttcatggggctaccttattgagcgggcgagaataaagtatgagctcgacctctgtgatgagttctcacgcatgaagtctcagtcaaatgggcgtatcggtaaggatgcggatcgctggggcttcaacacgacatcctcgattcgaattacaggacggcatatgatcaacatttggagagccatgagaggcgaactcaatcttctacagtataccatggagaatgttgtttggcatctgctacaccgtcggattcctcattacagctggatgactttatcggattggtatctgagcgatcgaccgaaggatctggataaagttctccgatattacctgacgagaacgcgacttgatattgaaattctggagaagaacgagctcattccaaggacaagcgagcaagcaaggctgcttggtgttgactttttttctgtcgtctccagaggatcgcagttcaaggtagagtccatcatgttcaggatagccaaacccgagaagttccttctcgcttctccaagcagaaagcaagtgggtgcacaaaacgctctggagtgtctacccttagtcatggaaccgcagagtgcattctacagcagtcctttgcttgttcttgactttcagagtctgtatcccagtgtcatgatcgcctacaactactgctactcgaccttccttgggcgtatcgtcagctggcgaggtaaaaacaaaatgggtttcatggactacaagaggcaagaggggcttcttagtctactcaaagattacatcaacatcgccccaaacggtatgatgtacacaaagcctcatattcgcaagtcacttcttgcaaagatgcttaccgagattctcgaaactcgtatcatggtcaagtccggtatgaagcaagacaaggatgataaggcgattcagcaactgctgaataaccggcagctggcgctgaagctcctcgccaacgtcaactacggttacacatcggcctcgttctcaggtcgtatgccctgctccgagattgccgacagcatcgtccaaaccggtcgcgaaacccttgagcgggccatagccttcattcatagcgtccgaaagtgggacgccgaggttgtctacggcgacaccgacagtcttttcgtctctctcaagggccgcacccgcgaacaggcctttgagatcggccaagagattgccgacgctgtcaccaagttgaatccgcggcccgtcaagctcaagtttgaaaaggtctaccacccatgcatactcctcgccaaaaagcgctacgtcggctacaagtacgagagtcgggaccagaccgtgcccgtgttcgacgccaagggcatcgagacagtccggcgcgacggcacacccgccgagcaacggatcgaggagaaggcgctcaaaatcctctttgagactgccgatctcagccaggtcaagagttacttccaggagcagtgccacaagattatgcgcggcgccgtgtccgtgcaggacttttgcttcgcgcgcgaagtcaagctgggcacgtacagcacgtccggtcgcggcggcccggctcccgctggtgcgctgattgccactaaaaagatgaaggaggacgcgcgggcggagccgcaatatggcgaacgggtgccatatgtggtgatggccggcgcgccggggatgaggctggtagaccggtgcgtggaacccgaggagctgttgaataacgcacatgctacgttggatgcggactactacattaacatgaacatcattccgccgctagagaggatcttcaacttggtcggcgcgaacgtgaggacttggtatgaggagatgcccaaggttcaagtcttgcggaaggtggcggaggatgaagacgctgatgacgatgcttccaaaggcccactgctgggactgctaggggcgtcaccaagcaaaaagggtacggcagcggcagaagcagctgcagcagctgcagaactagagatggaagatatgttgggagaagacggcgagctcctccctcctgacgtcgcagctgcccaagcccaagcgcgcaagaccctcgaagccttcctcaataccaccatctgcacagcctgcggcgtcaagatcaagcggccgctcggggtagggcttgcgcgcgagctgggcatgcttgaggagggcgagggcgccgtggaccgaggcctgccgctctgtcaccggtgcgcttcggatccacccacgcttatggtcgacatgcaggccaaggtcagcagagccgagaaaagctacgtggagattatgaaggtgtgtcagagctgtgcgggctttgcgtcatccgaggaggtgccctgcgatagcaaggattgccctgtcttttactcgagggtgaagcagaggacgaaggtaacggcggtaaagagggtgatggagccgctaatcaagttgtttggagagttggaattggataaggcgagtagtgaggatgagggtggtgacgaggagggtaattgggatctggaagggagaggtgaggtggttgacgaaagtggtgtagaaatgcaagaagacgcaggagtaaggtatgaggaggagaaagtgagattcgaaaccattgtcaagggcaaggttagagccatgagtgaggagttggtggagaggaaagagattattgacaacagttataagagcctgaaggcggcatcgttggaatggtaa

SEQ ID NO: 2718 - protein, 1926 aa, Neurospora tetrasperma
MEFLRLRLNCIDHYQATSTGYDPQFDQDVRFSRSRKAAKVPVIRVFGSTDKGQKVCAHIHGASPYLYVEYDGNLEPDKDHALAISYRKDPIRDRPKYVARITLTKGIPFYGFHVGYRFYLKIYLFNPVVMSRLVDLLQQGVIMSRKFQPYEAHLQYLLQFMADYNLYGCNYLDAAMATFRAPVPKHDSNIEGRETEHHWDDATIPPELITDDYSLPRASHCSLEVDICVEDILNRKQVKERRLHHDFIEKEQPVSSQEKLVHSMAGLWTDETNRRKKRMGITDPEVNPFPPEVLVSMSADPRQSRVMGWVHEAEYRAGIHRLVAQEQNNTDGRQETFSSFVQPVPFEETIKTTLESVEDLYPDNLSQALQIEAQFFHMNAQHLISIDVDERTIFQLIREPHAKQTRHECAGRISPEEPLNGVGEGFDVGDSMTYPMDGGIRVYQPRTSIRHKLLKIAQTYSSNQPANTGRQAGVLGPGERRRRSLKHPRPPGEVDHGAPAKRQVLQAEDSRESLHMKADPPQRALEKAPRNAHEQTQGAGQPGPQRKLQSNPPERVYEEPNKRVHEEAQPKVHRKAQQRSREHDQKQGQQEIQEQTQDHDQGGDQKEVPENSTFTTPARTVQPVKPNNQDPAGEELLVNSLQVEPPKHKTSQPMKSAMKQSFAQESQSRTINFPVVKDPQDPNTRARLSQKSGSQKNEGNVTRKQLAFDPQPTILGPSAQARPGQTKPNPKSSSRPLDSAPVASAPALLWRGSKKMFVLNNKPPSLSEVRCTMQVHGLPDVIYQDAYYSKDEDVPSRPREYAGREYRLDGSSVPWLPDFDPTGTSSATYGEKPTSGADWPMLEAIYEAQQEECAMRGWEIADPPPSFKEVSNWWTDEQNDRNPKRCHFTPLRIKTYRSQIAGVTPKNKHGFEHPEKTKSESKQNQAQYMSAMSLEVHVNTRGKLVPDPEEDEVQCVFLYLRSEVNALRGTQTPDDTARGIIVFSEDSLLADRIRKHTSVPVVQETTELDMMVRMVEIVRNHDPDIFTGYEVHGSSWGYLIERARIKYELDLCDEFSRMKSQSNGRIGKDADRWGFNTTSSIRITGRHMINIWRAMRGELNLLQYTMENVVWHLLHRRIPHYSWMTLSDWYLSDRPKDLDKVLRYYLTRTRLDIEILEKNELIPRTSEQARLLGVDFFSVVSRGSQFKVESIMFRIAKPEKFLLASPSRKQVGAQNALECLPLVMEPQSAFYSSPLLVLDFQSLYPSVMIAYNYCYSTFLGRIVSWRGKNKMGFMDYKRQEGLLSLLKDYINIAPNGMMYTKPHIRKSLLAKMLTEILETRIMVKSGMKQDKDDKAIQQLLNNRQLALKLLANVNYGYTSASFSGRMPCSEIADSIVQTGRETLERAIAFIHSVRKWDAEVVYGDTDSLFVSLKGRTREQAFEIGQEIADAVTKLNPRPVKLKFEKVYHPCILLAKKRYVGYKYESRDQTVPVFDAKGIETVRRDGTPAEQRIEEKALKILFETADLSQVKSYFQEQCHKIMRGAVSVQDFCFAREVKLGTYSTSGRGGPAPAGALIATKKMKEDARAEPQYGERVPYVVMAGAPGMRLVDRCVEPEELLNNAHATLDADYYINMNIIPPLERIFNLVGANVRTWYEEMPKVQVLRKVAEDEDADDDASKGPLLGLLGASPSKKGTAAAEAAAAAAELEMEDMLGEDGELLPPDVAAAQAQARKTLEAFLNTTICTACGVKIKRPLGVGLARELGMLEEGEGAVDRGLPLCHRCASDPPTLMVDMQAKVSRAEKSYVEIMKVCQSCAGFASSEEVPCDSKDCPVFYSRVKQRTKVTAVKRVMEPLIKLFGELELDKASSEDEGGDEEGNWDLEGRGEVVDESGVEMQEDAGVRYEEEKVRFETIVKGKVRAMSEELVERKEIIDNSYKSLKAASLEW

SEQ ID NO: 2719 - DNA, 5781 bp, Neurospora crassa
  CDS (1)..(5781)
atggaatttttaagacttcgattgaactgtattgatcactaccaagccacgccaaccagatatgatccccagtttgaccaagatgtgcgcttttcgcgttcgcggaaggccgccaaagtccctgtaattcgggtgtttggatcgaccgacaagggccagaaagtctgcgctcatattcatggtgcctttccctatctgtatgtcgagtatgacggaaatctagaacccaataaggatcatgcgttagctatcagctaccggaaagatcccattcgcgatcggcccaaatatgtagcacggatttcgctgacaaaaggtatacccttttatggcttccatgtgggttatcgcttctatctcaagatttacctgttcaacccggtggtcatgtcgcgtctcgtcgatctccttcagcaaggtgttattatgagtcggaaatttcaaccctacgaggcccatctgcagtatctccttcagttcatggctgattacaacctgtacggctgtaactacctggatgcggcgatggccacctttcgagcacctgtaccgaagcatgacagcaacattgaaggccgtgaggctgaacatcactgggacgatacaacgatcccgccagagctgattacggataattacagccttccccgggctagccactgctcccttgaagtggacatctgcgtcgaagacatcctgaatcgaaagcaagtcaaagagcgaaggcttcatcatgattttatcgaaaaggagcagccggtgtcaagccaagaaaagctggtgcacagcatggctggactctggacggatgagacaaaccgcaggaaaaagcgtatgggaataacggaccctgaagtcaacccttttcctccggaagtcttggtatcaatgtctgcggacccacgtcaatcacaggtgatggggtgggttcatgaagctgagtaccgtgctggtatccagcaattggttgctcaggaacagaacaacacagatggacgtcaggagactttctccagctttgtgcaaccagttccatttgaagaaactatcaagactactttagagtcagtggaagacttatacccagacaacttgagccaagctctgcaaatcgaagcacaattttttcacccgaatgcacagcatctcatcagtatcgatgtcgacgaacgaagcatttttctgctaacacgcgagccacttgcaaaacagactcgacacgaatacgcgggcagaatctcaccggaggagcctttgaatggtgttggagaaggatttggtgtgggggattcaatgacttatcgtgtggatgggcggatccgtgtataccaacccagaacttccatccgtcataaacttctgaagattgcccggacttactcttccaatcaaccagtcaatacaggtagacaagccggggttcttggtcctggagagcgacaacaaagatctctcaagcatcccaggccgccgggagaagttgatcatggtgcaccagcaaaacgtcaggtgctccaagctgaggactcgagggagttacttcacatgaaagccgaccctccgcaaagagctctggaaaaggctccgagaaacgtccatgaacaaactcaaggtgcaggtcagccagggcctcagagaaagctccagagtgaccctacggaaagggtttacgaggagccaaacaagagggttcacgaggaggctcaaccagaggtcgatcgaaaggcccagcaaaggtctcgggaacatgaccagaaacagggccaacagaaaatccaggaacaaactcaagatcatgatcagggaggaggccagaaggaagctccagaaaattcgacatttacgacgccagttcggacagtccagccaatgaaacccaacaatcaggattcagcaggagaggaacaatcgatgaatagtctacaggtcgagccaccaaaacctagaacatctcagcccatgaagtctgctatgaagcagagcttcgtacaagagtcccaaagccgtacgatcaactttcccgtcgtcaaagatccacaagatcccaacacaagggcgcgactgagccaaaagagtggttcgcagaagaacgagggcaacgtcaccagaaagcaatttgccttcgcccctcaacccaccattttggggccattggctcaggcgaggcccggtcagactaaacccaacctaaaatcgtcgtccaggccccttgacacggcccctgtggcttcggctccggcactcttgtggagtggctcaaagaaaatgtttgtcctgaacaataaacctccatccctgagcgaggtcagcggtaccatgcaggtacatggcctacctgatgtcatctatcaagacgcatattatagtaaggatgaggatgttccctccagaccgagagaatatgcaggccgggaataccgacttgacggtagctctgttccttggctccccgatttcgacccgactggcacatcttcggcgacatatggcgagaaaccaacctccggtgccgactggccgatgctggaggcaatctatgaggctcaacaagaggaatgtgccatgaggggttgggaaatagcagatcctcctccttctttcaaggaagtcagtgattggtggacagataaacaaaaagatcgcaatccaaaacgatgccatttcacacccctaaagagtaaaacctaccgctcccaagtcgcgggcgtgacgccacagaagaagcatggcttcgaacatcccgaaaagacaaaacctgaaagcgcacaggatcaggcacagtacatgagcgccatgagcctagaggtgcatgttaacacccggggcaagctagtaccggatcctgaagaagacgaagtgcagtgtgtgttttggtatctgcggtccgaagtaaacgctctcggcggaactcaggcaccggatgatacggcacggggcattgttgttttctcagaggacgatctgcttgcagatagaatccgaaagcacacatccgtgccggtggttcaagagacaacagaacttgatatgatggtccgcatggtcgagattgtgcggaaccatgatcccgatatcttcacgggatatgaggtgcatggcagttcatggggctaccttattgagcgagcgaggataaaatatgagctcgacctctgtgatgagttctcacgcatgaagtctcagtcaaatgggcgtatcggtaaggatgcggatcgctggggtttcaacacgacatcctcgattcgaattacaggacggcacatgatcaacatttggagagccatgagaggcgaactcaatcttctgcagtataccatggagaatgttgtttggcatctgctacaccgtcggattcctcattacagctggaagactttatcggattggtatctgagcgatcgaccgaaggatctggataaagttctccgatactacctgacgagaacgcgacttgatattgaaatcctggaaaagaacgagctcattcctaggacaagcgagcaagcaagactgcttggtgttgactttttttctgtcttctcaagaggatcgcagtttaaagtagagtccatcatgttcaggatagccaaacccgagaacttccttctcccttctccaagcagaaagcaagtgggtgcacaaaacgctctggagtgtctacccttagtgatggaaccgcagagtgcattctacagcagtcctttgctcgttcttgactttcagagtctgtatcccagtgtcatgatcgcctacaactactgctactcgaccttccttgggcgtatcgtcagctggcgaggtagaaacaaaatgggtttcatggactacaagaggcaagaggggcttcttagtctactcaaagattacatcaacatcgccccaaacggcatgatgtacacaaagcctcatattcgcaagtcacttcttgcaaagatgcttaccgagattctcgaaactcgtatcatggtcaagtccggtatgaagcaagacaaggatgatagggcgattcagcaactgctgaataaccggcagctggcgctgaagctcctcgccaacgtcacctacggttacacatcggcctcgttctcaggtcgtatgccctgctccgagattgccgacagcatcgtccaaaccggtcgcgaaacccttgagcgggccatagccttcattcatagcgtccaaaaatgggacgccgatgttgtctacggagacaccgacagtcttttcgtctctctcaagggccgcacccgcgaacaggcctttgagatcggccaagagatcgccgacgctgtcaccaagttgaatccgcggcccgtcaagctcaagttcgaaaaggtctaccacccatgcgtactcctcgccaaaaagcgctacgtcggctacaagtacgagagtcgggaccagaccgtgcccgtgttcgacgccaagggcatcgagacggtccggcgcgacggcacacccgccgagcaacggatcgaggagaaggcgctcaaaatcctctttgagactgccgatctcagccaggtcaagagttacttccaggagcagtgccacaagattatgcgcggcgccgtgtccgtgcaggatttttgcttcgcgcgtgaggtcaagctgggcacgtacagcacgtccggtcgcggcggcccggctcccgctggcgcgctcattgccaccaaaaagatgaaggaggacgcgcgggcggagccgcaatatggcgaacgggtgccatatgtggtgatggctggcgcgccggggatgaggctggtagatcggtgcgtggaaccggaggagctgttgaataacgcacatgctacgttggatgcggactactacattaacaagaacatcattccgccgctagagaggatcttcaacttggtcggcgcgaacgtgaggacttggtatgaggagatgcccaaggttcaagttttgcggaaggtggcggaggatgaagacgctgctgacgatgcttccaaaggcccactgctgggactgctaggggcgtcaccaagcaaaaagggtacggcagcggcagaagcagctgcagcagctgcagaactagagatggaagatatgttgggagaagacggcgagctcctccctcctgacgtcgcagctgcccaagcccaagcgcgcaagaccctcgaagccttcctcaataccaccatctgcacagcctgcggcgtcaagatcaagcggccgctcggggtagggcttgcgcgcgagctgggcatgcttgaggagggcgagggcgccgtggaccgaggcctgccgctctgtcaccggtgcgcttcggatccacccacgcttatggtcgacatgcaggccaaggtcaacagagccgagaaaagctacgtggagattatgaaggtgtgtcagagctgtgcgggctttgcgttatccgaggaggtgccctgcgatagcaaggattgccctgtcttttactcgagggtgaagcagaggacgaaggtaacggcggtaaagagggtgatggagccgttgatcaagttgtttggagagttggaattggataaggcgagtagtgaggatgagggtggcgacgaggagggtaattgggatctggaagggagaggtgaggtggttgacgaaagtggtgtagaaatgcaagaagacgcaagagtaaggtatgaggaggagaaagtgagattcgagaccattgtcaagggcaaggttagagccatgagtgaggagttggtggagaggaaagagattattgacaacagttataagagcctgaaggcggcatcgttggaatggtag

SEQ ID NO: 2720 - protein, 1926 aa, Neurospora crassa
MEFLRLRLNCIDHYQATPTRYDPQFDQDVRFSRSRKAAKVPVIRVFGSTDKGQKVCAHIHGAFPYLYVEYDGNLEPNKDHALAISYRKDPIRDRPKYVARISLTKGIPFYGFHVGYRFYLKIYLFNPVVMSRLVDLLQQGVIMSRKFQPYEAHLQYLLQFMADYNLYGCNYLDAAMATFRAPVPKHDSNIEGREAEHHWDDTTIPPELITDNYSLPRASHCSLEVDICVEDILNRKQVKERRLHHDFIEKEQPVSSQEKLVHSMAGLWTDETNRRKKRMGITDPEVNPFPPEVLVSMSADPRQSQVMGWVHEAEYRAGIQQLVAQEQNNTDGRQETFSSFVQPVPFEETIKTTLESVEDLYPDNLSQALQIEAQFFHPNAQHLISIDVDERSIFLLTREPLAKQTRHEYAGRISPEEPLNGVGEGFGVGDSMTYRVDGRIRVYQPRTSIRHKLLKIARTYSSNQPVNTGRQAGVLGPGERQQRSLKHPRPPGEVDHGAPAKRQVLQAEDSRELLHMKADPPQRALEKAPRNVHEQTQGAGQPGPQRKLQSDPTERVYEEPNKRVHEEAQPEVDRKAQQRSREHDQKQGQQKIQEQTQDHDQGGGQKEAPENSTFTTPVRTVQPMKPNNQDSAGEEQSMNSLQVEPPKPRTSQPMKSAMKQSFVQESQSRTINFPVVKDPQDPNTRARLSQKSGSQKNEGNVTRKQFAFAPQPTILGPLAQARPGQTKPNLKSSSRPLDTAPVASAPALLWSGSKKMFVLNNKPPSLSEVSGTMQVHGLPDVIYQDAYYSKDEDVPSRPREYAGREYRLDGSSVPWLPDFDPTGTSSATYGEKPTSGADWPMLEAIYEAQQEECAMRGWEIADPPPSFKEVSDWWTDKQKDRNPKRCHFTPLKSKTYRSQVAGVTPQKKHGFEHPEKTKPESAQDQAQYMSAMSLEVHVNTRGKLVPDPEEDEVQCVFWYLRSEVNALGGTQAPDDTARGIVVFSEDDLLADRIRKHTSVPVVQETTELDMMVRMVEIVRNHDPDIFTGYEVHGSSWGYLIERARIKYELDLCDEFSRMKSQSNGRIGKDADRWGFNTTSSIRITGRHMINIWRAMRGELNLLQYTMENVVWHLLHRRIPHYSWKTLSDWYLSDRPKDLDKVLRYYLTRTRLDIEILEKNELIPRTSEQARLLGVDFFSVFSRGSQFKVESIMFRIAKPENFLLPSPSRKQVGAQNALECLPLVMEPQSAFYSSPLLVLDFQSLYPSVMIAYNYCYSTFLGRIVSWRGRNKMGFMDYKRQEGLLSLLKDYINIAPNGMMYTKPHIRKSLLAKMLTEILETRIMVKSGMKQDKDDRAIQQLLNNRQLALKLLANVTYGYTSASFSGRMPCSEIADSIVQTGRETLERAIAFIHSVQKWDADVVYGDTDSLFVSLKGRTREQAFEIGQEIADAVTKLNPRPVKLKFEKVYHPCVLLAKKRYVGYKYESRDQTVPVFDAKGIETVRRDGTPAEQRIEEKALKILFETADLSQVKSYFQEQCHKIMRGAVSVQDFCFAREVKLGTYSTSGRGGPAPAGALIATKKMKEDARAEPQYGERVPYVVMAGAPGMRLVDRCVEPEELLNNAHATLDADYYINKNIIPPLERIFNLVGANVRTWYEEMPKVQVLRKVAEDEDAADDASKGPLLGLLGASPSKKGTAAAEAAAAAAELEMEDMLGEDGELLPPDVAAAQAQARKTLEAFLNTTICTACGVKIKRPLGVGLARELGMLEEGEGAVDRGLPLCHRCASDPPTLMVDMQAKVNRAEKSYVEIMKVCQSCAGFALSEEVPCDSKDCPVFYSRVKQRTKVTAVKRVMEPLIKLFGELELDKASSEDEGGDEEGNWDLEGRGEVVDESGVEMQEDARVRYEEEKVRFETIVKGKVRAMSEELVERKEIIDNSYKSLKAASLEW

SEQ ID NO: 2721 - DNA, 5616 bp, Arabidopsis thaliana
  CDS (1)..(5616)
atggctgattctcaatccggttccaatgttttcagtttacggatagtttcaatcgattattacatggcttctccaatccctggttataatatttgctacagtagcttccaaggtagtgaggtaaatgaagtccctgttataaggatatacggctctacacctgctggtcagaagacttgcttgcacattcatcgtgctttaccatatctctatattccgtgctcagaaattccacttgagcatcataaaggagtggatggaagtacacttgctttatcccttgagttagagaaggctctaaagcttaagggaaatgctgcttcaaaaaggcaacatatccatgattgtgagattgtaagagcaaagaagttttatgggtaccactcaacagaggaggcttttgtgaagatttatctgtatccttatagtagctaccatccacccgatgtggctcgtgctgccagtcttcttctggcaggtgctgttcttggtaaaagtttgcagccttacgagtctcatattccctttattctccagtttctggttgattataatttgtatggaatgggtcatgtgcatatatcaaagatgaagttccgtagcccagtgcctcaccatttccggccaaggagatttgatttggatgattgtccgggacaaaggattgacgaagtggctattacaaaggcaaattcaagtgctgctgcaagcgtcagttttcctgtttggagcttgtcaacaatcccaggtcagtggatgtggaatctctctgaagaatctgatacaccgttgagccagagccagcataggcaccaacaccattacagacgtcagagtctctgtgaacttgagggagatgctactagtagtgatattctcaatcaacagtttaaaatgtacaactccctttcacaagcccagtctgatactaacatggttcagtcgcttgtggcaatttgggaggaggagtatgaaaggactggtgtgcatgatgcacctatacctcctgatcctggtaaaccctctgcagctgatgtgttgcagactatgtcagattatgttgggtttgggaatatgcttaaagaaatgctaaacaaagttgaattgtctccgcctggtatgaagcctactgcagtatcttcagctggtccagatatgcatgccaaacctgaaattactgatctacaggctttgaatcatatggttggtacatgcagtgagtttcctgcatcagaacagctttctccacttggcgagaagagtgaagaagcatcaatggaaaatgatgaatatatgaaaacacccacggacagagatacacctgctcaaatacaagatgctgaagccttgggtctctttaagtggtttgcctcatctcaggctgcagaggacataaactcagatgatgagattctccgggaaactatccttagtcctcttttgcctttagcgtctattaacaaggttcttgaaatggctagtacagattatgtgagccaatcccaaaaggaatgtcaagacattcttgattctcaggaaaatcttccagactttgggagttcgactaagagagctttacctagtaatcctgatagccagaatcttagaacttcatccgacaaacaatctcttgaaatagaagtcgctagtgatgttccagatagctccacttcaaatggagcaagcgaaaattcattccggagatacagaaagagtgatttacatacgagtgaagtaatggagtataagaacaggagcttctctaagagcaacaagcctagcaactcagtatggggacctttaccttttacactgaccaaaaatcttcagaaggactttgacagtacaaatgctagtgataaacttggtttaacaaagattagttcttaccccatgaatgagatgacagacaattatattgttccagtcaaagaacatcaagcagatgtttgtaatacaattgacagaaacgttttggctggatgttctctgcgggacttgatgagaaaaaaacggttatgccatggagaatcgcctgtttcacagcatatgaagtctaggaaggttagagattcccgacacggggaaaaaaatgagtgcaccttgagatgtgaggccaaaaaacaaggtcctgctctttctgcagaatttagcgaatttgtttgtggcgatactccaaatttatctcctatagattctggaaattgcgagtgtaatatatccactgagtcatctgaacttcattctgttgatagatgttcagctaaagagacagcaagtcaaaacagtgatgaagttttaaggaatttgtcatctaccactgttccatttggtaaggatccacaaactgtggaatcaggaacactagtgtctagcaatatacatgttgggattgaaatagatagtgtccaaaaatcggggagggagcaagagtcaactgccaatgaaactgatgagacgggaagattaatatgcctaaccttaagcaagaagcctccttctctcgattgcctaagtgctggactgcaggattctgcacattctcatgaaattcatgccagggaaaaacagcatgatgaatatgagggaaattccaacgacatcccgttttttcccttggaggacaacaaggaggaaaagaaacactttttccaaggaacttcccttggtattcccttgcatcatctcaatgacggctccaatctttacctactgacccctgccttttcacccccttctgtggattctgttttacaatggatatcgaatgacaaaggagactctaatattgattcagaaaaacaaccattacgagataatcataatgatcgtggagcaagtttcactgatcttgcttctgcatctaatgtggtgtctgtgtctgagcacgtggagcagcataataacctttttgtgaattcagaatcaaatgcttatacagagtcggagatagatctgaaacccaaaggaacgtttcttaatcttaacttgcaggccagtgtttcccaagagctgtctcagatttcaggccctgatgggaaatctgggcccactcccttaagtcaaatgggattccgagatcctgcgagcatgggtgcggggcaacagcttacaattctgagtatagaggttcatgcagagtctagaggggacctgcgacctgatccacgatttgattctgtcaatgttatagctctcgtcgtgcagaatgacgatagttttgtagctgaagtatttgtgcttttatttagtccagatagcattgatcagagaaatgttgatggcctatctggatgcaagttgtctgtattccttgaagagaggcaactattcagatattttattgagactttatgtaaatgggatccagatgttcttctgggctgggatatacagggcggatccattggttttctagctgaaagagctgcacagcttggtataagatttctcaataatatatctaggacgccatctccgaccacaacaaacaattcagataataagagaaaacttggtaataatctgctgccagatccgttggtagctaatcctgctcaagtagaagaagtggtaattgaggacgagtggggccgcacacatgctagtggtgttcatgttggaggtagaattgttctcaatgcatggcgtttgattcgcggggaagttaaactcaacatgtacacgattgaagctgtgtcagaggctgttttgaggcagaaggttccatcaatcccctataaggtattgacagaatggttttcaagtggtcctgcgggtgcaagatatagatgcatagaatatgtgattcggcgagcaaatttgaaccttgagataatgagccaacttgacatgataaatcgtacgtcagaacttgctcgtgtttttggtatagactttttctcagttctctcccgaggttcacagtacagagtggaatccatgcttctgagattagcacatacacaaaattatcttgctatttctccaggaaaccaacaggttgcctctcagccagctatggaatgtgtacctcttgtgatggaaccagaatctgccttttacgatgatcctgttattgtgttggattttcaatctctttacccttcaatgattatagcatataatctgtgcttttctacatgtctcggaaaacttgcacatttgaagatgaacacccttggggtcagctcatactctctagacctcgatgttcttcaggatttaaatcagatcctacagaccccaaacagtgtgatgtacgtgccaccagaggtgcgtagaggaattttacctaggctgctagaggagattctgtctacaagaataatggtgaaaaaagcaatgaaaaagttgactccttcagaagcagttcttcaccggatatttaatgcgaggcagcttgctttaaagctgatagcaaatgtgacttatggttatactgctgctggcttcagtggtcgaatgccttgtgcagagctggcagatagtattgtccagtgtggtcgtagcacacttgagaaggctatttcattcgtcaatgccaatgataattggaacgctagagttgtatatggtgacactgatagtatgtttgtcctcctaaaaggacgaactgtaaaagaagcttttgtagtcggacaagagattgcatctgcaataactgaaatgaacccacacccagtcactttaaagatggagaaagtctatcacccttgtttccttcttacgaagaagcgttatgttgggtacagttatgaaagtcccaatcagagagagcctatatttgatgcaaaaggtattgaaactgttcgaagagacacttgtgaagctgttgcgaaaactatggagcaatcgttgagactcttttttgaacagaagaacatctctaaggttaagtcgtacttgtatagacagtggaagcggatactatcagggagagtgtctcttcaagattttatctttgcaaaagaagttcggttgggtacttacagcacaagagactcttcactccttcctccagcagctattgtggcaaccaaatcaatgaaagcagaccctcggacagagccacgctatgctgaacgagtgccttatgttgtgattcatggggagccaggagctcgacttgttgatatggttgttgatccactggttcttttggacgtcgatacaccctaccgactgaatgacttatactacatcaacaaacaaattataccagctttgcaaagggtatttggactcgtgggtgcagacttaaaccagtggtttttggagatgccccgtctcaccagaagctcccttggtcaacgtcccttaaactctaaaaactcacacaaaacaaggattgattatttttatctatcgaaacattgcatcttgtgtggggaagttgttcaagaatctgctcaactatgcaaccggtgccttcaaaataaaagtgctgctgctgcaaccattgtttggaagacttcaaagttggagagagagatgcaacacctagccacggtaagtactccaaaatctaacgtttatgaactgttacagaacttggtaacgtttacaaccatcatcttactgtctttactttccaagagatcgtgtgcttcatag

SEQ ID NO: 2722 - protein, 1871 aa, Arabidopsis thaliana
MADSQSGSNVFSLRIVSIDYYMASPIPGYNICYSSFQGSEVNEVPVIRIYGSTPAGQKTCLHIHRALPYLYIPCSEIPLEHHKGVDGSTLALSLELEKALKLKGNAASKRQHIHDCEIVRAKKFYGYHSTEEAFVKIYLYPYSSYHPPDVARAASLLLAGAVLGKSLQPYESHIPFILQFLVDYNLYGMGHVHISKMKFRSPVPHHFRPRRFDLDDCPGQRIDEVAITKANSSAAASVSFPVWSLSTIPGQWMWNLSEESDTPLSQSQHRHQHHYRRQSLCELEGDATSSDILNQQFKMYNSLSQAQSDTNMVQSLVAIWEEEYERTGVHDAPIPPDPGKPSAADVLQTMSDYVGFGNMLKEMLNKVELSPPGMKPTAVSSAGPDMHAKPEITDLQALNHMVGTCSEFPASEQLSPLGEKSEEASMENDEYMKTPTDRDTPAQIQDAEALGLFKWFASSQAAEDINSDDEILRETILSPLLPLASINKVLEMASTDYVSQSQKECQDILDSQENLPDFGSSTKRALPSNPDSQNLRTSSDKQSLEIEVASDVPDSSTSNGASENSFRRYRKSDLHTSEVMEYKNRSFSKSNKPSNSVWGPLPFTLTKNLQKDFDSTNASDKLGLTKISSYPMNEMTDNYIVPVKEHQADVCNTIDRNVLAGCSLRDLMRKKRLCHGESPVSQHMKSRKVRDSRHGEKNECTLRCEAKKQGPALSAEFSEFVCGDTPNLSPIDSGNCECNISTESSELHSVDRCSAKETASQNSDEVLRNLSSTTVPFGKDPQTVESGTLVSSNIHVGIEIDSVQKSGREQESTANETDETGRLICLTLSKKPPSLDCLSAGLQDSAHSHEIHAREKQHDEYEGNSNDIPFFPLEDNKEEKKHFFQGTSLGIPLHHLNDGSNLYLLTPAFSPPSVDSVLQWISNDKGDSNIDSEKQPLRDNHNDRGASFTDLASASNVVSVSEHVEQHNNLFVNSESNAYTESEIDLKPKGTFLNLNLQASVSQELSQISGPDGKSGPTPLSQMGFRDPASMGAGQQLTILSIEVHAESRGDLRPDPRFDSVNVIALVVQNDDSFVAEVFVLLFSPDSIDQRNVDGLSGCKLSVFLEERQLFRYFIETLCKWDPDVLLGWDIQGGSIGFLAERAAQLGIRFLNNISRTPSPTTTNNSDNKRKLGNNLLPDPLVANPAQVEEVVIEDEWGRTHASGVHVGGRIVLNAWRLIRGEVKLNMYTIEAVSEAVLRQKVPSIPYKVLTEWFSSGPAGARYRCIEYVIRRANLNLEIMSQLDMINRTSELARVFGIDFFSVLSRGSQYRVESMLLRLAHTQNYLAISPGNQQVASQPAMECVPLVMEPESAFYDDPVIVLDFQSLYPSMIIAYNLCFSTCLGKLAHLKMNTLGVSSYSLDLDVLQDLNQILQTPNSVMYVPPEVRRGILPRLLEEILSTRIMVKKAMKKLTPSEAVLHRIFNARQLALKLIANVTYGYTAAGFSGRMPCAELADSIVQCGRSTLEKAISFVNANDNWNARVVYGDTDSMFVLLKGRTVKEAFVVGQEIASAITEMNPHPVTLKMEKVYHPCFLLTKKRYVGYSYESPNQREPIFDAKGIETVRRDTCEAVAKTMEQSLRLFFEQKNISKVKSYLYRQWKRILSGRVSLQDFIFAKEVRLGTYSTRDSSLLPPAAIVATKSMKADPRTEPRYAERVPYVVIHGEPGARLVDMVVDPLVLLDVDTPYRLNDLYYINKQIIPALQRVFGLVGADLNQWFLEMPRLTRSSLGQRPLNSKNSHKTRIDYFYLSKHCILCGEVVQESAQLCNRCLQNKSAAAATIVWKTSKLEREMQHLATVSTPKSNVYELLQNLVTFTTIILLSLLSKRSCAS

SEQ ID NO: 2723 - DNA, 6393 bp, Drosophila melanogaster
  CDS (1)..(6393)
atggcagccgcaggagaggcaatcgatggagtctactccgtccggctggtcatcgcggatttctatatggagaagccgcagttcggaatggatccgtgctattcggagctgcgcggcaaagaaatcaagcgggtgccagtgattcgagtgtttggcggcaactccagaggccagaagacctgcatgcatgtacacggagttttcccctatctatacattccgtatgacaagaaggattttgagtccctggagcggggcatcctgcagatggccgtgcacctggacaaggccatcaacatatccttgggtcaaggcagctccaacgcccagcatgtgttcaaaattcagctggtcaagggcatacccttctatggctaccatcgagtggaacaccagttcctcaagatctacatgttcaatccccggttcgtacgccgcgccgccaaccttctccaaagcggcgccattctgagcaagaacttcagtccgcacgagtcgcatgtgccctacattctgcagtttatgatcgactacaatctgtacggtatgagctatgtgcatgtcccgctggaggttctcaagttccggcgcaaccatgacgatgacgtaatcccctatgcaaatgtcaagcaagcgcagcttctggacatcacaaccgctaagaaagtggcctgcagtgctttagaggtggatgtcagctcgaacttcatactgaatcggttccagctggtggcgaagagtaagagcaaccacactaaccccggcatcgaggccatctggaatgatgagaaattgcgccgacagaaacttgtcgagaagcacaccgatgctggcgatgaggagaaggctgaagcggtgccagtattggagttaccgccaacacaggagcggcatcaaattgaaatcgccgaaagcgatatcttctaccgcaccgctctggagagcaagctgatgacactggagcagtccacactgtccgagcaaacgttgtcggatcagacaatccttccccaagtaaccatgcagaccaccatgcccggcacaaaggcacagaaacgcaggtttaacttgcaaaaacttctagccaacgccgtttatccggaggaatgctcacaagatcagcagcaactgctggttaatgcttccttcatacaaaaccatgttacctgcggctacagcaacagtgtcagtttgtcaacctccaaggatgagtccgatgacttggacgaaactgtagtggatgaggaactaatactgagcctcacacagcctcatggagcgataccccatgatgccaccttgagggaggaggatttggaacttttggacgcgttgcagctgttggaggagcagaatgaaagtgaatcgcatgtggacttagacagttcgttggctccattgtcgcaacataaaaagttcgaacttacacccgaattgttggacaaggagaccgcagctactgctgctcttttcgacgaagatgttgactccgacgaggatgccgaccaagaaacccgacatgacttctctaccgtcctagacgatgtcgatgagttgttgcttaagttaacacaaagtcagcctgcggaatcgaaggaactgaaagtatctagtaaactgccccaaattgatggtgctgatgatcgcctacaaaggacccccattaaatcgatcagctctaagtcaaagtcgagtccttcaaagactccaacaacgccaataggtcagaaaagccttcccaaatcgccacatactccgaaaaccagtgcagccaagaaatatgcgccgctggctttgacaattggaagcagttcatcaaagaaaagcaacgatgaattcgcagggagaccatctaatccacgcctcagtttgcagctagaccaaggaaccggaacgggaacacttcggccagaaatctcattgcgcaagaaactagccatgtcggagatgcgacggaaaagtttcgaggacagttttgtgctcttaaagaacgattgtactccagttaggagtaccagacgatcaactcgcaatctggacaaaacacacattatttgttcccttacgccgagggacagaaatcctggcttgagcgacatgttcgaaacagaggacggcaagcaattaccaccaaagaaagtagtaagaaagacgcgatggagcactcggaatcaagatatagaaagtctacccaaggccggttgtgagatagagagaccccacaggtcagaaggaagtgccttggatgagctgaagccgcgtcgcagtgctcgccataaggttaattcggcaaatccagatgagtgttccagcgaaatacaaacaactgggccacgagtgacgactacaagtttggatagacctcaaaagaaagccagactatcccaaagtcccaaagaaaatactaaaacaagcatgaatggaactgttgcattggaaaaagcaacaaaagatagttcatctaactcagagagtccgcatcagcaggaaaactctgtttctgaacaaatcgaatatctcgaaagtaaaccaaaaaagtctgatgaaactgcacgaagccgtgacgaaaagttacaacgtgagctaattccacaggaaccagctggtatttcgcctggagattcagcaaactccacggaggagatcacatttagtccaagccatgatgaggctatcgaatccgacacggaaagcgattatatagtcaccaaacttcgtaaaacacccaacttgaaacgtcttcgatggagcattcggtcggagttgctgaacaaacaatttactcccagttcaggcataagaccccctgagactgagaccactcctcagctaagtcccaaaagcaatgagagcaacacaccggagctgatgcgaagtttctatgagcattcgctgattgtgaacagtccgtcggtcttcagtgacttcttggatagccccgagatacatatggattctcctaggtctgctcctccatctcccgatagcaactcgtttgtgattgcccccttggagctgcctccatcctacgatgaggtggttagcggtagccgtaaaatgggcatacccgagtacgagttccaaaagccctactacagcaatccctccgatgtgagcaaggtgacggaggtgggcttcctggtgctccacattccggggaacaagctaaatgactgtgatcccttccagagcatactgggcaatgatcgtggcctggcctcctggcgtcgtcggcaactgatagccattggtggcctggcaatgttgcagcgacatcggggagaacaaaaagtacgggagtatttcagcacgcaacaaagaatagcaatcgagccagcacaactagcacccacctggcaggaagccaagatctggttgaaagccaaggaactccttcgtcaacgagaggaaccaaaaaagtcctctgatgacatagacagccccatcaagatcaagcggcagaagatcactatgatgctgcaggctgaggaaggcgatggcggaagtggcgatgaagatgctggtgatgaactcgattgcagtctaagcctaacgcccttgtcccaagctaaggataaatgcaaggcaacccctaccagtagcaaagccagagaaagaggaaagagtcgccttaagcccggaactaggctcagcttcataggaagccaggacgaggaaccaccaagctcgcagtccagcgaacagagcgtcttcagtagtgcggcccaggcggagctagatcgtagttcctttctgcgccagttagagggcagtagccaggataggcagcacgatctcagctttggacttagccacgctaccttggacaacacgttcgggttcaaggttaatttggagaatctgcaacaggccaaagccgacattgattgcaaccacctgacaatcataacgttagaggtgtttgtgtccacgcgaggtgatctccaaccagatccgatgcacgacgagattcggtgtttgttttatgctatcgaacacagtttgccggatgaaaagctgcctagcaaagcctgcggctatataatggtgaacactgtccaggatttgctaagtgaaggaccttttcatggtatagatcgcgatattgaggtgcaagtagtgaccagtgaagcggaggcatttgaggcgttgctggctttgtgtgaacggtgggatgcggacatatacgcagggtacgaaatcgagatgtcctcttggggctatgtgattgatcgggccaagcatctgtgcttcaacatcgctcctctgctgtcccgagtgcccacacagaaggtccgggactttgtggacgaggatcgggagcagttcaccgatttggatgtggaaatgaagctttgcggccgcattctgctggacgtatggcgcctgatgcgctccgagattgcactgacgtcgtacaccttcgaaaacgtaatgtaccacattttgcataagagatgtccctggcacactgccaaatccctcaccgaatggttcggctcaccctgcacccgctggatagtaatggaatattacttggagcgtgtgcgtggcaccttaactctcctggagcagctggacttactgggacggactagcgaaatggccaagctcattggcattcagttctacgaggtgctgtcgcgcggctcacagtttcgcgtggaaagcatgatgctgagaatcgccaagccaaagaacctggtgccactttcacccagcgtccaggctcgcgctcatatgagagctcccgagtacttggcgctaataatggaaccgcagtcacgattctatgccgatcccctaatcgtgcttgattttcagagcttgcaccccagcatgatcatcgcctacaactactgcttctccacgtgcttgggtagagtagagcacctgggtggaagttcgccctttgaatttggcgcgtcgcagctccgagtttcgcggcagatgctgcagaagttgctggagcacgatctggttactgtttcgccatgcggcgttgtgttcgtgaagcgtgaagtgcgcgagggcatcctgccgcgcatgctcaccgagatcttggacacgcgccaaatggtcaaacagtcgatgaagctccataaggacagctctgcacttcagcggatccttcactcacggcagctgggccttaagctgatggccaatgttacctatggctacaccgccgctaacttcagtggccgaatgccttcagtggaagtgggcgattctgtagtttccaaaggacgggagaccctggagcgtgctatcaaactagtggagaacaacgaggagtggaaggtgcgtgtcgtctatggcgacacggactccatgttcgttcttgtgccgggtcgaaatcgagctgaagcttttcgaatcggcgaggagatcgccaaggcggtcaccgaaatgaatccacagccagtgaagctaaaactggagaaggtctaccaaccttgcatgctgcagaccaagaagcgctacgtgggttacatgtatgagacagccgatcaggagcagcccgtttacgaggcgaagggcatagaaactgagcggcgagatggttgtccggcggtggccaagatgctggaaaaggtgctgcgcatattgttcgagacgcaagacgtcagcaagatcaaggcgtacgtgtgccggcagttcaccaagctgctgtcgggcagggccaatctgcaggacctgattttcgccaaggagttcaggggtctcaatggctacaagcccacggcttgtgtgccagcactggagctcacgcgtaaatggatgcaaaaagacccacgacatgtgccgcgtcgtggcgaacgcgtccccttcataatagtcaacggcccgccgggcatgcagctaatccgcctggtgcgcagcccgcacgacatcctggccaacgagggtcacaagataaacgccatctactacattaccaaggcgattattccgccgctgaatcgctgcctgctgctcataggcgccaatgtgcacgactggtttgccagtctgccgaggaagttgctcatgacgccggctgttggaaccgccaacgaattggcgggtccacgcggtgccaagtccaccatctcccagtatttctctaccaccagctgcgtgatcgactgtggccgccaaaccaaggcgggcatttgcccagactgcctgaaaaacgccaccacgtgcgtagttgtgctctcagataagacagcgcgtctggagaggggctaccaactaactcggcagatatgccaggcttgttgcggacgcctgggtagcctacagtgtgattccctcgactgcccagtgctgtatgtcttggagggaaagcgaagggaactccagcaaatcgagcactggaacaaactccttgaacaccacttctaa

SEQ ID NO: 2724 - protein, 2130 aa, Drosophila melanogaster
MAAAGEAIDGVYSVRLVIADFYMEKPQFGMDPCYSELRGKEIKRVPVIRVFGGNSRGQKTCMHVHGVFPYLYIPYDKKDFESLERGILQMAVHLDKAINISLGQGSSNAQHVFKIQLVKGIPFYGYHRVEHQFLKIYMFNPRFVRRAANLLQSGAILSKNFSPHESHVPYILQFMIDYNLYGMSYVHVPLEVLKFRRNHDDDVIPYANVKQAQLLDITTAKKVACSALEVDVSSNFILNRFQLVAKSKSNHTNPGIEAIWNDEKLRRQKLVEKHTDAGDEEKAEAVPVLELPPTQERHQIEIAESDIFYRTALESKLMTLEQSTLSEQTLSDQTILPQVTMQTTMPGTKAQKRRFNLQKLLANAVYPEECSQDQQQLLVNASFIQNHVTCGYSNSVSLSTSKDESDDLDETVVDEELILSLTQPHGAIPHDATLREEDLELLDALQLLEEQNESESHVDLDSSLAPLSQHKKFELTPELLDKETAATAALFDEDVDSDEDADQETRHDFSTVLDDVDELLLKLTQSQPAESKELKVSSKLPQIDGADDRLQRTPIKSISSKSKSSPSKTPTTPIGQKSLPKSPHTPKTSAAKKYAPLALTIGSSSSKKSNDEFAGRPSNPRLSLQLDQGTGTGTLRPEISLRKKLAMSEMRRKSFEDSFVLLKNDCTPVRSTRRSTRNLDKTHIICSLTPRDRNPGLSDMFETEDGKQLPPKKVVRKTRWSTRNQDIESLPKAGCEIERPHRSEGSALDELKPRRSARHKVNSANPDECSSEIQTTGPRVTTTSLDRPQKKARLSQSPKENTKTSMNGTVALEKATKDSSSNSESPHQQENSVSEQIEYLESKPKKSDETARSRDEKLQRELIPQEPAGISPGDSANSTEEITFSPSHDEAIESDTESDYIVTKLRKTPNLKRLRWSIRSELLNKQFTPSSGIRPPETETTPQLSPKSNESNTPELMRSFYEHSLIVNSPSVFSDFLDSPEIHMDSPRSAPPSPDSNSFVIAPLELPPSYDEVVSGSRKMGIPEYEFQKPYYSNPSDVSKVTEVGFLVLHIPGNKLNDCDPFQSILGNDRGLASWRRRQLIAIGGLAMLQRHRGEQKVREYFSTQQRIAIEPAQLAPTWQEAKIWLKAKELLRQREEPKKSSDDIDSPIKIKRQKITMMLQAEEGDGGSGDEDAGDELDCSLSLTPLSQAKDKCKATPTSSKARERGKSRLKPGTRLSFIGSQDEEPPSSQSSEQSVFSSAAQAELDRSSFLRQLEGSSQDRQHDLSFGLSHATLDNTFGFKVNLENLQQAKADIDCNHLTIITLEVFVSTRGDLQPDPMHDEIRCLFYAIEHSLPDEKLPSKACGYIMVNTVQDLLSEGPFHGIDRDIEVQVVTSEAEAFEALLALCERWDADIYAGYEIEMSSWGYVIDRAKHLCFNIAPLLSRVPTQKVRDFVDEDREQFTDLDVEMKLCGRILLDVWRLMRSEIALTSYTFENVMYHILHKRCPWHTAKSLTEWFGSPCTRWIVMEYYLERVRGTLTLLEQLDLLGRTSEMAKLIGIQFYEVLSRGSQFRVESMMLRIAKPKNLVPLSPSVQARAHMRAPEYLALIMEPQSRFYADPLIVLDFQSLHPSMIIAYNYCFSTCLGRVEHLGGSSPFEFGASQLRVSRQMLQKLLEHDLVTVSPCGVVFVKREVREGILPRMLTEILDTRQMVKQSMKLHKDSSALQRILHSRQLGLKLMANVTYGYTAANFSGRMPSVEVGDSVVSKGRETLERAIKLVENNEEWKVRVVYGDTDSMFVLVPGRNRAEAFRIGEEIAKAVTEMNPQPVKLKLEKVYQPCMLQTKKRYVGYMYETADQEQPVYEAKGIETERRDGCPAVAKMLEKVLRILFETQDVSKIKAYVCRQFTKLLSGRANLQDLIFAKEFRGLNGYKPTACVPALELTRKWMQKDPRHVPRRGERVPFIIVNGPPGMQLIRLVRSPHDILANEGHKINAIYYITKAIIPPLNRCLLLIGANVHDWFASLPRKLLMTPAVGTANELAGPRGAKSTISQYFSTTSCVIDCGRQTKAGICPDCLKNATTCVVVLSDKTARLERGYQLTRQICQACCGRLGSLQCDSLDCPVLYVLEGKRRELQQIEHWNKLLEHHF

SEQ ID NO: 2725 - DNA, 22 bp, Artificial sequence
  primer
atgtcgagggagtcgaacgaca

SEQ ID NO: 2726 - DNA, 27 bp, Artificial sequence
  primer
ttaccaatcatttagagatattaatgc

SEQ ID NO: 2727 - protein, 2379 aa, Artificial sequence
  consensus sequence
  Variant (2)..(2): Xaa in position 2 is any amino acid
  Variant (4)..(6): Xaa in position 4 to 6 is any amino acid
  Variant (8)..(19): Xaa in position 8 to 19 is any amino acid
  Variant (20)..(32): Xaa in position 20 to 32 is any or no amino acid
  Variant (38)..(38): Xaa in position 38 is any amino acid
  Variant (41)..(44): Xaa in position 41 to 44 is any amino acid
  Variant (46)..(48): Xaa in position 46 to 48 is any amino acid
  Variant (49)..(74): Xaa in position 49 to 74 is any or no amino acid
  Variant (76)..(76): Xaa in position 76 is any amino acid
  Variant (78)..(78): Xaa in position 78 is any amino acid
  Variant (80)..(82): Xaa in position 80 to 82 is any amino acid
  Variant (85)..(123): Xaa in position 85 to 123 is any amino acid
  Variant (124)..(162): Xaa in position 124 to 162 is any or no amino acid
  Variant (165)..(165): Xaa in position 165 is any amino acid
  Variant (170)..(170): Xaa in position 170 is any amino acid
  Variant (172)..(175): Xaa in position 172 to 175 is any amino acid
  Variant (176)..(178): Xaa in position 176 to 178 is any or no amino acid
  Variant (181)..(183): Xaa in position 181 to 183 is any amino acid
  Variant (184)..(189): Xaa in position 184 to 189 is any or no amino acid
  Variant (191)..(194): Xaa in position 191 to 194 is any amino acid
  Variant (196)..(198): Xaa in position 196 to 198 is any amino acid
  Variant (201)..(202): Xaa in position 201 to 202 is any amino acid
  Variant (204)..(213): Xaa in position 204 to 213 is any amino acid
  Variant (214)..(227): Xaa in position 214 to 227 is any or no amino acid
  Variant (229)..(229): Xaa in position 229 is any amino acid
  Variant (231)..(234): Xaa in position 231 to 234 is any amino acid
  Variant (238)..(239): Xaa in position 238 to 239 is any amino acid
  Variant (244)..(244): Xaa in position 244 is any amino acid
  Variant (246)..(254): Xaa in position 246 to 254 is any amino acid
  Variant (255)..(256): Xaa in position 255 to 256 is any or no amino acid
  Variant (258)..(267): Xaa in position 258 to 267 is any amino acid
  Variant (268)..(306): Xaa in position 268 to 306 is any or no amino acid
  Variant (308)..(308): Xaa in position 308 is any amino acid
  Variant (310)..(314): Xaa in position 310 to 314 is any amino acid
  Variant (316)..(316): Xaa in position 316 is any amino acid
  Variant (318)..(333): Xaa in position 318 to 333 is any amino acid
  Variant (334)..(521): Xaa in position 334 to 521 is any or no amino acid
  Variant (523)..(525): Xaa in position 523 to 525 is any amino acid
  Variant (527)..(556): Xaa in position 527 to 556 is any amino acid
  Variant (557)..(602): Xaa in position 557 to 602 is any or no amino acid
  Variant (604)..(735): Xaa in position 604 to 735 is any amino acid
  Variant (736)..(1208): Xaa in position 736 to 1208 is any or no amino acid
  Variant (1210)..(1234): Xaa in position 1210 to 1234 is any amino acid
  Variant (1235)..(1276): Xaa in position 1235 to 1276 is any or no amino acid
  Variant (1278)..(1278): Xaa in position 1278 is any amino acid
  Variant (1280)..(1378): Xaa in position 1280 to 1378 is any amino acid
  Variant (1379)..(1436): Xaa in position 1379 to 1436 is any or no amino acid
  Variant (1438)..(1442): Xaa in position 1438 to 1442 is any amino acid
  Variant (1445)..(1445): Xaa in position 1445 is any amino acid
  Variant (1447)..(1447): Xaa in position 1447 is any amino acid
  Variant (1451)..(1452): Xaa in position 1451 to 1452 is any amino acid
  Variant (1454)..(1492): Xaa in position 1454 to 1492 is any amino acid
  Variant (1493)..(1513): Xaa in position 1493 to 1513 is any or no amino acid
  Variant (1515)..(1528): Xaa in position 1515 to 1528 is any amino acid
  Variant (1533)..(1534): Xaa in position 1533 to 1534 is any amino acid
  Variant (1536)..(1536): Xaa in position 1536 is any amino acid
  Variant (1538)..(1541): Xaa in position 1538 to 1541 is any amino acid
  Variant (1546)..(1548): Xaa in position 1546 to 1548 is any amino acid
  Variant (1551)..(1559): Xaa in position 1551 to 1559 is any amino acid
  Variant (1560)..(1562): Xaa in position 1560 to 1562 is any or no amino acid
  Variant (1565)..(1574): Xaa in position 1565 to 1574 is any amino acid
  Variant (1575)..(1602): Xaa in position 1575 to 1602 is any or no amino acid
  Variant (1604)..(1610): Xaa in position 1604 to 1610 is any amino acid
  Variant (1611)..(1614): Xaa in position 1611 to 1614 is any or no amino acid
  Variant (1616)..(1620): Xaa in position 1616 to 1620 is any amino acid
  Variant (1623)..(1625): Xaa in position 1623 to 1625 is any amino acid
  Variant (1627)..(1627): Xaa in position 1627 is any amino acid
  Variant (1630)..(1631): Xaa in position 1630 to 1631 is any amino acid
  Variant (1633)..(1633): Xaa in position 1633 is any amino acid
  Variant (1635)..(1636): Xaa in position 1635 to 1636 is any amino acid
  Variant (1638)..(1639): Xaa in position 1638 to 1639 is any amino acid
  Variant (1642)..(1642): Xaa in position 1642 is any amino acid
  Variant (1644)..(1644): Xaa in position 1644 is any amino acid
  Variant (1646)..(1649): Xaa in position 1646 to 1649 is any amino acid
  Variant (1651)..(1652): Xaa in position 1651 to 1652 is any amino acid
  Variant (1653)..(1654): Xaa in position 1653 to 1654 is any or no amino acid
  Variant (1656)..(1661): Xaa in position 1656 to 1661 is any amino acid
  Variant (1663)..(1667): Xaa in position 1663 to 1667 is any amino acid
  Variant (1669)..(1677): Xaa in position 1669 to 1677 is any amino acid
  Variant (1678)..(1680): Xaa in position 1678 to 1680 is any or no amino acid
  Variant (1682)..(1684): Xaa in position 1682 to 1684 is any amino acid
  Variant (1686)..(1692): Xaa in position 1686 to 1692 is any amino acid
  Variant (1694)..(1700): Xaa in position 1694 to 1700 is any amino acid
  Variant (1703)..(1703): Xaa in position 1703 is any amino acid
  Variant (1705)..(1705): Xaa in position 1705 is any amino acid
  Variant (1708)..(1709): Xaa in position 1708 to 1709 is any amino acid
  Variant (1711)..(1711): Xaa in position 1711 is any amino acid
  Variant (1714)..(1714): Xaa in position 1714 is any amino acid
  Variant (1717)..(1717): Xaa in position 1717 is any amino acid
  Variant (1723)..(1724): Xaa in position 1723 to 1724 is any amino acid
  Variant (1728)..(1730): Xaa in position 1728 to 1730 is any amino acid
  Variant (1732)..(1732): Xaa in position 1732 is any amino acid
  Variant (1735)..(1736): Xaa in position 1735 to 1736 is any amino acid
  Variant (1738)..(1741): Xaa in position 1738 to 1741 is any amino acid
  Variant (1745)..(1746): Xaa in position 1745 to 1746 is any amino acid
  Variant (1749)..(1750): Xaa in position 1749 to 1750 is any amino acid
  Variant (1752)..(1752): Xaa in position 1752 is any amino acid
  Variant (1754)..(1754): Xaa in position 1754 is any amino acid
  Variant (1756)..(1757): Xaa in position 1756 to 1757 is any amino acid
  Variant (1760)..(1760): Xaa in position 1760 is any amino acid
  Variant (1764)..(1764): Xaa in position 1764 is any amino acid
  Variant (1766)..(1766): Xaa in position 1766 is any amino acid
  Variant (1769)..(1770): Xaa in position 1769 to 1770 is any amino acid
  Variant (1772)..(1773): Xaa in position 1772 to 1773 is any amino acid
  Variant (1784)..(1785): Xaa in position 1784 to 1785 is any amino acid
  Variant (1790)..(1790): Xaa in position 1790 is any amino acid
  Variant (1792)..(1792): Xaa in position 1792 is any amino acid
  Variant (1795)..(1795): Xaa in position 1795 is any amino acid
  Variant (1798)..(1828): Xaa in position 1798 to 1828 is any amino acid
  Variant (1829)..(1834): Xaa in position 1829 to 1834 is any or no amino acid
  Variant (1838)..(1841): Xaa in position 1838 to 1841 is any amino acid
  Variant (1843)..(1845): Xaa in position 1843 to 1845 is any amino acid
  Variant (1847)..(1849): Xaa in position 1847 to 1849 is any amino acid
  Variant (1851)..(1852): Xaa in position 1851 to 1852 is any amino acid
  Variant (1855)..(1855): Xaa in position 1855 is any amino acid
  Variant (1859)..(1859): Xaa in position 1859 is any amino acid
  Variant (1862)..(1862): Xaa in position 1862 is any amino acid
  Variant (1866)..(1867): Xaa in position 1866 to 1867 is any amino acid
  Variant (1870)..(1882): Xaa in position 1870 to 1882 is any amino acid
  Variant (1883)..(1884): Xaa in position 1883 to 1884 is any or no amino acid
  Variant (1888)..(1888): Xaa in position 1888 is any amino acid
  Variant (1892)..(1892): Xaa in position 1892 is any amino acid
  Variant (1901)..(1901): Xaa in position 1901 is any amino acid
  Variant (1903)..(1903): Xaa in position 1903 is any amino acid
  Variant (1911)..(1911): Xaa in position 1911 is any amino acid
  Variant (1913)..(1913): Xaa in position 1913 is any amino acid
  Variant (1919)..(1920): Xaa in position 1919 to 1920 is any amino acid
  Variant (1927)..(1927): Xaa in position 1927 is any amino acid
  Variant (1930)..(1936): Xaa in position 1930 to 1936 is any amino acid
  Variant (1937)..(1937): Xaa in position 1937 is any or no amino acid
  Variant (1939)..(1939): Xaa in position 1939 is any amino acid
  Variant (1941)..(1941): Xaa in position 1941 is any amino acid
  Variant (1950)..(1950): Xaa in position 1950 is any amino acid
  Variant (1953)..(1953): Xaa in position 1953 is any amino acid
  Variant (1955)..(1955): Xaa in position 1955 is any amino acid
  Variant (1957)..(1957): Xaa in position 1957 is any amino acid
  Variant (1959)..(1961): Xaa in position 1959 to 1961 is any amino acid
  Variant (1964)..(1964): Xaa in position 1964 is any amino acid
  Variant (1967)..(1967): Xaa in position 1967 is any amino acid
  Variant (1969)..(1969): Xaa in position 1969 is any amino acid
  Variant (1971)..(1973): Xaa in position 1971 to 1973 is any amino acid
  Variant (1975)..(1976): Xaa in position 1975 to 1976 is any amino acid
  Variant (1979)..(1979): Xaa in position 1979 is any amino acid
  Variant (1981)..(1982): Xaa in position 1981 to 1982 is any amino acid
  Variant (1985)..(1985): Xaa in position 1985 is any amino acid
  Variant (1990)..(1990): Xaa in position 1990 is any amino acid
  Variant (1993)..(1993): Xaa in position 1993 is any amino acid
  Variant (1995)..(1996): Xaa in position 1995 to 1996 is any amino acid
  Variant (2003)..(2003): Xaa in position 2003 is any amino acid
  Variant (2004)..(2004): Xaa in position 2004 is any or no amino acid
  Variant (2007)..(2009): Xaa in position 2007 to 2009 is any amino acid
  Variant (2011)..(2012): Xaa in position 2011 to 2012 is any amino acid
  Variant (2014)..(2014): Xaa in position 2014 is any amino acid
  Variant (2028)..(2028): Xaa in position 2028 is any amino acid
  Variant (2031)..(2035): Xaa in position 2031 to 2035 is any amino acid
  Variant (2037)..(2038): Xaa in position 2037 to 2038 is any amino acid
  Variant (2040)..(2041): Xaa in position 2040 to 2041 is any amino acid
  Variant (2044)..(2044): Xaa in position 2044 is any amino acid
  Variant (2046)..(2046): Xaa in position 2046 is any amino acid
  Variant (2048)..(2048): Xaa in position 2048 is any amino acid
  Variant (2050)..(2051): Xaa in position 2050 to 2051 is any amino acid
  Variant (2053)..(2053): Xaa in position 2053 is any amino acid
  Variant (2055)..(2057): Xaa in position 2055 to 2057 is any amino acid
  Variant (2059)..(2060): Xaa in position 2059 to 2060 is any amino acid
  Variant (2063)..(2064): Xaa in position 2063 to 2064 is any amino acid
  Variant (2066)..(2066): Xaa in position 2066 is any amino acid
  Variant (2069)..(2069): Xaa in position 2069 is any amino acid
  Variant (2073)..(2073): Xaa in position 2073 is any amino acid
  Variant (2076)..(2076): Xaa in position 2076 is any amino acid
  Variant (2079)..(2079): Xaa in position 2079 is any amino acid
  Variant (2082)..(2082): Xaa in position 2082 is any amino acid
  Variant (2084)..(2089): Xaa in position 2084 to 2089 is any amino acid
  Variant (2090)..(2092): Xaa in position 2090 to 2092 is any or no amino acid
  Variant (2094)..(2095): Xaa in position 2094 to 2095 is any amino acid
  Variant (2097)..(2105): Xaa in position 2097 to 2105 is any amino acid
  Variant (2107)..(2107): Xaa in position 2107 is any amino acid
  Variant (2109)..(2109): Xaa in position 2109 is any amino acid
  Variant (2112)..(2112): Xaa in position 2112 is any amino acid
  Variant (2114)..(2114): Xaa in position 2114 is any amino acid
  Variant (2120)..(2123): Xaa in position 2120 to 2123 is any amino acid
  Variant (2125)..(2125): Xaa in position 2125 is any amino acid
  Variant (2128)..(2128): Xaa in position 2128 is any amino acid
  Variant (2129)..(2129): Xaa in position 2129 is any or no amino acid
  Variant (2131)..(2136): Xaa in position 2131 to 2136 is any amino acid
  Variant (2138)..(2140): Xaa in position 2138 to 2140 is any amino acid
  Variant (2142)..(2151): Xaa in position 2142 to 2151 is any amino acid
  Variant (2152)..(2155): Xaa in position 2152 to 2155 is any or no amino acid
  Variant (2159)..(2159): Xaa in position 2159 is any amino acid
  Variant (2161)..(2162): Xaa in position 2161 to 2162 is any amino acid
  Variant (2167)..(2167): Xaa in position 2167 is any amino acid
  Variant (2169)..(2169): Xaa in position 2169 is any amino acid
  Variant (2171)..(2171): Xaa in position 2171 is any amino acid
  Variant (2173)..(2173): Xaa in position 2173 is any amino acid
  Variant (2176)..(2179): Xaa in position 2176 to 2179 is any amino acid
  Variant (2181)..(2184): Xaa in position 2181 to 2184 is any amino acid
  Variant (2186)..(2200): Xaa in position 2186 to 2200 is any amino acid
  Variant (2201)..(2233): Xaa in position 2201 to 2233 is any or no amino acid
  Variant (2235)..(2285): Xaa in position 2235 to 2285 is any amino acid
  Variant (2286)..(2350): Xaa in position 2286 to 2350 is any or no amino acid
  Variant (2352)..(2353): Xaa in position 2352 to 2353 is any amino acid
  Variant (2355)..(2361): Xaa in position 2355 to 2361 is any amino acid
  Variant (2362)..(2373): Xaa in position 2362 to 2373 is any or no amino acid
  Variant (2375)..(2375): Xaa in position 2375 is any amino acid
  Variant (2377)..(2378): Xaa in position 2377 to 2378 is any amino acid
DXYXXXPXXXXXXXXXXXXXXXXXXXXXXXXXVPVIRXFGXXXXGXXXXXXXXXXXXXXXXXXXXXXXXXXXXXCXHXHXXXPYXXXXXXXXXXXXXXXXXXXXXXXXXXXXXXXXXXXXXXXXXXXXXXXXXXXXXXXXXXXXXXXXXXXXXXXXXXXXXXKGXPFYGXHXXXXXXXKIXXXXXXXXXPXXXXRXXXLLXXGXXXXXXXXXXXXXXXXXXXXXXXXEXHXXXXLQFXXDYNLXGXXXXXXXXXXXRXXXXXXXXXXXXXXXXXXXXXXXXXXXXXXXXXXXXXXXXXXXXXXXXXEXDXXXXXIXNXXXXXXXXXXXXXXXXXXXXXXXXXXXXXXXXXXXXXXXXXXXXXXXXXXXXXXXXXXXXXXXXXXXXXXXXXXXXXXXXXXXXXXXXXXXXXXXXXXXXXXXXXXXXXXXXXXXXXXXXXXXXXXXXXXXXXXXXXXXXXXXXXXXXXXXXXXXXXXXXXXXXXXXXXXXXXXXXXXXXXXXXXXXXXXXXXXXXXXXXXXXXSXXXLXXXXXXXXXXXXXXXXXXXXXXXXXXXXXXXXXXXXXXXXXXXXXXXXXXXXXXXXXXXXXXXXXXXXXXXXXXXXWXXXXXXXXXXXXXXXXXXXXXXXXXXXXXXXXXXXXXXXXXXXXXXXXXXXXXXXXXXXXXXXXXXXXXXXXXXXXXXXXXXXXXXXXXXXXXXXXXXXXXXXXXXXXXXXXXXXXXXXXXXXXXXXXXXXXXXXXXXXXXXXXXXXXXXXXXXXXXXXXXXXXXXXXXXXXXXXXXXXXXXXXXXXXXXXXXXXXXXXXXXXXXXXXXXXXXXXXXXXXXXXXXXXXXXXXXXXXXXXXXXXXXXXXXXXXXXXXXXXXXXXXXXXXXXXXXXXXXXXXXXXXXXXXXXXXXXXXXXXXXXXXXXXXXXXXXXXXXXXXXXXXXXXXXXXXXXXXXXXXXXXXXXXXXXXXXXXXXXXXXXXXXXXXXXXXXXXXXXXXXXXXXXXXXXXXXXXXXXXXXXXXXXXXXXXXXXXXXXXXXXXXXXXXXXXXXXXXXXXXXXXXXXXXXXXXXXXXXXXXXXXXXXXXXXXXXXXXXXXXXXXXXXXXXXXXXXXXXXXXXXXXXXXXXXXXXXXXXXXXXXXXXXXXXXXXXXXXXXXXXXXXXXXXXXXXXXXXXXXXXXXXXXXXXXXXXXXXXXXXXXXXXXXXXXXXXXXXXXXXXXXXXPXXXXXXXXXXXXXXXXXXXXXXXXXXXXXXXXXXXXXXXXXXXXXXXXXXXXXXXXXXXXXXXXXXXDXPXXXXXXXXXXXXXXXXXXXXXXXXXXXXXXXXXXXXXXXXXXXXXXXXXXXXXXXXXXXXXXXXXXXXXXXXXXXXXXXXXXXXXXXXXXXXXXXXXXXXXXXXXXXXXXXXXXXXXXXXXXXXXXXXXXXXXXXXXXXXXXXXXXXXXXXXXXXXXEXXXXXRGXLXPDPXXDXXXXXXXXXXXXXXXXXXXXXXXXXXXXXXXXXXXXXXXXXXXXXXXXXXXXXXXXXXXXEXXXXXXXXXXXXXXDPDIXXGXEXXXXSWGYXXXRAXXXXXXXXXXXXSRXXXXXXXXXXXXXXXXXXXXXXXXXXXXXXXXXXXXXXDXXXXXXXXXXXSXXXXXGRXXXNXWRXXRXEXXLXXYTXEXVXXXXLXXXXPXXXXXXLXXXXXSXXXXXXXXXXXXYXXXRXXXXXXXLXXXXXXXRTXEXARXXGXDFXSVXSRGSQXXVESXXXRXAKXXNXXXXSPSXXQVXXQXAXEXXPLXMEPXSXFYXXPXXVLDFQSLYPSXXIAYNXCXSTXLGXXXXXXXXXXXXXXXXXXXXXXXXXXXXXXXXXXXXXPNGXXXXKXXXRXXXLXXMLXEILXTRXMVKXXMKXXXXXXXXXXXXXXXRQLXLKLXANVTYGYTXAXFSGRMPCXEXADSIVXXGRETLEXAIXXXXXXXXWXAXVVYGDTDSXFVXLXGXTXXXAFXIGXEXAXXXTXXNPXPXXLKXEKVYXPCXLXXKKRYVGXXYEXXXQXXPXFDAKGIETVRRDGXPAXXXXXEXXLXXLFXTXDXSXXKXYXXXQXXKIXXGXVSXQDFXFAXEVXLGXYXXXXXXXXXPXXAXXXXXXXXXDXRXEPXYXERVPYXXXXGXPGXXLXXXXXXPXXXLXXXXXXXXXXXXXXYYIXKXXIPPLXRXFXLXGAXXXXWXXXXPXXXXXXXXXXXXXXXXXXXXXXXXXXXXXXXXXXXXXXXXXXXXXXXXTXXXXXXXXXXXXXXXXXXXXXXXXXXXXXXXXXXXXXXXXXXXXXXXXXXXXXXXXXXXXXXXXXXXXXXXXXXXXXXXXXXXXXXXXXXXXXXXXXXXXXXXXXXXXXXXXXXXXCXXCXXXXXXXXXXXXXXXXXXXCXSXXC

SEQ ID NO: 2728 - protein, 31 aa, Artificial sequence
  protein pattern
  Variant (2)..(2): Xaa in position 2 is any amino acid
  Variant (11)..(11): Xaa in position 11 is Ile or Val
  Variant (15)..(17): Xaa in position 15 to 17 is any amino acid
  Variant (19)..(23): Xaa in position 19 to 23 is any or no amino acid
  Variant (25)..(25): Xaa in position 25 is any amino acid
  Variant (26)..(26): Xaa in position 26 is Ala, Cys, Ser, Thr or Val
  Variant (27)..(27): Xaa in position 27 is Ile or Leu
  Variant (28)..(28): Xaa in position 28 is Lys or Arg
  Variant (29)..(29): Xaa in position 29 is Ile or Leu
  Variant (30)..(30): Xaa in position 30 is Phe, Leu or Met
PXFDAKGIETXRRDXXXAXXXXXEXXXXXXF

SEQ ID NO: 2729 - protein, 43 aa, Artificial sequence
  protein pattern
  Variant (2)..(4): Xaa in position 2 to 4 is any amino acid
  Variant (5)..(6): Xaa in position 5 to 6 is any or no amino acid
  Variant (8)..(8): Xaa in position 8 is any amino acid
  Variant (9)..(10): Xaa in position 9 to 10 is any or no amino acid
  Variant (12)..(13): Xaa in position 12 to 13 is any amino acid
  Variant (16)..(16): Xaa in position 16 is any amino acid
  Variant (18)..(18): Xaa in position 18 is Ile, Met or Val
  Variant (19)..(19): Xaa in position 19 is any amino acid
  Variant (22)..(22): Xaa in position 22 is Phe, Leu or Met
  Variant (26)..(27): Xaa in position 26 to 27 is any amino acid
  Variant (28)..(28): Xaa in position 28 is Gly or Pro
  Variant (29)..(29): Xaa in position 29 is Cys or Ser
  Variant (30)..(30): Xaa in position 30 is Phe, Ile, Met or Val
  Variant (32)..(32): Xaa in position 32 is any amino acid
  Variant (33)..(33): Xaa in position 33 is Ala, Ser or Thr
  Variant (38)..(38): Xaa in position 38 is Cys or Val
  Variant (40)..(40): Xaa in position 40 is Phe or Tyr
  Variant (41)..(41): Xaa in position 41 is any amino acid
GXXXXXAXXXTXXNPXPXXLKXEKVXXXXXLXXKKRYXGXXYE

SEQ ID NO: 2730 - protein, 17 aa, Artificial sequence
  protein pattern
  Variant (2)..(4): Xaa in position 2 to 4 is any amino acid
  Variant (5)..(5): Xaa in position 5 is any or no amino acid
  Variant (7)..(7): Xaa in position 7 is any or no amino acid
  Variant (9)..(11): Xaa in position 9 to 11 is any amino acid
  Variant (13)..(13): Xaa in position 13 is Phe, His or Tyr
  Variant (15)..(15): Xaa in position 15 is Ile or Leu
  Variant (16)..(16): Xaa in position 16 is Phe, His or Tyr
HXXXXLXQXXXDXNXXG

SEQ ID NO: 2731 - protein, 15 aa, Artificial sequence
  protein pattern
  Variant (2)..(2): Xaa in position 2 is any amino acid
  Variant (3)..(3): Xaa in position 3 is Ala or Val
  Variant (4)..(4): Xaa in position 4 is Asp, Glu, Lys or Arg
  Variant (13)..(13): Xaa in position 13 is Leu or Met
  Variant (15)..(15): Xaa in position 15 is Ile or Val
WXXXVVYGDTDSXFX

SEQ ID NO: 2732 - protein, 29 aa, Artificial sequence
  protein pattern
  Variant (4)..(4): Xaa in position 4 is any amino acid
  Variant (6)..(6): Xaa in position 6 is any amino acid
  Variant (7)..(7): Xaa in position 7 is any or no amino acid
  Variant (9)..(9): Xaa in position 9 is Ile or Pro
  Variant (11)..(11): Xaa in position 11 is any or no amino acid
  Variant (13)..(13): Xaa in position 13 is Asp, Glu, Asn or Gln
  Variant (15)..(15): Xaa in position 15 is any amino acid
  Variant (16)..(16): Xaa in position 16 is Phe or Leu
  Variant (17)..(18): Xaa in position 17 to 18 is any amino acid
  Variant (19)..(19): Xaa in position 19 is Ile or Val
  Variant (21)..(21): Xaa in position 21 is Ala, Ile or Val
  Variant (22)..(22): Xaa in position 22 is any amino acid
  Variant (23)..(23): Xaa in position 23 is Ile, Leu or Val
  Variant (24)..(25): Xaa in position 24 to 25 is any amino acid
  Variant (27)..(28): Xaa in position 27 to 28 is any amino acid
  Variant (29)..(29): Xaa in position 29 is Asp, Glu or Ser
YYIXKXXIXPXLXRXXXXXGXXXXXWXXX

SEQ ID NO: 2733 - protein, 21 aa, Artificial sequence
  protein pattern
  Variant (2)..(2): Xaa in position 2 is Ala or Pro
  Variant (3)..(3): Xaa in position 3 is Asp, Glu or Thr
  Variant (4)..(4): Xaa in position 4 is Ile, Leu or Val
  Variant (5)..(6): Xaa in position 5 to 6 is any amino acid
  Variant (8)..(8): Xaa in position 8 is Phe, Trp or Tyr
  Variant (9)..(9): Xaa in position 9 is Asp or Glu
  Variant (10)..(10): Xaa in position 10 is Ile, Leu or Val
  Variant (11)..(13): Xaa in position 11 to 13 is any amino acid
  Variant (18)..(18): Xaa in position 18 is Ile, Leu or Val
  Variant (19)..(19): Xaa in position 19 is any amino acid
  Variant (20)..(20): Xaa in position 20 is Ala, Asp, Glu or Gln
DXXXXXGXXXXXXSWGYXXXR

SEQ ID NO: 2734 - protein, 28 aa, Artificial sequence
  protein pattern
  Variant (2)..(10): Xaa in position 2 to 10 is any amino acid
  Variant (11)..(12): Xaa in position 11 to 12 is any or no amino acid
  Variant (14)..(14): Xaa in position 14 is any amino acid
  Variant (16)..(16): Xaa in position 16 is any amino acid
  Variant (19)..(19): Xaa in position 19 is any amino acid
  Variant (21)..(21): Xaa in position 21 is any amino acid
  Variant (24)..(24): Xaa in position 24 is Ile, Leu or Val
  Variant (25)..(25): Xaa in position 25 is any amino acid
  Variant (27)..(27): Xaa in position 27 is Ile, Leu or Val
  Variant (28)..(28): Xaa in position 28 is Ile or Val
AXXXXXXXXXXXDXRXEPXYXERXXYXX

SEQ ID NO: 2735 - protein, 20 aa, Artificial sequence
  protein pattern
  Variant (2)..(2): Xaa in position 2 is any amino acid
  Variant (3)..(4): Xaa in position 3 to 4 is any or no amino acid
  Variant (8)..(8): Xaa in position 8 is Phe or Tyr
  Variant (10)..(10): Xaa in position 10 is any amino acid
  Variant (11)..(11): Xaa in position 11 is Gly, Ser, Thr or Val
  Variant (12)..(14): Xaa in position 12 to 14 is any amino acid
  Variant (15)..(15): Xaa in position 15 is Phe or Tyr
  Variant (16)..(16): Xaa in position 16 is any amino acid
  Variant (19)..(19): Xaa in position 19 is any amino acid
  Variant (20)..(20): Xaa in position 20 is Phe, Leu, Met or Val
KXXXFYGXHXXXXXXXKIXX

SEQ ID NO: 2736 - DNA, 507 bp, SACCHAROMYCES CEREVISIAE
  CDS (1)..(507)
atgtccaatctattaaacaagtttgctgataagttgcacggcaacgatcatgatgaacgttacgaagacgacaatgacgaccagactagacaacagcgtcatgaaaaacatcaacagagggaattcaggaatcaaggatccaaggccgatccctacggcgaagaaaaccaagggaatttccctcaacgccagcagccacagtctaatctaggcggtaacacgcagtttggcggtaacgacttccagcaacaaactactgactacactgccggcactggtggtggcacttatacccaaacttaccgcgaaactaacactcaaggtcagttggacgacgatgaagacgatgacttcttgacttcgggccaacagcaaaaacaaggtcgtacaagaggtgctcaaagtaaccgctaccaatcctctaatatcggcagcggtagacgcgatctgtctgggtcaggaaacgatgaatatgatgatgatagtgggaaccaaggcgtctggtag

SEQ ID NO: 2737 - protein, 168 aa, SACCHAROMYCES CEREVISIAE
MSNLLNKFADKLHGNDHDERYEDDNDDQTRQQRHEKHQQREFRNQGSKADPYGEENQGNFPQRQQPQSNLGGNTQFGGNDFQQQTTDYTAGTGGGTYTQTYRETNTQGQLDDDEDDDFLTSGQQQKQGRTRGAQSNRYQSSNIGSGRRDLSGSGNDEYDDDSGNQGVW

SEQ ID NO: 2738 - DNA, 678 bp, Cryptococcus neoformans var. neoformans B-3501A
  CDS (1)..(678)
atgggtctcttggacaaggtcactgacaaggttaccggccactctcatggcaaaaattctgataactacgaccagagcggcaacgagtcctatggctctggcggtcagggcaataactctttcggtgctggtaaggactcttacgggtcctccggccaaggtggtgatacctatggctctggtggccagcctggtggccagtctggtggccagtctggtggctttggctccagtggtaacaactcttacgggtcctctggccaaggtggtggcacttacggctccggtggccagtctcacggtagcagcggtttgggttcttccggcaacgactcctatggctcttccggcggcgactcttacggttccggtggtctttccggtggccagcctggcggcttcggtggtaaccagagcgggggtggcttgggcggcggtaactctggcggctttggtggaagtggcggtaatgactcctacggctctggcggcaatgctggtggcttcggcggcggtcgaggtgatgactcctatggctctggaggcaagcccggtggcttcgccggaggtaacaacgacgccttcggctccggaggcaaccctggtggtctcggtggcggcggcgtgcgaggttccgagcagggtggcttcggtggtactggcagaagtggatactga

SEQ ID NO: 2739 - protein, 225 aa, Cryptococcus neoformans var. neoformans B-3501A
MGLLDKVTDKVTGHSHGKNSDNYDQSGNESYGSGGQGNNSFGAGKDSYGSSGQGGDTYGSGGQPGGQSGGQSGGFGSSGNNSYGSSGQGGGTYGSGGQSHGSSGLGSSGNDSYGSSGGDSYGSGGLSGGQPGGFGGNQSGGGLGGGNSGGFGGSGGNDSYGSGGNAGGFGGGRGDDSYGSGGKPGGFAGGNNDAFGSGGNPGGLGGGGVRGSEQGGFGGTGRSGY

SEQ ID NO: 2740 - DNA, 26 bp, Artificial sequence
  primer
atgtccaatctattaaacaagtttgc

SEQ ID NO: 2741 - DNA, 22 bp, Artificial sequence
  primer
ctaccagacgccttggttccca

SEQ ID NO: 2742 - DNA, 303 bp, SACCHAROMYCES CEREVISIAE
  CDS (1)..(303)
atggctgtcaagactggtatcgctattggtttgaacaagggtaagaaagtcacccaaatgactccagccccaaagatctcctacaagaagggtgctgcctccaacagaaccaagttcgtcagatctttggttagagaaatcgccggtttgtccccatatgaaagaagattgatcgatttgatcagaaactccggtgaaaagagagccagaaaggtcgccaagaagagattgggttctttcaccagagccaaggctaaggtcgaagaaatgaacaacatcattgctgcctctcgtcgtcattaa

SEQ ID NO: 2743 - protein, 100 aa, SACCHAROMYCES CEREVISIAE
MAVKTGIAIGLNKGKKVTQMTPAPKISYKKGAASNRTKFVRSLVREIAGLSPYERRLIDLIRNSGEKRARKVAKKRLGSFTRAKAKVEEMNNIIAASRRH

SEQ ID NO: 2744 - DNA, 397 bp, Glycine max
  CDS (5)..(325)
cacgatgccgaaggaagtcaagcagaagtctggtctcatcgttggcctcaacgccggccacaaggtcacccccaggacccccgctcccaggatctcgaggaggaagggtttcctctccaagcgcactgcgtttgtccgtgagatcaccaaggaggttgctggtcttgccccatacgagaagcgcatcatcgaattgcttcgcaactccaaggacaagcgtgcccgccgtctagcgaagaagaggctcggtaccttcggtcgctcaaagagaaaggtcgacgagatgaccaaggtcatcgccgagtcgaggcgcgctggtcactaaacggtttcacgatttgcggtggatgaagcaacacggcgaacgaacgaccgacttacttttcgattttattct

SEQ ID NO: 2745 - protein, 106 aa, Glycine max
MPKEVKQKSGLIVGLNAGHKVTPRTPAPRISRRKGFLSKRTAFVREITKEVAGLAPYEKRIIELLRNSKDKRARRLAKKRLGTFGRSKRKVDEMTKVIAESRRAGH

SEQ ID NO: 2746 - DNA, 333 bp, Glycine max
  CDS (1)..(333)
atggctcccaaaccgcctagtacgggtctgtttgttggactgaacaagggtcacgtcgtcaccaagaaggaattgcccccacgcccctcagatcgtaaggggaaaacaagcaagagggtgcactttgtgaggaacctcataagagaggttgctggttttgcaccctatgaaaagcgtataactgagttgctgaaggttgggaaggataagagggcactgaaggttgcaaagagaaagctcggaacacacaaacgcgcaaagaagaagcgtgaggaaatgtccagtgttctcaggaagatgagggctggtggtgctggagacaagaagaaataa

SEQ ID NO: 2747 - protein, 110 aa, Glycine max
MAPKPPSTGLFVGLNKGHVVTKKELPPRPSDRKGKTSKRVHFVRNLIREVAGFAPYEKRITELLKVGKDKRALKVAKRKLGTHKRAKKKREEMSSVLRKMRAGGAGDKKK

SEQ ID NO: 2748 - DNA, 589 bp, Glycine max
  CDS (94)..(426)
  misc_feature (585)..(585): n is a, g, c or t
  misc_feature (587)..(587): n is a, g, c or t
  misc_feature (588)..(588): n is a, g, c or t
cgagatgacgacagaaggggaccctagtttctgttctccctctttcaccgcagtgttagggtttctgtagcctccaaccagaaagagagggaaatggctcccaaacatcctagtacgggtttgtttgttggattgaacaagggtcacgttgtcaccaagaaggagttgcctccacgcccttcagatcgtaaggggaaaacaagcaagcgagtgcactttgtgaggaacctcattcgagaggttgccggctttgcaccttatgaaaagcgaataactgagttgctcaaggttggaaaagataagagggcactgaaagttgccaagagaaagcttggaacccataagcgcgcaaagaagaagagagaggagatgtccaatgttctccggaagatgagggctggtggagctggagacaagaagaaataagtcttgtttactttttctagtttcactagactgtttcgatgtacgagttgtcttatttttgttttagttcaagattttgctttgagaaatatgttttacctaatcgagacatgatttactccaaaagtacaattggcttattttcgacatgcattcccnanna

SEQ ID NO: 2749 - protein, 110 aa, Glycine max
MAPKHPSTGLFVGLNKGHVVTKKELPPRPSDRKGKTSKRVHFVRNLIREVAGFAPYEKRITELLKVGKDKRALKVAKRKLGTHKRAKKKREEMSNVLRKMRAGGAGDKKK

SEQ ID NO: 2750 - DNA, 405 bp, Glycine max
  CDS (17)..(361)
gtaaactcgagtagaaatggcgccgcgctacgaaatggctgtgggcctccacaaggggcacaaaaccaccaaaatccgtaccctcaagacagttgctgctactgttgacaagagaaacaggatgcgtccctccaggaccaagggtctccagaccaagcacaccaaatttgtgcgagacctgatccgtgaagttgttggacacgctccctatgaaaagagggctatggaattgttgaaggtttccaaggataagagagctctgaagtaccttaagaggaggttgggcacccacatccgtgccaagaggaagcgtgaagagctctccaacattctcacccagatgcgtaagcacgccaagtaatctgtccttttctaagccattaaactttaaaaaacccaaaaaaa

SEQ ID NO: 2751 - protein, 114 aa, Glycine max
MAPRYEMAVGLHKGHKTTKIRTLKTVAATVDKRNRMRPSRTKGLQTKHTKFVRDLIREVVGHAPYEKRAMELLKVSKDKRALKYLKRRLGTHIRAKRKREELSNILTQMRKHAK

SEQ ID NO: 2752 - DNA, 663 bp, Sorghum bicolor
  CDS (67)..(402)
gcgccggccgggccgggctccgtagcagccggttcacttctacaggtaaggaaagggttcgtcctcatggcgccgccgcagccgaagtcgggcctcttcgtgggcatcaacaagggccatgtcgtcaccaagcgcgagctgcctccgcgcccgtcccaccgcaaggggaaagcaacgaagagggtgtccatggtcaggggcctgatcagagaggttgctggctttgctccttatgagaagcgtatcactgagcttctgaaggttggcaaggacaagcgtgctctgaaggttgccaagagaaagcttggaactcacaagagggcaaagaagaagagagaggagatggctggtgtcctcaggaagatgagatcggctggtacgcacacagacaagaagaaatagagcatttcaagtttatgaagctggcggccagagattctgttccggtgtctgtttttcctacttgtagaacgtaatagacatgtcaaagtatctgtcagcgaaatattgtgttgttagttatgtatcgaaccacctcatggggattttgcaacaactttcaatgtatccatggtttgttaatcttttgctttggctttgcaaaaagaaaacaaaaaatgattactgcgtattgaatgctatggttgcaatccaaaaaaaaaa

SEQ ID NO: 2753 - protein, 111 aa, Sorghum bicolor
MAPPQPKSGLFVGINKGHVVTKRELPPRPSHRKGKATKRVSMVRGLIREVAGFAPYEKRITELLKVGKDKRALKVAKRKLGTHKRAKKKREEMAGVLRKMRSAGTHTDKKK

SEQ ID NO: 2754 - DNA, 321 bp, Zea mays
  CDS (1)..(321)
atgccgaaagaagtcaagcaaaagtcaggcctcatcgttggcattaacgccggccacaaggtcactcccaggactcctgctcccaggatctccaggaggaagggtttcctgtccaagcgcactgctttcgtccgtgagatcaccaaggaggttgctggtcttgccccctacgagaagcgcatcattgaattgctccgaaactccaaggacaagcgtgctcgtcgtctagctaagaagaggctcggtaccttcggccgctcaaagagaaaggtcgacgagatgaccaaggtcatcgccgagtcgaggcgcgcgggtcactaa

SEQ ID NO: 2755 - protein, 106 aa, Zea mays
MPKEVKQKSGLIVGINAGHKVTPRTPAPRISRRKGFLSKRTAFVREITKEVAGLAPYEKRIIELLRNSKDKRARRLAKKRLGTFGRSKRKVDEMTKVIAESRRAGH

SEQ ID NO: 2756 - DNA, 631 bp, Zea mays
  CDS (62)..(400)
atttcgcggcggcttagggttttaactcgcttccattctcaaggttagcaggagaccggccatggcgccgtcgcagcccaagtcagggctcttcgtgggcatcaacaagggccacgtcgtcaccaagcgcgagctgccgccacgcccgtccgaccggaaggggaaaggtaccaagagggtgctgtttgtccggaacttgattagggaggttgctggatttgctccctatgagaagcgtatcactgagcttcttaaggttggaaaggacaagcgtgcactcaaggtcgccaagaggaagcttggtactcacaagagagcaaagaagaagagggaggagatgtcaagtgtcctcaggaagatgaggtctggtggtggtggtgctgcggacaagaagaaatagaacttggctagctggtgaattttatccggaagcaaagtcctgtattaccagtccgtacctatagagctatggccattgtgttgacactatctttagcccgtggtttctattttgagaagaccaatctctttaagatttttacatgagtctggtgcctttgtttgattacttggtactctgctgtttattcagttatgtagcttgtctgggttttgtacctgcgattgttat

SEQ ID NO: 2757 - protein, 112 aa, Zea mays
MAPSQPKSGLFVGINKGHVVTKRELPPRPSDRKGKGTKRVLFVRNLIREVAGFAPYEKRITELLKVGKDKRALKVAKRKLGTHKRAKKKREEMSSVLRKMRSGGGGAADKKK

SEQ ID NO: 2758 - DNA, 430 bp, Zea mays
  CDS (36)..(338)
gccggccgggttccggctcttttattaacatcacaatggttgctgcaaagtctggaatcgctgttggtatcaacaagggtcacatcaccgctcgtcgtgaactcaaggccaagccctctaacaaaattggtgcttccaagcgtaccactttcgtaaagtccattgttcgtgaagttgctggttatgctccttatgaacgtcgtcttatggaattgatcaagaactccaaggataagcgtgccaagaagctttgcaagtccaagcttggtacttttgttcgtgccaagaagaagattgaagaacttcaaggtgttattgctgcttctcgtcgtcactaaattcttgatttttaacatgtggaataaatcaagaatgctctttcgagcaagttgggcatatacgcgaaaaaaaaaaaaaaaaaaggccccta

SEQ ID NO: 2759 - protein, 100 aa, Zea mays
MVAAKSGIAVGINKGHITARRELKAKPSNKIGASKRTTFVKSIVREVAGYAPYERRLMELIKNSKDKRAKKLCKSKLGTFVRAKKKIEELQGVIAASRRH

SEQ ID NO: 2760 - DNA, 409 bp, Triticum aestivum
  CDS (53)..(373)
ctcgtgcccccccccgcgcgcccgactcgccacgtcgcacgacttgtacgcaatggcagccgaacgcaaagagcgcagcggaatcgctgtaggcctcaacaaaggacacaaaactgaggcacgagtccccaagcctcgagttagtagaaccaagggtcacttgagcaagcggactgcatttgtgcgtgaaattgtcaaagaagtatcgggacttgccccatatgaacgaagggtaatcgaattacttcgcaacagcaaagacaaacgtgcccgcaagttggctaagaagaggctcgggacatttggccgcgcaaaggcaaaggtagacgagcttcagcgtgtaatcgccgagtcacgaagagccggtcactagagatataaaaatattgaatgaaaaattaaactataa

SEQ ID NO: 2761 - protein, 106 aa, Triticum aestivum
MAAERKERSGIAVGLNKGHKTEARVPKPRVSRTKGHLSKRTAFVREIVKEVSGLAPYERRVIELLRNSKDKRARKLAKKRLGTFGRAKAKVDELQRVIAESRRAGH

SEQ ID NO: 2762 - DNA, 336 bp, Triticum aestivum
  CDS (1)..(336)
atggcgccgtcgcagcccaagtcagggctcttcgtgggcatcaacaagggccacgtcgtcaccaagcgcgagctgccgccacgcccgtccgaccgcaaggggaaaggtaccaagagggtgctgtttgtcaggaacttgattagggaggttgctggatttgctccctatgagaagcgtatcactgagcttcttaaggttggaaaggacaagcgtgcactcaaggtcgccaagaggaagcttggtactcacaagagagcaacgaagaagagggaggagatgtcaagtgtcctcaggaagaaaaataagacttccaaatcccagctaataaaaccgtga

SEQ ID NO: 2763 - protein, 111 aa, Triticum aestivum
MAPSQPKSGLFVGINKGHVVTKRELPPRPSDRKGKGTKRVLFVRNLIREVAGFAPYEKRITELLKVGKDKRALKVAKRKLGTHKRATKKREEMSSVLRKKNKTSKSQLIKP

SEQ ID NO: 2764 - DNA, 403 bp, Triticum aestivum
  CDS (23)..(358)
gaggtaaaggaaaggttcgcccatggctccgtcgcagcccaagtcgggcctcttcgtgggcatcaacaagggccacgtcgtcaccaagcgcgagctgccgccgcgcccgtccgaccgcaaggggaaaggtaccaagagggtgcatttcgtcaggaacttgatcagggaggtagctgggtttgctccgtatgagaagcgtatcactgagcttctcaaggttggcaaggacaagcgtgccctgaaggtggcgaagcgaaagttgggtacccacaagagggcgaagaagaagagagaggagatgtccagtgtcctcaggaagatgagatctgccggaactggaaccgagaagaagaaatagagcatcccaagctcatgaaattgatggcaatcttctgttctggtg

SEQ ID NO: 2765 - protein, 111 aa, Triticum aestivum
MAPSQPKSGLFVGINKGHVVTKRELPPRPSDRKGKGTKRVHFVRNLIREVAGFAPYEKRITELLKVGKDKRALKVAKRKLGTHKRAKKKREEMSSVLRKMRSAGTGTEKKK

SEQ ID NO: 2766 - DNA, 586 bp, Gossypium hirsutum
  CDS (76)..(408)
tcgcccacgcgttcgcccacgcgtgcggcttcgagttcttttaggtgattttctgttagggctggttggtaggtgatggctccaagtcaacctaaaactggcctttctgtgggcttaaacaaaggacatgttgttaccaagaaggaattggctccccacccttctaatagaaaggggaaaactagcaagagagtccactttgtgaggagcctaattcgggaggttgctggtttcgctccgtatgagaagaggataactgaacttctcaaagttgggaaagataagcgtgctttgaaggtggcgaagagaaagctaggcactcacaagcgggccaagaagaagcgtgaggagatgtctagcgttctccgcaagatgaggtcagctggaggtggggagaaaaagaagtgagttgccctgcggttgtgcttcaaagcaagtattgagtttttagatttgttaaattttctcttcagttttgttttgagagtttggagtactgattcggatagcattcttttacttgtgttggatatttaaaaaaaacatgaaatttgcatcacttaattgcaatctagattcgattatg

SEQ ID NO: 2767 - protein, 110 aa, Gossypium hirsutum
MAPSQPKTGLSVGLNKGHVVTKKELAPHPSNRKGKTSKRVHFVRSLIREVAGFAPYEKRITELLKVGKDKRALKVAKRKLGTHKRAKKKREEMSSVLRKMRSAGGGEKKK

SEQ ID NO: 2768 - DNA, 504 bp, Gossypium hirsutum
  CDS (19)..(357)
atcgccgtctcgagaggcatggccaccaagcagccaaatacaggcctttttgtaggactaaacaagggccatgttgtaaccaagaaggaattggctccacgtccatctaacagaaaaggaaaaactagcaaaagagtccattttgtgaggaacttgataagggaagttgctggttttgcaccgtatgagaagaggattacggagcttttgaaggttggtaaggacaagcgagctctcaaggtagctaaaagaaaattgggaactcacaagagagccaagaagaagcgtgaagagatgtcgagtgttctccgcaagatgagggctcatcatcctggaggtggagacaagaagaagtgaagcttttatttttgttgatttatggacaagcttgaaggtttgatttagtagctgttagagattttgtttagcactttgtttgagactgaaaatcatgcactcaaatttgctgctttacatgaattactgcaagtttttttttttttt

SEQ ID NO: 2769 - protein, 112 aa, Gossypium hirsutum
MATKQPNTGLFVGLNKGHVVTKKELAPRPSNRKGKTSKRVHFVRNLIREVAGFAPYEKRITELLKVGKDKRALKVAKRKLGTHKRAKKKREEMSSVLRKMRAHHPGGGDKKK

SEQ ID NO: 2770 - DNA, 336 bp, Gossypium hirsutum
  CDS (1)..(336)
atggctaccaagcagccaaatactggcctctttgtgggactgaacaagggccatgttgtaaccaagaaggagttggctccacgcccctctaatcggaaaggaaaaacgagcaaaagagtccatttcgtgaggaacttgatcagggaagttgctggttttgcaccgtatgagaagaggatcactgagcttttgaaagtcggtaaggacaagcgagctcttaaggtagctaaaagaaagttgggaactcacaaaagggcaaagaagaagcgtgaagagatgtccagcgttctccgcaagatgagagcccacggtggaggtgcagaaaagaagaaataa

SEQ ID NO: 2771 - protein, 111 aa, Gossypium hirsutum
MATKQPNTGLFVGLNKGHVVTKKELAPRPSNRKGKTSKRVHFVRNLIREVAGFAPYEKRITELLKVGKDKRALKVAKRKLGTHKRAKKKREEMSSVLRKMRAHGGGAEKKK

SEQ ID NO: 2772 - DNA, 408 bp, Gossypium hirsutum
  CDS (4)..(339)
ggaatggctaccaagcagccaaatactggcctctttgtgggactgaacaagggccatgttgtaaccaagaaggagttggctccacgtccctctaatcggaaaggaaaaactagcaaaagagtccattttgtgaggaacttgattagggaagttgctggttttgcaccatatgagaagaggattactgaacttctgaaagttggtaaggacaaacgagcgctcaaggttgctaaaagaaagttgggaactcacaaaagggcaaagaagaagcgtgaggagatgtctagtgtgctccgcaagatgagggctcaccctggaggtggagaaaagaagaagtgaagctctctggtgacaagtcaccttgatgatttcattagagaacttttgttagcatatatttcaacttat

SEQ ID NO: 2773 - protein, 111 aa, Gossypium hirsutum
MATKQPNTGLFVGLNKGHVVTKKELAPRPSNRKGKTSKRVHFVRNLIREVAGFAPYEKRITELLKVGKDKRALKVAKRKLGTHKRAKKKREEMSSVLRKMRAHPGGGEKKK

SEQ ID NO: 2774 - DNA, 360 bp, Bombyx mori
  CDS (1)..(360)
atggctcctcgttttgaaatcgcagtaggcctgcgaaaaggccacaaaacaactaaaatatccgctggccgcaagggtatcacagacaaagccatcagaattaggccagctagactaaagggtcttcaaacgaaacactccaagtttgtccgtgatttagtacgcgaagttgtcggacacgctcaatatgagaagagggctatggagttacttaaggtgtcaaaagacaagcgtgctctgaagttcttgaagcgacgattgggcacacacatccgcgccaagaggaagcgtgaagaacttagcaacgtgctcgctcagatgaggaaggcagccgcccaggctcatcaccatcaccattaa

SEQ ID NO: 2775 - protein, 119 aa, Bombyx mori
MAPRFEIAVGLRKGHKTTKISAGRKGITDKAIRIRPARLKGLQTKHSKFVRDLVREVVGHAQYEKRAMELLKVSKDKRALKFLKRRLGTHIRAKRKREELSNVLAQMRKAAAQAHHHHH

SEQ ID NO: 2776 - DNA, 312 bp, Arabidopsis thaliana
  CDS (1)..(312)
atgacaactccacaagtgaagaccggtttgttcgttgggttgaacaagggacatgttgttaccagacgtgaattagctcctcgtcctcgttctcgcaaaggaaaaacgagcaagaggacaatctttatcagaaacttgataaaggaagttgctggtcaagctccctatgagaagagaatcactgagcttttgaaggttgctaagaggaagttgggaacccacaagagagccaagcgaaagagagaggagatgtccagtgttctccgcaagatgaggtctggcggtggtggtgcaactgagaagaagaagtga

SEQ ID NO: 2777 - protein, 103 aa, Arabidopsis thaliana
MTTPQVKTGLFVGLNKGHVVTRRELAPRPRSRKGKTSKRTIFIRNLIKEVAGQAPYEKRITELLKVAKRKLGTHKRAKRKREEMSSVLRKMRSGGGGATEKKK

SEQ ID NO: 2778 - DNA, 624 bp, Strongylocentrotus purpuratus
  CDS (14)..(355)
gaaattcgaaaacatggcgattcgacatgagatggccgttggcctcaacaaggggcacaagatgaccaagaacagcaccgtcaagaaagcaaccaggaaagggattaacaagcatgctaagttcgtgcgtgacctgattcgtgaggtgactggacttgctccatacgagaagaggtgcatggagttcctcagggttggcaaggacaagaaggctctcaagttctgcaagaggaggttgggaactcttggccgtggccgcagaaagcgtgaggagatgaacgccatcttagccgcccagaggaaggccgcctccgctgctgcacaagccgcctccgcagccgagaaggccaagtaaaccaacaatgactcatgtgaacaggatatatgtggactctgtatatatcctaggacctgttttattcccatcatgggccaatatggaagaacttctagttagtccttgtaaatgtgcggttttacgagagctgcatggggtcttcatattcttcaagctccgatagttgacagaggggtatgatgtcattttgcaaactgattggtagatcttcaggtattgatgtgatcattttgtgaataaaagagagcgggatattaacagagaaa

SEQ ID NO: 2779 - protein, 113 aa, Strongylocentrotus purpuratus
MAIRHEMAVGLNKGHKMTKNSTVKKATRKGINKHAKFVRDLIREVTGLAPYEKRCMEFLRVGKDKKALKFCKRRLGTLGRGRRKREEMNAILAAQRKAASAAAQAASAAEKAK

SEQ ID NO: 2780 - DNA, 417 bp, Nasonia vitripennis
  CDS (9)..(359)
tccacaggatggcacccaggtacgaattggccatcggcctcaacaagggtcacaaaaccaccaagattagggtggcgaaaaacaaatccgagaaggagaagaccgttgccatcagaccagccaggctaaaggggcgtcagaccaaacacagcaaatttgtgcgagacttgatccgtgaagtcactggacatgctccctatgagaagcgcgctatggagttgttgaaggtttcaaaggataagcgtgccctcaaattcttgaaaaggaggttgggtactcacattcgcgctaagaggaagcgtgaggagcttggaaacatccttgtacaaatgaggaaggccgccgcacagcatcattaagtgctgttttgtatttataaggattatttactggatcaataaacacctttgacacaag

SEQ ID NO: 2781 - protein, 116 aa, Nasonia vitripennis
MAPRYELAIGLNKGHKTTKIRVAKNKSEKEKTVAIRPARLKGRQTKHSKFVRDLIREVTGHAPYEKRAMELLKVSKDKRALKFLKRRLGTHIRAKRKREELGNILVQMRKAAAQHH

SEQ ID NO: 2782 - DNA, 524 bp, Aedes aegypti
  CDS (38)..(379)
ttcttttccggctgtcatttacaccgaggaggaaaacatggctccccgatacgaaatctgtgtcggtcttaacaaaggccacaagaccacgaagctgaggcagctgcagtaccgcggcgatcgcaaggtcaagggaatccgcccgtcccgtacaaagggaatccaaaccaagcacaccaagttcgtccgcgatttggtccgggaggtcgttggtcatgccccgtacgagaagcgcggtatggaattgctgaaggtgtccaaggataagcgcgccctgaagttcctgaagcgtcgcctcggaacgcacatccgcgccaagaggaagcgtgaggaactgtccaacatcctggcccatatgcgtaaggccgcccacaagtaagctgctgcagcattggcttgtgcgtgagaactttacaccgttcgctctgtttgtaatttaaggattactacatcccaaaaaccttctgtgaagaaaaagtaccctttaaaatataaacaaaatcgtttactgaatcagctatgct

SEQ ID NO: 2783 - protein, 113 aa, Aedes aegypti
MAPRYEICVGLNKGHKTTKLRQLQYRGDRKVKGIRPSRTKGIQTKHTKFVRDLVREVVGHAPYEKRGMELLKVSKDKRALKFLKRRLGTHIRAKRKREELSNILAHMRKAAHK

SEQ ID NO: 2784 - DNA, 490 bp, Aedes aegypti
  CDS (35)..(376)
tattccggctgtcatttacaccgaggaggaaaacatggctccccgatacgaaatctgtgtcggtcttaacaaaggccacaagaccacgaagctgaggcagctgcagtaccgcggcgatcgcaaggtcaagggaatccgcccgtcccgtacaaagggaatccaaaccaagcacaccaagttcttccgcgatttggtccgggaggtcgttggtcatgccccgtacgagaagcgcggtatggaattgctgaaggtgtccaaggataagcgcgccctgaagttcctgaagcgtcgcctcggaacgcacatccgcgccaagaggaagcgtgaggaactgtccaacatcctggcccatatgcgtaaggccgcccacaagtaagctgctgcagcattggcttgtgtgtgagaactttacaccgttcgctctgtttgtaatttaaggattactacatcccaaaaaccttctgtgaagaaaaagtaccctttaaaatat

SEQ ID NO: 2785 - protein, 113 aa, Aedes aegypti
MAPRYEICVGLNKGHKTTKLRQLQYRGDRKVKGIRPSRTKGIQTKHTKFFRDLVREVVGHAPYEKRGMELLKVSKDKRALKFLKRRLGTHIRAKRKREELSNILAHMRKAAHK

SEQ ID NO: 2786 - DNA, 330 bp, Magnaporthe grisea 70-15
  CDS (1)..(330)
atggctcccaccaagaagggcgaggtcccccgtaccggtcttgctaccggccttaaccgcggcttcaaaaccaccgccagggtcaccaagccccgcgttagcaccaccaagggccacctcagcaagaggactgctttcgtccgcgagctcgtcaaagaggtcgctggccttgccccctatgagcgccgtgttatcgagctgctgaggaacggcaaggacaagcgtgcccgcaagctggccaagaagcgcctcggtacttttggccgcgccaaggccaaggttgagcagctccagaccgtcattgctgaggcccgtcgtgccggccactaa

SEQ ID NO: 2787 - protein, 109 aa, Magnaporthe grisea 70-15
MAPTKKGEVPRTGLATGLNRGFKTTARVTKPRVSTTKGHLSKRTAFVRELVKEVAGLAPYERRVIELLRNGKDKRARKLAKKRLGTFGRAKAKVEQLQTVIAEARRAGH

SEQ ID NO: 2788 - DNA, 321 bp, Gibberella zeae PH-1
  CDS (1)..(321)
atggccgctgatacccccgcgaagtccggtctggccgttggcctcaacaagggccacaaaactaccccccgtgttgtcaagccccgtgtttcccgaaccaagggtcacctgagcaagcgcaccgctttcgttcgcgaggttgtcaaggaggttgctggcctcgccccctacgagcgccgagtcatcgagttgctccgcaactccaaggacaagcgtgcccgtaagctcgctaagaagagactcggtaccttcggccgtgccaaggccaaggtcgacgagctccagcgtgtcatcgctgagtctcgccgtgctggtcactaa

SEQ ID NO: 2789 - protein, 106 aa, Gibberella zeae PH-1
MAADTPAKSGLAVGLNKGHKTTPRVVKPRVSRTKGHLSKRTAFVREVVKEVAGLAPYERRVIELLRNSKDKRARKLAKKRLGTFGRAKAKVDELQRVIAESRRAGH

SEQ ID NO: 2790 - DNA, 303 bp, Kluyveromyces lactis NRRL Y-1140
  CDS (1)..(303)
atggccgttaagtcaggtattgctgttggtttgaacaaaggtaagaaggtcaaccaattgaccccagccccaaagatttcttacagaaagggtgctgcttcccaaagaaccactttcgtcagatctatcgttaaggaagtcgcttctttggctccatacgaaagaagattgatcgaattgatcagaaacgctggtgaaaagagagctagaaaggtcgcaaagaagagattgggaactttcggtagagctaaggctaaggttgaagaaatgaacgaaatcattaccgcttctcgtcgtcattaa

SEQ ID NO: 2791 - protein, 100 aa, Kluyveromyces lactis NRRL Y-1140
MAVKSGIAVGLNKGKKVNQLTPAPKISYRKGAASQRTTFVRSIVKEVASLAPYERRLIELIRNAGEKRARKVAKKRLGTFGRAKAKVEEMNEIITASRRH

SEQ ID NO: 2792 - DNA, 300 bp, Debaryomyces hansenii CBS767
  CDS (1)..(300)
atggctagatcaggtattgctgttggattaaacaagggacacaaggttgtcgccaaggaagttgctccaaaggtctcttacagaaagggtgctttatccaagagaactgaattcgttagaaacatcgtcaaggaagtttccggattagctccatatgaaagaagattgatcgaattgatcagaaatgctggtgaaaagagagctaagaagttggctaagaagagattaggtacccacaagagagcccttagaaagatcgaagaaatgaacaaggtcattgctgaatcaagaagacattaa

SEQ ID NO: 2793 - protein, 99 aa, Debaryomyces hansenii CBS767
MARSGIAVGLNKGHKVVAKEVAPKVSYRKGALSKRTEFVRNIVKEVSGLAPYERRLIELIRNAGEKRAKKLAKKRLGTHKRALRKIEEMNKVIAESRRH

SEQ ID NO: 2794 - DNA, 348 bp, Apis mellifera
  CDS (1)..(348)
atggctccaagatttgaattagcaattggtcttaatagaggccataaaacaactaaaattcgtgtggcaaaaaataaaaatgagaagaaaaaaacagtatgtgttttaccagcaagattaaaagggagacaaactaaacatagcaaatttgtcagagacttaattcgtgaagtaactggtcatgcaccatatgaaaagcgtgctatggaattattaaaagtttccaaagataaacgtgcattgaaatttttaaaaagaaggttgggtacacatatcagagctaaaaggaagcgtgaagaacttggaaatattcttgtccaaatgaggaaagctgctgcacatcattaa

SEQ ID NO: 2795 - protein, 115 aa, Apis mellifera
MAPRFELAIGLNRGHKTTKIRVAKNKNEKKKTVCVLPARLKGRQTKHSKFVRDLIREVTGHAPYEKRAMELLKVSKDKRALKFLKRRLGTHIRAKRKREELGNILVQMRKAAAHH

SEQ ID NO: 2796 - DNA, 424 bp, Tribolium castaneum
  CDS (48)..(383)
atttggtgaacacgcgtttgttggtgaattatttccaataaaccatcatggcaccgcgttacgaactcgctatcggtctccaaaggggccacaaaaccacaaaaattccctctggaaagaccaaagccgacaaggtccgtcctgcacggttgaaggggcaccaaaccaaacacacgaaattcgtccgcgacctcattcgtgaagtcgtgggccacgctccgtacgaaaaacgtgctatggaattgctgaaagtgtcgaaagacaagcgcgccctcaagttcttgaagcgccgtcttggcacccacattcgtgccaagaggaagcgtgaagagttgtccaacattctgacacaaatgcgtaaagcacaagctcacgctaagtaaatgtatttttaagtttttgacattaaaaacataacagtaaa

SEQ ID NO: 2797 - protein, 111 aa, Tribolium castaneum
MAPRYELAIGLQRGHKTTKIPSGKTKADKVRPARLKGHQTKHTKFVRDLIREVVGHAPYEKRAMELLKVSKDKRALKFLKRRLGTHIRAKRKREELSNILTQMRKAQAHAK

SEQ ID NO: 2798 - DNA, 354 bp, Maconellicoccus hirsutus
  CDS (1)..(354)
atggcacctcgctacgaattagcggtcggtcttagaaaaggccatcaaacgaccaaaatacgagctatcaaacctaccttagaaaacaagaaaaagaagattaaaccatcgcatttgaaaggacatcaaaccaaacatgccaaacttattcgtgacttgatcagagaagtagttggtaatgctccttttgaaaagagagccatggaattgcttaaagtatccaaggataaaagagcccttaaatttttgaaaagacgattgggaacacatttacgtgctaagaggaagcgtgaagaattgagtaatcttctattggctatcaggaaagctcagtcgcagaaaacgaacgtttaa

SEQ ID NO: 2799 - protein, 117 aa, Maconellicoccus hirsutus
MAPRYELAVGLRKGHQTTKIRAIKPTLENKKKKIKPSHLKGHQTKHAKLIRDLIREVVGNAPFEKRAMELLKVSKDKRALKFLKRRLGTHLRAKRKREELSNLLLAIRKAQSQKTNV

SEQ ID NO: 2800 - DNA, 333 bp, Oryza sativa subsp
  CDS (1)..(333)
atggcgccgccgcagcccaagtcggggctcttcgtcggcatcaacaagggccacgtcgtcaccaagcgcgagctgccacctcgcccgtccgaccgcaaggggaaaagtaccaagagggtgaattttgtcaggggcttgattagggaggttgtgggatttgctccatatgagaaacgaatcactgagcttctgaaggttggaaaggacaagcgtgcactgaaggtcgctaagagaaagctcggtacccacaagagagcaaagaagaagagagaggagatggtgggtgtcatcaggaagatgaggtctgctggtactactgacaagaagaaatag

SEQ ID NO: 2801 - protein, 110 aa, Oryza sativa subsp
MAPPQPKSGLFVGINKGHVVTKRELPPRPSDRKGKSTKRVNFVRGLIREVVGFAPYEKRITELLKVGKDKRALKVAKRKLGTHKRAKKKREEMVGVIRKMRSAGTTDKKK

SEQ ID NO: 2802 - DNA, 432 bp, Oryza sativa subsp
  CDS (1)..(432)
atggcgccgccgcagcccaagtcggggctcttcgtcggcatcaacaagggccacgtcgtcaccaagcgcgagctgccacctcgcccgtccgaccgcaaggggaaaagtaccaagagagtgaattttgtcaggggcttgattagggaggttgtgggatttgctccatatgagaaacgaatcactgagcttctgaaggttggaaaggacaagcgtgcactgaaggtcgctaagagaaagctcggtacccacaagagagcaaagaagaagagagaggagatggcgggtgtcatcaggaagatgagaatgggttctactccctctggtttcataatttttgactttttgaacaatgacacgctatgtaggggtgcaagtggacaataccactatttgcataaataccttcttgctagttcatttcccacatggtag

SEQ ID NO: 2803 - protein, 143 aa, Oryza sativa subsp
MAPPQPKSGLFVGINKGHVVTKRELPPRPSDRKGKSTKRVNFVRGLIREVVGFAPYEKRITELLKVGKDKRALKVAKRKLGTHKRAKKKREEMAGVIRKMRMGSTPSGFIIFDFLNNDTLCRGASGQYHYLHKYLLASSFPTW

SEQ ID NO: 2804 - DNA, 333 bp, Vitis vinifera
  CDS (1)..(333)
atggctccaaaacagccaaatactggcctcttcgtgggcctaaacaaaggacatgtggtgacaaagaaggaactccctccacgcccttctgatagaaaggggaaaaccagtaaaagagttcactttgtgcggaatatcatcagggaagtagctggttttgctccttatgagaagagaatcactgaacttcttaaggttgggaaagacaagcgagccttgaaagttgcgaagagaaagttaggcacacacaagagagcaaaaaagaagcgtgaggagatgtccagtgtcctacgcaagatgaggtctggtggagttggagagaagaagaagtga

SEQ ID NO: 2805 - protein, 110 aa, Vitis vinifera
MAPKQPNTGLFVGLNKGHVVTKKELPPRPSDRKGKTSKRVHFVRNIIREVAGFAPYEKRITELLKVGKDKRALKVAKRKLGTHKRAKKKREEMSSVLRKMRSGGVGEKKK

SEQ ID NO: 2806 - DNA, 553 bp, Spadella cephaloptera
  CDS (80)..(400)
ggaagcttataattgagtagtttcaatttgtttaaagttttattttgtgacaggaaaaggttattcttaaactagaactatggctcccaaatacgctatggctattggtcgcgtcagggataagggctttcgcaccaccaaaaacaaggctacggtgaaaccttcgaggagaaagggcgtccaacacaagcatgtccgattcgttcgggatacggttagagaaatcgccggtttcgccccctacgaaaagcgatgcctcgagttgctcaaggtatccaaggataagcggtgcttgaagttcgccaagaaacgtctcggggcccacatccgcggcaagagaaagcgggaagagatgcaggccgtgctccaggcgcaacgcaaagccgctaccaagcagtgatcctcgcgactttttactaattcacacttcatcttaggagcgtgggtgcccatttgattaaaactgtttcaatgacccgttaaatcgttttcaatcgcttcagtaaggttgtttttttttcctattcccgtttctatattaaaaaaaatgttt

SEQ ID NO: 2807 - protein, 106 aa, Spadella cephaloptera
MAPKYAMAIGRVRDKGFRTTKNKATVKPSRRKGVQHKHVRFVRDTVREIAGFAPYEKRCLELLKVSKDKRCLKFAKKRLGAHIRGKRKREEMQAVLQAQRKAATKQ

SEQ ID NO: 2808 - DNA, 598 bp, Spadella cephaloptera
  CDS (88)..(405)
ggaagcttataattgagtagtttcaatttgtttaaattataagatactttttcgttaaaaccaaagttttaagagcgaaacgtcgagatggctcccaaatacgctatggcgatcggacgggtccgggacaagggattccggacgacgaaacacgaagcacccgtcaagccctcccggcgaaagggtgtccaacacaagcacgtcaagtttgtaagagaattagtgagggaaatcggaggattcgctccttacgagaagcgatgcttggagttgttgaaggtttcaaaggacaagcgctgtctcaaatttgccaagaagcgtctcggagctcacatccgtggaaagcggaagcgcgaggagatgcaatccgtgctccaagcgcagaggaaggccgccaacaagtagactcccgcctctgccgttcgtttcgttaaccgtcgggatatctgcctctttccgtcgtcgaaccgtttttttgtgaagctgacgttgagcttttgtctcttccagttccttcgagccatctcgatttgattcgctgattatttgttttttttattatctcaggaaaaaaaaaaaaaaaaaaaaaaaaaaaaaa

SEQ ID NO: 2809 - protein, 105 aa, Spadella cephaloptera
MAPKYAMAIGRVRDKGFRTTKHEAPVKPSRRKGVQHKHVKFVRELVREIGGFAPYEKRCLELLKVSKDKRCLKFAKKRLGAHIRGKRKREEMQSVLQAQRKAANK

SEQ ID NO: 2810 - DNA, 306 bp, Ostreococcus tauri
  CDS (1)..(306)
atgtcggttggtttggataagggtcacgctgttacgaagcgagagatcgcgccgagaccagggtcgagaaaggggcgttgtggcaaacgtgtcggcatgattcgctcgcttattcgagatgtcgctggttctgcgccgtacgaaaggcggttaatcgagttgctgaagaacggtcgggacaagcgcgcattgaaacttgcaaagagaaagcttgggactcacttgcgcggtaagaagaagcgcgaagaaatgggcaacatcatgcgcaagtcgtcgcgaaaagccacagccccggaaagcaagtga

SEQ ID NO: 2811 - protein, 101 aa, Ostreococcus tauri
MSVGLDKGHAVTKREIAPRPGSRKGRCGKRVGMIRSLIRDVAGSAPYERRLIELLKNGRDKRALKLAKRKLGTHLRGKKKREEMGNIMRKSSRKATAPESK

SEQ ID NO: 2812 - DNA, 318 bp, Artemia sanfranciscana
  CDS (1)..(318)
atggtgaagaaaaactttgatttggcagttggcttaaacaaaggtcataagactaccaagaatgtccaggccccaagaccttccagaaggataggcaaacagtcaaagcacaataagttcattaaaagtatagtgactgaagttgttgggcatgcaccgtatgagaaacgtgccatggagctgctgaaagtttccaaagataagagggcgctgaaattcctgaaaaagaggcttggtactcatattcgtgccaagaagaagagagaagaacttggaaatgtcctcacacaaatgcgtaaggcgcaagctgctaaataa

SEQ ID NO: 2813 - protein, 105 aa, Artemia sanfranciscana
MVKKNFDLAVGLNKGHKTTKNVQAPRPSRRIGKQSKHNKFIKSIVTEVVGHAPYEKRAMELLKVSKDKRALKFLKKRLGTHIRAKKKREELGNVLTQMRKAQAAK

SEQ ID NO: 2814 - DNA, 321 bp, Phaeosphaeria nodorum
  CDS (1)..(321)
atgccgaaggaagtcaagcagaagtccggcctcatcgtcggcctcaacgctggccacaaggtcaccccgaggacccccgcccccaggatctccaggaggaagggtttcctatccaagcgcaccgctttcgtccgcgagatcacccgtgaggtcgctggacttgccccatacgagaagcgtgtcatcgaattgctccgtaactccaaggacaagcgtgcccgtcgtcttgcgaagaagaggctcggtaccttcggtcgtgctaagaggaaggttgaggagatgaccaacgtcatcgccgagtcgaggcgtgcgggtcactaa

SEQ ID NO: 2815 - protein, 106 aa, Phaeosphaeria nodorum
MPKEVKQKSGLIVGLNAGHKVTPRTPAPRISRRKGFLSKRTAFVREITREVAGLAPYEKRVIELLRNSKDKRARRLAKKRLGTFGRAKRKVEEMTNVIAESRRAGH

SEQ ID NO: 2816 - DNA, 318 bp, Aspergillus oryzae
  CDS (1)..(318)
atggcccaggaacgctccggaattgtggtcggtctgaacaagggccataaaaccacccccctcaacacccccaagacccgtgtcagccgcaccaagggccagtcctcccgccgtactgcctttgttcgtgacatcgctcgtgaggttgtcggtcttgccccctatgagcgccgtatcatcgaactcctgagaaacactcaggacaagcgtgctcgtaagctcgccaagaagaggctcggtaccttcggccgtggaaagagaaaggttgaggacatgcagcgcgtcatcgctgagtcccgtcgtgtcactggtcactaa

SEQ ID NO: 2817 - protein, 105 aa, Aspergillus oryzae
MAQERSGIVVGLNKGHKTTPLNTPKTRVSRTKGQSSRRTAFVRDIAREVVGLAPYERRIIELLRNTQDKRARKLAKKRLGTFGRGKRKVEDMQRVIAESRRVTGH

SEQ ID NO: 2818 - DNA, 333 bp, Timarcha balearica
  CDS (1)..(333)
atggccccaaggtacgaaatagccgcgggtctgcaaaaaggccataaaactacgaaaatctctgaaaagtcgaagcttcataaagtccgtcccgccaggttgaaggggatccaaaccaaacatacgaaattcgttcgtgacctgatccgggaagttgtaggacatgctccatatgaaaagagagctatggagttgttgaaagtatccaaggataaaagggcgcttaaattcctcaaacgtcgtctaggtacgcacatccgtgccaagaggaagcgtgaagaattatccaatatccttacacagatgcgaaaggcacaagctacccataagtag

SEQ ID NO: 2819 - protein, 110 aa, Timarcha balearica
MAPRYEIAAGLQKGHKTTKISEKSKLHKVRPARLKGIQTKHTKFVRDLIREVVGHAPYEKRAMELLKVSKDKRALKFLKRRLGTHIRAKRKREELSNILTQMRKAQATHK

SEQ ID NO: 2820 - DNA, 336 bp, Cicindela littoralis
  CDS (1)..(336)
atggcaccgaggtacgaagtggcggtgggtctcaataagggccataaaacaacaaaaatccccgctggtaaaacaaaagcagacaaagtgagtccatccaggttgaaggggatccaaactaagcacaccaagttcgtgcgcgaattgatccgtgaggtttgtggtcatgctccatatgagaagcgcgctatggaattactgaaagtatcaaaagacaagcgtgcactcaagtttttgaagcgacgtcttggcacccacatccgtgcgaagaggaagcgtgaagaactgtccaacatcatcacccaaatgcgcaaggcacaagcacatgggaaataa

SEQ ID NO: 2821 - protein, 111 aa, Cicindela littoralis
MAPRYEVAVGLNKGHKTTKIPAGKTKADKVSPSRLKGIQTKHTKFVRELIREVCGHAPYEKRAMELLKVSKDKRALKFLKRRLGTHIRAKRKREELSNIITQMRKAQAHGK

SEQ ID NO: 2822 - DNA, 342 bp, Biphyllus lunatus
  CDS (1)..(342)
atggcccctaggtacgaaatagcggtgggcctccaaagaggccataaaacaactaaaatacccacgaagacaaacaaggaaggtaaacccattccaagacctgcaaggttgaaggggatccaaaccaaacactcaaaatttgtccgtgatctcattagagaagttgtaggacatgctccttacgaaaaaagagccatggaattgttgaaagtgtccaaggataagagggctttgaaattcttgaaacgtcgtcttggcacacacatccgtgccaaaaggaagcgtgaagaattatcaaacatccttacacaaatgcgtaaggctcaagctacccacaaataa

SEQ ID NO: 2823 - protein, 113 aa, Biphyllus lunatus
MAPRYEIAVGLQRGHKTTKIPTKTNKEGKPIPRPARLKGIQTKHSKFVRDLIREVVGHAPYEKRAMELLKVSKDKRALKFLKRRLGTHIRAKRKREELSNILTQMRKAQATHK

SEQ ID NO: 2824 - DNA, 333 bp, Ixodes scapularis
  CDS (1)..(333)
atgggggtgcagtacaaactcgccgtaggcctcggaaagggccacaaagtcacgaagaacgagtataagcctcggccttcgcgaaggaagggagcgctttctaagcacacccgcttcgtccgcgacctgatccgcgaggtgtgcggcttcgcgcctttcgaaaggcgggccatggagttgctcaaggtgtccaaggacaagcgtgccctcaagttcatcaagaagaggttgggcacccacctccgcggcaagaggaagagggacgagttgagcaacgtcctggtggcccagaggaaggcggccgcccacaaggagaagacggaacacaagtag

SEQ ID NO: 2825 - protein, 110 aa, Ixodes scapularis
MGVQYKLAVGLGKGHKVTKNEYKPRPSRRKGALSKHTRFVRDLIREVCGFAPFERRAMELLKVSKDKRALKFIKKRLGTHLRGKRKRDELSNVLVAQRKAAAHKEKTEHK

SEQ ID NO: 2826 - DNA, 351 bp, Lysiphlebus testaceipes
  CDS (1)..(351)
atggcacctaggtacgaaattgctgttggtctcaacaaaggtcacaagacctcaaaaattcgtgtagccaaaaccaaggctgaacaagctaaaactgttgctctcagaccagctcgtctcaagggacgtattaccaaacacaacaaatttgttcgtgatttggttcgtgaagtcactggacatgcaccatatgaaaaacgtgctatggaattgttgaaagtctcaaaagacaaacgtgctcttaaattcttgaaaagacgattgggtacacacattcgtgccaagaggaagcgtgaagaacttggaactgttcttgtccaaatgagaaaagcagcagcagctcatcattaa

SEQ ID NO: 2827 - protein, 116 aa, Lysiphlebus testaceipes
MAPRYEIAVGLNKGHKTSKIRVAKTKAEQAKTVALRPARLKGRITKHNKFVRDLVREVTGHAPYEKRAMELLKVSKDKRALKFLKRRLGTHIRAKRKREELGTVLVQMRKAAAAHH

SEQ ID NO: 2828 - DNA, 339 bp, Triticum aestivum
  CDS (1)..(339)
atggcgccgtcgcagcccaagtcagggctcttcgtgggcatcaacaagggccacgtcgtcaccaagcgcgagctgccgcctcgcccgtccgaccgcaaggggaaaggtacaaagagggtgcattttgtcaggaacttgatcagggaggttgctggatttgctccctatgagaagcgtatcactgagcttcttaaggttggaaaggacaagcgtgcactcaaggtcgccaagagaaagcttggtactcacaagagagcaaagaagaagagagaggagatgtcaagtgtccttaggaagatgaggtctgctggtggtggtgctggtgacaagaagaaatag

SEQ ID NO: 2829 - protein, 112 aa, Triticum aestivum
MAPSQPKSGLFVGINKGHVVTKRELPPRPSDRKGKGTKRVHFVRNLIREVAGFAPYEKRITELLKVGKDKRALKVAKRKLGTHKRAKKKREEMSSVLRKMRSAGGGAGDKKK

SEQ ID NO: 2830 - DNA, 336 bp, Saccharum officinarum
  CDS (1)..(336)
atggcgccgccgcagccgaagtcgggcctcttcgtgggcatcaacaagggccatgtcgtcaccaagcgcgagctgcctccgcgcccgtcccaccgcaaggggaaagcaacgaagagggtgtccatggtcaggggcctgatcagagaggttgctgggtttgctccttatgagaagcgtatcactgagcttcttaaggttggcaaggacaagcgtgctttgaaggttgccaagagaaagcttggaactcacaagagggcaaagaagaagagagaggagatggcgggtgtcctcaagaaaatgagatcggctggtacgcacactgacaagaagaaatag

SEQ ID NO: 2831 - protein, 111 aa, Saccharum officinarum
MAPPQPKSGLFVGINKGHVVTKRELPPRPSHRKGKATKRVSMVRGLIREVAGFAPYEKRITELLKVGKDKRALKVAKRKLGTHKRAKKKREEMAGVLKKMRSAGTHTDKKK

SEQ ID NO: 2832 - DNA, 357 bp, Plutella xylostella
  CDS (1)..(357)
atggctccgcggtttgaaatcgcagttggtctgcgtaaaggccacaaaactaccaagatctcagctggtagaaaaggcattacagacaaagccatcaaaatccgccccgccaggctaaagggtctgcaaaccaagcactccaagtttgtccgtgacctggtccgcgaggtcgtcggtcacgctcagtatgagaagagggctatggaattgttgaaggtctccaaggacaagcgcgccctgaagttcctgaagcgtcgcctgggcacccacatccgcgccaagaggaagcgtgaggagctcagcaacgttctcacacagatgaggaaggccgccgcccaggctcaccaccaccactaa

SEQ ID NO: 2833 - protein, 118 aa, Plutella xylostella
MAPRFEIAVGLRKGHKTTKISAGRKGITDKAIKIRPARLKGLQTKHSKFVRDLVREVVGHAQYEKRAMELLKVSKDKRALKFLKRRLGTHIRAKRKREELSNVLTQMRKAAAQAHHHH

SEQ ID NO: 2834 - DNA, 312 bp, Branchiostoma belcheri
  CDS (1)..(312)
atggggatcagatacgacatgtgtgtcggcctcaacaagggccataagatcaccaaaaatgtgcagaaaccacggccatctcgcaggaaagggaaactgacgaagcacgtgaagtttgttcgtgacctggtgcgagaggtgacaggctttgctccttacgaaagacgtaccatggagttgctgaaggtcagcaaggacaagcgggcgctcaagttcctgaagaaaagggttggaactctgcagcgtgccaagagaaagcgtgaggagatgcagaacgtcatcgctgcccagaggaaggctcaaagatcttag

SEQ ID NO: 2835 - protein, 103 aa, Branchiostoma belcheri
MGIRYDMCVGLNKGHKITKNVQKPRPSRRKGKLTKHVKFVRDLVREVTGFAPYERRTMELLKVSKDKRALKFLKKRVGTLQRAKRKREEMQNVIAAQRKAQRS

SEQ ID NO: 2836 - DNA, 369 bp, Spodoptera frugiperda
  CDS (1)..(369)
atggctcctcgatttgagttagcggtcggtctccgaaagggacacaaaacacttaaaatctccgctggcaagaagggtattactgacaaagccatcaaaatcaggcctgctaggctaaagggtctccaaaccaagcactcaaaattcgtgcgcgatttggtccgtgaggtcgttggacacgctcagtatgagaagagggctatggaattgttgaaggtgtcaaaagacaagcgcgccctgaagttcttgaagcgtcgtctgggcacacacatccgtgccaagaggaagcgtgaagagctgagcaacgtactgacacagatgaggaaggcggccgcacaagcacaccacgcccctacacacactaagtga

SEQ ID NO: 2837 - protein, 122 aa, Spodoptera frugiperda
MAPRFELAVGLRKGHKTLKISAGKKGITDKAIKIRPARLKGLQTKHSKFVRDLVREVVGHAQYEKRAMELLKVSKDKRALKFLKRRLGTHIRAKRKREELSNVLTQMRKAAAQAHHAPTHTK

SEQ ID NO: 2838 - DNA, 342 bp, Arabidopsis thaliana
  CDS (1)..(342)
atgacaactccagcagtgaagaccggtttgttcgttggattgaacaaaggacacgtcgtcaccagacgtgagctagctcctcgtcccaattctcgcaaagggaaaacgagcaagaggaccatattcataagaaaactgattagggaagtagctggaatggctccttatgagaagagaatcactgagcttctcaaggttgggaaagacaagcgtgctcttaaggttgctaagaggaagttgggtactcacaagagagctaagaggaagagagaggagatgtctagtgttctccgcaagatgaggtctcttggtggtgctgctgctgctgagaagaagatgtag

SEQ ID NO: 2839 - protein, 113 aa, Arabidopsis thaliana
MTTPAVKTGLFVGLNKGHVVTRRELAPRPNSRKGKTSKRTIFIRKLIREVAGMAPYEKRITELLKVGKDKRALKVAKRKLGTHKRAKRKREEMSSVLRKMRSLGGAAAAEKKM

SEQ ID NO: 2840 - DNA, 339 bp, Arabidopsis thaliana
  CDS (1)..(339)
atgacaactccacaagtgaagaccggtttgttcgttgggttgaacaagggacatgttgttaccagacgtgaattagctcctcgtcctcgttctcgcaaaggaaaaacgagcaagaggacaatctttatcagaaacttgataaaggaagttgctggtcaagctccctatgagaagagaatcactgagcttttgaaggttggtaaagacaaacgtgctcttaaggttgctaagaggaagttgggaacccacaagagagccaagcgaaagagagaggagatgtccagtgttctccgcaagatgaggtctggcggtggtggtgcaactgagaagaagaagtga

SEQ ID NO: 2841 - protein, 112 aa, Arabidopsis thaliana
MTTPQVKTGLFVGLNKGHVVTRRELAPRPRSRKGKTSKRTIFIRNLIKEVAGQAPYEKRITELLKVGKDKRALKVAKRKLGTHKRAKRKREEMSSVLRKMRSGGGGATEKKK

SEQ ID NO: 2842 - DNA, 327 bp, Arabidopsis thaliana
  CDS (1)..(327)
atggtggcgacaggcttattcgtggggctaaacaaaggacacgttgttaccaaacgcgagcaacctcctcgccctaacaacagaaaagggaaaacaagcaaaaggactatttttatcaggaatctcatcaaggaagttgcgggtcaagctccctatgagaagaggatcactgagcttttgaaggttggtaaagacaagagagctcttaaagttgccaagcgaaagttgggaactcacaagagagctaaacgaaagagagaggagatgtccagtgttctccgcaagatgaggtctggtggtgctggtgcatccgagaagaagaagtga

SEQ ID NO: 2843 - protein, 108 aa, Arabidopsis thaliana
MVATGLFVGLNKGHVVTKREQPPRPNNRKGKTSKRTIFIRNLIKEVAGQAPYEKRITELLKVGKDKRALKVAKRKLGTHKRAKRKREEMSSVLRKMRSGGAGASEKKK

SEQ ID NO: 2844 - DNA, 300 bp, Schizosaccharomyces pombe
  CDS (1)..(300)
atggcacctggtctggttgttggtttaaacaaaggaaaggttttgaccaagcgtcaacttcctgagcgtccttctcgccgtaagggacaattgtccaagcgtacttcttttgtccgttctatcgttcgtgaggttgctggattcgctccctatgagcgtcgtgtcatggaattgatccgtaactcccaagacaagcgtgcccgcaaattggccaagaagaggctcggtacccttaagcgtgccaagggaaagattgaagagcttacctctgtcatccaaagctctcgtttggctcactaa

SEQ ID NO: 2845 - protein, 99 aa, Schizosaccharomyces pombe
MAPGLVVGLNKGKVLTKRQLPERPSRRKGQLSKRTSFVRSIVREVAGFAPYERRVMELIRNSQDKRARKLAKKRLGTLKRAKGKIEELTSVIQSSRLAH

SEQ ID NO: 2846 - DNA, 303 bp, Saccharomyces cerevisiae
  CDS (1)..(303)
atgaccgttaagacaggaattgctattggtttaaacaaaggtaagaaggtcactagcatgaccccagctccaaaaatctcttacaagaaaggtgctgcttccaacagaaccaagttcgtaagatctttggtcagagaaatcgctggtttgtctccatacgaaagaagattgattgatctaataagaaactctggtgaaaagagagctagaaaggtcgccaagaagagattgggttctttcaccagagccaaggctaaggtcgaagaaatgaacaacatcattgctgcttctcgtcgtcactaa

SEQ ID NO: 2847 - protein, 100 aa, Saccharomyces cerevisiae
MTVKTGIAIGLNKGKKVTSMTPAPKISYKKGAASNRTKFVRSLVREIAGLSPYERRLIDLIRNSGEKRARKVAKKRLGSFTRAKAKVEEMNNIIAASRRH

SEQ ID NO: 2848 - DNA, 300 bp, Schizosaccharomyces pombe
  CDS (1)..(300)
atggcacctggactggttgttggtttaaacaagggaaagactttgactaagcgtcaacttcctgagcgtccttctcgccgcaagggacatttgtccaagcgtactgctttcgtccgatctattgtgcgtgaagttgctggatttgctccttatgaacgccgtgtcatggaattgatccgtaactcccaagacaagcgtgctcgcaagcttgccaagaagagactcggtactttgaagcgtgccaagggtaaaatcgaagagctcactagtgtcatccagagctccagattggcccattaa

SEQ ID NO: 2849 - protein, 99 aa, Schizosaccharomyces pombe
MAPGLVVGLNKGKTLTKRQLPERPSRRKGHLSKRTAFVRSIVREVAGFAPYERRVMELIRNSQDKRARKLAKKRLGTLKRAKGKIEELTSVIQSSRLAH

SEQ ID NO: 2850 - DNA, 300 bp, Candida albicans
  CDS (1)..(300): transl_table=12
atggctaagtcaggaattgctgcaggtgttaacaaaggtagaaaaactactgccaaagaagttgccccaaaaatctcatacagaaaaggtgcttcatctcaaagaaccgttttcgttagatcaatcgtcaaagaagttgctggtttagctccatacgaaagaagattgattgaattgattagaaatgctggtgaaaagagagctaagaaattggctaagaagagattaggtactcataagagagctttaagaaaagttgaagaaatgactcaagttattgctgaatctagaagacattaa

SEQ ID NO: 2851 - protein, 99 aa, Candida albicans
MAKSGIAAGVNKGRKTTAKEVAPKISYRKGASSQRTVFVRSIVKEVAGLAPYERRLIELIRNAGEKRAKKLAKKRLGTHKRALRKVEEMTQVIAESRRH

SEQ ID NO: 2852 - DNA, 348 bp, Drosophila melanogaster
  CDS (1)..(348)
atggcagtgcgctacgagctggctattggcctgaacaagggccacaagacctcgaagatcaggaatgtgaagtacaccggcgacaagaaggtcaagggtctgcgcggatcgcgcttgaagaacatccaaacccgccacaccaagttcatgcgcgacttggtccgcgaggtcgttggccacgctccctatgagaagcgcaccatggagttgctgaaggtgtccaaggataagagggccctgaagttcctcaagcgccgcctgggcacccacatccgtgccaagaggaagcgtgaggagttgtccaacatcctcacccagctgaggaaggcccagacccacgccaagtaa

SEQ ID NO: 2853 - protein, 115 aa, Drosophila melanogaster
MAVRYELAIGLNKGHKTSKIRNVKYTGDKKVKGLRGSRLKNIQTRHTKFMRDLVREVVGHAPYEKRTMELLKVSKDKRALKFLKRRLGTHIRAKRKREELSNILTQLRKAQTHAK

SEQ ID NO: 2854 - DNA, 306 bp, Enteromorpha compressa
  CDS (1)..(306)
atgggggagatcgctgtaggcctcaacaagggtcaccaggtgacaaagaaggctggcacaccccggccttcaaggagaaagggattcttgtcacaacgtgtcaagaaggtcagggcagttgtccgtgaggttgctggctgggcaccatatgagcgtcgcgtgatggagctcttgaaggttggtaaggacaagcgtgctttgaagatgtgcaagcgcaaattgggcacacacatgcgcggcaagaagaagagggaggagatggctggtgttctccgtaagatgcaggctgccagcaagggagagtag

SEQ ID NO: 2855 - protein, 101 aa, Enteromorpha compressa
MGEIAVGLNKGHQVTKKAGTPRPSRRKGFLSQRVKKVRAVVREVAGWAPYERRVMELLKVGKDKRALKMCKRKLGTHMRGKKKREEMAGVLRKMQAASKGE

SEQ ID NO: 2856 - DNA, 318 bp, Trichoderma hamatum
  CDS (1)..(318)
atggctaaggaagcgcctgcaaagaccggtctggccgttggcctgaacaagggccacaagactaccgctcgtgtcgtcaagccccgtgtttcccgcaccaagggacacctgagcaagcgcaccgcctttgttcgtgaggtcgtcaaggaggttgctggcctcgctccctatgagcgtcgtgttatcgaacttctccgcaacagcaaggacaagcgtgcccgtaagctggccaagaagaggctcggtacctttggccgtgccaagagaaaggtcgatgagctccagcgcgtcatcgccgagtcccgtcgtgctcactaa

SEQ ID NO: 2857 - protein, 105 aa, Trichoderma hamatum
MAKEAPAKTGLAVGLNKGHKTTARVVKPRVSRTKGHLSKRTAFVREVVKEVAGLAPYERRVIELLRNSKDKRARKLAKKRLGTFGRAKRKVDELQRVIAESRRAH

SEQ ID NO: 2858 - DNA, 333 bp, Oryza sativa
  CDS (1)..(333)
atggcgccgccgcagcccaagtcggggctcttcgtcggcatcaacaagggccacgtcgtcaccaagcgcgagctgccacctcgcccgtccgaccgcaaggggaaaagtaccaagagagtgaattttgtcaggggcttgattagggaggttgtgggatttgctccatatgagaaacgaatcactgagcttctgaaggttggaaaggacaagcgtgcactgaaggtcgctaagagaaagctcggtacccacaagagagcaaagaagaagagagaggagatggcgggtgtcatcaggaagatgaggtctgctggtactactgacaagaagaaatag

SEQ ID NO: 2859 - protein, 110 aa, Oryza sativa
MAPPQPKSGLFVGINKGHVVTKRELPPRPSDRKGKSTKRVNFVRGLIREVVGFAPYEKRITELLKVGKDKRALKVAKRKLGTHKRAKKKREEMAGVIRKMRSAGTTDKKK

SEQ ID NO: 2860 - DNA, 342 bp, Oryza sativa
  CDS (1)..(342)
atggcgccgtcgcagccgaagtccgggctcttcgtgggcatcaacaagggccacgtcgtcaccaagcgcgagctgccgcctcgcccgtccgaccgcaaggggaaatccaccaagagggtgacctttgtcaggaacttgatcagggaggttgctggatttgctccctatgagaagcgtatcactgagcttctcaaagttggcaaggacaagcgtgcactgaaggtggcaaagagaaagcttggcacccacaagagggccaagaagaagagagaggagatggctggtgtcctcaggaagatgaggtctggtggcggtcacgctcacaccgagaagaagaaatag

SEQ ID NO: 2861 - protein, 113 aa, Oryza sativa
MAPSQPKSGLFVGINKGHVVTKRELPPRPSDRKGKSTKRVTFVRNLIREVAGFAPYEKRITELLKVGKDKRALKVAKRKLGTHKRAKKKREEMAGVLRKMRSGGGHAHTEKKK

SEQ ID NO: 2862 - DNA, 324 bp, Oryza sativa
  CDS (1)..(324)
atggcgccgtcgcagccgaagtccgggctcttcgtgggcatcaacaagggccacgtcgtcaccaagcgcgagctgccgcctcgcccgtccgaccgcaaggggaaatccaccaagagggtgacctttgtcaggaacttgatcagggaggttgctggatttgctccctatgagaagcgtatcactgagcttctcaaagttggcaaggacaagcgtgcactgaaggtggcaaagagaaagcttggcacccacaagagggccaagaagaagagagaggagatggctggtgtcctcaggaagatgaggtgtgtaatcttccagccttga

SEQ ID NO: 2863 - protein, 107 aa, Oryza sativa
MAPSQPKSGLFVGINKGHVVTKRELPPRPSDRKGKSTKRVTFVRNLIREVAGFAPYEKRITELLKVGKDKRALKVAKRKLGTHKRAKKKREEMAGVLRKMRCVIFQP

SEQ ID NO: 2864 - DNA, 348 bp, Brassica napus
  CDS (1)..(348)
atgacagctcctcaagtgaagaccggtttgttcgtggggttgaacaagggacatgttgtcaccagacgcgagttggctcctcgtccccgtgctcgcaaaggacaaacgagcaagaggacactctttatcagatcattgataagggaagttgccggttttgctccctacgagaagagaatcactgagcttcttaaggttggtaaagacaaacgtgctctcaaggtggctaagcgaaagttgggaacacacaagagagccaagaggaagagagaggagatgtctagcgttctccgcaagatgaggtctggtggtggtggtggtggcggtgctactgagaagaagaagtga

SEQ ID NO: 2865 - protein, 115 aa, Brassica napus
MTAPQVKTGLFVGLNKGHVVTRRELAPRPRARKGQTSKRTLFIRSLIREVAGFAPYEKRITELLKVGKDKRALKVAKRKLGTHKRAKRKREEMSSVLRKMRSGGGGGGGATEKKK

SEQ ID NO: 2866 - DNA, 339 bp, Brassica napus
  CDS (1)..(339)
atgacaactccgcaagtaaagaccggtttgtttgtcggtttgaacaagggacatgttgtcaccagacgcgagttggctcctcgtccccgtgctcgcaaaggaaaaacaagcaagaggacacttttcatcagatctttgatcagggaagttgctggttttgctccctacgagaagagaatcactgagcttctaaaggttggtaaagacaagcgtgctcttaaggtggctaagcgaaagttgggtacccacaagagagccaagaggaagagagaggtgatgtctagcgtcctccgcaagatgaggtctggtggtggtggtgtaaccgagaagaagaaatga

SEQ ID NO: 2867 - protein, 112 aa, Brassica napus
MTTPQVKTGLFVGLNKGHVVTRRELAPRPRARKGKTSKRTLFIRSLIREVAGFAPYEKRITELLKVGKDKRALKVAKRKLGTHKRAKRKREVMSSVLRKMRSGGGGVTEKKK

SEQ ID NO: 2868 - DNA, 339 bp, Brassica napus
  CDS (1)..(339)
atggcagcaccacaagtgaagactggtttgttcgttggtctgaacaaaggacacgttgtcaccagacgcgagttggctcctcgtcctaactctcgcaaagggaaaacgagcaagaggacgttgttcatcaggtcactgatcagagaagttgctggatttgctccctacgagaagagaatcactgagcttctcaaggttggtaaagacaagagggctcttaaggttgctaagaggaagttgggtacccacaagagagccaagaggaagagagaggagatgtctagtgttctccgcaagatgaggtctggtggaggtgctactactgagaagaagaagtaa

SEQ ID NO: 2869 - protein, 112 aa, Brassica napus
MAAPQVKTGLFVGLNKGHVVTRRELAPRPNSRKGKTSKRTLFIRSLIREVAGFAPYEKRITELLKVGKDKRALKVAKRKLGTHKRAKRKREEMSSVLRKMRSGGGATTEKKK

SEQ ID NO: 2870 - DNA, 333 bp, Linum usitatissimum
  CDS (1)..(333)
atggctcctgctcaggcgaagagtggtctgttcgtcggactgaacaaaggacacatcgtcactaagcgcgagctgccacctcgtccttccgatagaaaggggaaaacaagcaagagggtgcaccttgtgaggaaccttatcagggaagtagctggttttgctccatatgagaagagagttattgagctcctgaaggttggaaaggacaagcgagctctgaaactttctaagagaaagctcggtacccacaagaggggcaagaagaagagagaggagctggccaccgcactccgcaagatgagggctgcaggaggaggcgagaagaagaagtga

SEQ ID NO: 2871 - protein, 110 aa, Linum usitatissimum
MAPAQAKSGLFVGLNKGHIVTKRELPPRPSDRKGKTSKRVHLVRNLIREVAGFAPYEKRVIELLKVGKDKRALKLSKRKLGTHKRGKKKREELATALRKMRAAGGGEKKK

SEQ ID NO: 2872 - DNA, 336 bp, Zea mays
  CDS (1)..(336)
atggcgccgccgcagccaaagtcgggcctcttcgttggcatcaacaagggtcatgtcgtcaccaagcgcgagctgcctccccgcccgtgccaccgcaaggggaaatcaacgaagagggtgtctatggtcaggggcctgatcagagaggttgctgggtttgctccttatgagaagcgtatcactgagcttctgaaggttggcaaggacaagcgtgccctgaagcttgctaagagaaagcttggaactcacaagagggcaaagaagaagagagaggagatggcgggcgtcctcaggaagatgaggtcggctggtacgcacactgacaagaagaaatag

SEQ ID NO: 2873 - protein, 111 aa, Zea mays
MAPPQPKSGLFVGINKGHVVTKRELPPRPCHRKGKSTKRVSMVRGLIREVAGFAPYEKRITELLKVGKDKRALKLAKRKLGTHKRAKKKREEMAGVLRKMRSAGTHTDKKK

SEQ ID NO: 2874 - DNA, 342 bp, Hordeum vulgare
  CDS (1)..(342)
atggcgccgtcgcagcccaagtcagggctcttcgtgggcatcaacaagggccacgtcatcaccaagcgcgagctgccgccccgcccgtccgaccgcaaggggaaaggcacaaagagggtgcattttgtcaggaacttgatcagggaggttgctggattcgctccatatgagaaacgcatcactgagcttcttaaggttggaaaggacaagcgtgcactcaaggtcgccaagagaaagcttggtactcacaagagagcaaagaagaagagagaggagatgtcaagtgtcctgaggaagatgaggtctgctggtggtggtggtgctggtgacaagaagaaatag

SEQ ID NO: 2875 - protein, 113 aa, Hordeum vulgare
MAPSQPKSGLFVGINKGHVITKRELPPRPSDRKGKGTKRVHFVRNLIREVAGFAPYEKRITELLKVGKDKRALKVAKRKLGTHKRAKKKREEMSSVLRKMRSAGGGGAGDKKK

SEQ ID NO: 2876 - DNA, 333 bp, Helianthus annuus
  CDS (1)..(333)
atggcgcccaagcagcctaacacaggcctctttgttggattgaacaagggccatgttgtcaccaagaaggagttggcccctcgtccatctgacaggaaaggcaaaacaagcaaaagggttcattttgtgaggagtttgatccgtgaagtagctggatttgcgccatatgagaagaggattactgagctgttgaaggttggaaaggacaagcgggcattgaaggtggctaagagaaagttgggcacccacaagagggcaaagaagaagagagaggagatgtccagcgttctccgcaagatgagagctggtggaggtgcagaaaagaagaagtga

SEQ ID NO: 2877 - protein, 110 aa, Helianthus annuus
MAPKQPNTGLFVGLNKGHVVTKKELAPRPSDRKGKTSKRVHFVRSLIREVAGFAPYEKRITELLKVGKDKRALKVAKRKLGTHKRAKKKREEMSSVLRKMRAGGGAEKKK

SEQ ID NO: 2878 - DNA, 339 bp, Brassica napus
  CDS (1)..(339)
atggcaacaccacaagtgaagactggtttgttcgttggtctgaacaaaggacacgtcgtcaccagacgcgagttggctcctcgtcctaactctcgcaaagggaaaacgagcaagaggacattgttcatcagatcactgatcagggaagttgctggatttgctccttacgagaagagaatcactgagcttctcaaggttggtaaagacaagagggctcttaaggttgctaagaggaagttgggcacccacaagagagccaagcgaaagagagaggagatgtctagtgttctccgcaagatgaggtctggtggaggtgctactactgagaagaagaaataa

SEQ ID NO: 2879 - protein, 112 aa, Brassica napus
MATPQVKTGLFVGLNKGHVVTRRELAPRPNSRKGKTSKRTLFIRSLIREVAGFAPYEKRITELLKVGKDKRALKVAKRKLGTHKRAKRKREEMSSVLRKMRSGGGATTEKKK

SEQ ID NO: 2880 - DNA, 339 bp, Brassica napus
  CDS (1)..(339)
atgacagctcctcaagtgaagaccggtttgttcgtggggttgaacaagggacatgttgtcaccagacgcgagctggctcctcgtccccgtgctcgcaaaggacaaacgagcaagaggacactctttatcagatccttgataagggaagttgccggttttgccccctacgagaagagaatcactgagcttttaaaggttggtaaagacaagcgtgctctcaaggtggctaagcgaaagttgggaacccacaagagagccaagaggaagagagaggagatgtctagcgttctccgcaagatgaggtctggtggtggtggtgctactgagaagaagaaatga

SEQ ID NO: 2881 - protein, 112 aa, Brassica napus
MTAPQVKTGLFVGLNKGHVVTRRELAPRPRARKGQTSKRTLFIRSLIREVAGFAPYEKRITELLKVGKDKRALKVAKRKLGTHKRAKRKREEMSSVLRKMRSGGGGATEKKK

SEQ ID NO: 2882 - DNA, 339 bp, Brassica napus
  CDS (1)..(339)
atggcagcaccacaagtaaagactggtctgttcgtggggttgaacaaaggacacgtgacgacaagacgcgagctagctcctcgtcccaactctcgcaaagggaaaacgagcaagaggacactgttcatcagatctttgatcagggaagttgctggattcgctccttacgagaagagaatcactgagcttctcaaggttggtaaagacaagagggctctcaaggttgccaagaggaagttgggtactcacaagagagccaagcgaaagagagaggagatgtctagtgttctccgcaagatgaggtctggtggtggtggtgttactgagaagaagaagtaa

SEQ ID NO: 2883 - protein, 112 aa, Brassica napus
MAAPQVKTGLFVGLNKGHVTTRRELAPRPNSRKGKTSKRTLFIRSLIREVAGFAPYEKRITELLKVGKDKRALKVAKRKLGTHKRAKRKREEMSSVLRKMRSGGGGVTEKKK

SEQ ID NO: 2884 - DNA, 339 bp, Brassica napus
  CDS (1)..(339)
atgacaactccgcaagtaaagaccggtttgtttgtcggtttgaacaagggacatgttgtcaccagacgcgagttggctcctcgtccccgtgctcgcaaaggaaaaacaagcaagaggacacttttcatcagatctttgatcagggaagttgctggttttgctccctacgagaagagaatcactgagcttctaaaggttggtaaagacaagcgtgctcttaaggtggctaagcgaaagttgggtacccacaagagagccaagaggaagagagaggagatgtctagcgtcctccgcaagatgaggtctggtggtggtggtgtaaccgagaagaagaaatga

SEQ ID NO: 2885 - protein, 112 aa, Brassica napus
MTTPQVKTGLFVGLNKGHVVTRRELAPRPRARKGKTSKRTLFIRSLIREVAGFAPYEKRITELLKVGKDKRALKVAKRKLGTHKRAKRKREEMSSVLRKMRSGGGGVTEKKK

SEQ ID NO: 2886 - DNA, 333 bp, Glycine max
  CDS (1)..(333)
atggctcccaaacatcttagtacgggtttgtttgttggattgaacaagggtcacgttgtcaccaagaaggagttgcctccacgcccttcagatcgtaaggggaaaacaagcaagcgagtgcactttgtgaggaacctcattcgagaggttgccggctttgcaccttatgaaaagcgaataactgagttgctcaaggttggaaaagataagagggcactgaaagttgccaagagaaagcttggaacccataagcgcgcaaagaagaagagagaggagatgtccaatgttctccggaagatgagggctggtggagctggagacaagaagaaataa

SEQ ID NO: 2887 - protein, 110 aa, Glycine max
MAPKHLSTGLFVGLNKGHVVTKKELPPRPSDRKGKTSKRVHFVRNLIREVAGFAPYEKRITELLKVGKDKRALKVAKRKLGTHKRAKKKREEMSNVLRKMRAGGAGDKKK

SEQ ID NO: 2888 - DNA, 336 bp, Zea mays
  CDS (1)..(336)
atggcgccgccgcagccgaagtcgggcctcttcgtgggcatcaacaagggccatgtcgtcaccaagcgcgagctgcctctgcgcccgtcccaccgcaaggggaaagcaacgaagagggtgtccatggtcaggggcctgatcagagaggttgctggctttgctccttatgagaagcgtatcaccgagcttctgaaggttggcaaggacaagcgcgctctgaagcttgccaagagaaagcttggaactcacaagagggcaaagaagaagagagaggagatgatgggcgtcctcaggaagatgagatcggctggtacgcacactgacaagaagaaataa

SEQ ID NO: 2889 - protein, 111 aa, Zea mays
MAPPQPKSGLFVGINKGHVVTKRELPLRPSHRKGKATKRVSMVRGLIREVAGFAPYEKRITELLKVGKDKRALKLAKRKLGTHKRAKKKREEMMGVLRKMRSAGTHTDKKK

SEQ ID NO: 2890 - DNA, 336 bp, Zea mays
  CDS (1)..(336)
atggcgccgcagcagccgaagtcgggcctcttcgtgggcatcaacaagggccatgtcgtcacaaagcgcgagctgcctctgcgcccgtcccaccgcaaggggaaagcaacgaagagggtgtccatggtaaggggcctgataagagaggttgctggctttgctccttatgagaagcgtatcaccgagcttctgaaggttggcaaggaaaagcgcgctctgaagcttgccaagagaaagcttggaactcacaagagggcaaagaagaagagagaggagatgatgggcgtcctcaggaagatgagatcggctggtacgaaaactgacaagaagaaataa

SEQ ID NO: 2891 - protein, 111 aa, Zea mays
MAPQQPKSGLFVGINKGHVVTKRELPLRPSHRKGKATKRVSMVRGLIREVAGFAPYEKRITELLKVGKEKRALKLAKRKLGTHKRAKKKREEMMGVLRKMRSAGTKTDKKK

SEQ ID NO: 2892 - DNA, 336 bp, Zea mays
  CDS (1)..(336)
atggcgccgccgcaaccaaagtcgggccttttcgttggcatcaacaagggtcatgtcgtcgccaagcacgagctgcctccccgcccgtgcccccgcaaggggaaatcaacgaagagggtgtctatggtcaggggcctgatcagagaggttgctgggtttgctccttatgagaagcgtatcactgagcttctgaaggttggcaaggacaagcgtgccctgaagcttgctaagagaaagcttggaactcccaagagggcaaagaagaagagagaggagatggcgggcgtcctcaggaagatgaggtcggctggtacgcacactgacaaaaagaaatag

SEQ ID NO: 2893 - protein, 111 aa, Zea mays
MAPPQPKSGLFVGINKGHVVAKHELPPRPCPRKGKSTKRVSMVRGLIREVAGFAPYEKRITELLKVGKDKRALKLAKRKLGTPKRAKKKREEMAGVLRKMRSAGTHTDKKK

SEQ ID NO: 2894 - DNA, 336 bp, Zea mays
  CDS (1)..(336)
atggcgcccccgcaaccaaagtcgggccttttcgttggcatcgacaagggtcatgtcgtcaccaagcgcgagctgcctccccgcccgtgccaccgcaaggggaaatcaacgaagagggtgtctatggtcaggggcctgatcagagaggttgctgggtttgctccttatgagaagcgtatcactgagcttctgaaggttggcaaggacaagcgtgccctgaagcttgctaagagaaagcttggaactcacaagagggcaaagaagaagagagaggagatggcgggcgtcctcaggaagatgaggtcggctggtacgcacactgacaaaaagaaatag

SEQ ID NO: 2895 - protein, 111 aa, Zea mays
MAPPQPKSGLFVGIDKGHVVTKRELPPRPCHRKGKSTKRVSMVRGLIREVAGFAPYEKRITELLKVGKDKRALKLAKRKLGTHKRAKKKREEMAGVLRKMRSAGTHTDKKK

SEQ ID NO: 2896 - DNA, 24 bp, Artificial sequence
  primer
atggctgtcaagactggtatcgct

SEQ ID NO: 2897 - DNA, 24 bp, Artificial sequence
  primer
ttaatgacgacgagaggcagcaat

SEQ ID NO: 2898 - protein, 119 aa, Artificial sequence
  consensus sequence
  Variant (2)..(8): Xaa in position 2 to 8 is any amino acid
  Variant (9)..(15): Xaa in position 9 to 15 is any or no amino acid
  Variant (18)..(18): Xaa in position 18 is any amino acid
  Variant (19)..(20): Xaa in position 19 to 20 is any or no amino acid
  Variant (25)..(26): Xaa in position 25 to 26 is any amino acid
  Variant (28)..(33): Xaa in position 28 to 33 is any amino acid
  Variant (34)..(45): Xaa in position 34 to 45 is any or no amino acid
  Variant (48)..(49): Xaa in position 48 to 49 is any amino acid
  Variant (50)..(50): Xaa in position 50 is any or no amino acid
  Variant (53)..(54): Xaa in position 53 to 54 is any amino acid
  Variant (55)..(55): Xaa in position 55 is any or no amino acid
  Variant (57)..(59): Xaa in position 57 to 59 is any amino acid
  Variant (61)..(61): Xaa in position 61 is any amino acid
  Variant (63)..(65): Xaa in position 63 to 65 is any amino acid
  Variant (69)..(69): Xaa in position 69 is any amino acid
  Variant (71)..(71): Xaa in position 71 is any amino acid
  Variant (76)..(76): Xaa in position 76 is any amino acid
  Variant (78)..(79): Xaa in position 78 to 79 is any amino acid
  Variant (83)..(84): Xaa in position 83 to 84 is any amino acid
  Variant (85)..(85): Xaa in position 85 is any or no amino acid
  Variant (91)..(91): Xaa in position 91 is any amino acid
  Variant (93)..(93): Xaa in position 93 is any amino acid
  Variant (94)..(94): Xaa in position 94 is any or no amino acid
  Variant (96)..(97): Xaa in position 96 to 97 is any amino acid
  Variant (101)..(102): Xaa in position 101 to 102 is any amino acid
  Variant (106)..(106): Xaa in position 106 is any amino acid
  Variant (108)..(108): Xaa in position 108 is any amino acid
  Variant (111)..(118): Xaa in position 111 to 118 is any amino acid
MXXXXXXXXXXXXXXVGXXXNKGHXXTXXXXXXXXXXXXXXXXXXRPXXXKGXXXKXXXFXRXXXREVXGXAPYEXRXXELLXXXKDKRAXKXXKXXLGTXXRAKXKXEEXXXXXXXXR

SEQ ID NO: 2899 - protein, 29 aa, Artificial sequence
  protein pattern
  Variant (2)..(2): Xaa in position 2 is any amino acid
  Variant (3)..(6): Xaa in position 3 to 6 is any or no amino acid
  Variant (7)..(7): Xaa in position 7 is Ile or Val
  Variant (8)..(8): Xaa in position 8 is Ala, Ser, Thr or Val
  Variant (10)..(10): Xaa in position 10 is any amino acid
  Variant (11)..(11): Xaa in position 11 is Ala or Ser
  Variant (15)..(15): Xaa in position 15 is Lys or Arg
  Variant (17)..(18): Xaa in position 17 to 18 is any amino acid
  Variant (19)..(19): Xaa in position 19 is Glu or Asp
  Variant (21)..(21): Xaa in position 21 is Ile or Leu
  Variant (22)..(22): Xaa in position 22 is Lys or Arg
  Variant (23)..(23): Xaa in position 23 is Asn or Val
  Variant (24)..(24): Xaa in position 24 is Ala, Gly or Ser
  Variant (25)..(25): Xaa in position 25 is any amino acid
  Variant (26)..(26): Xaa in position 26 is Asp or Glu
RXXXXXXXGXXPYEXRXXXLXXXXXXKRA

SEQ ID NO: 2900 - DNA, 9469 bp, Artificial Sequence
  plasmid VC-MME354-1QCZ
  5'UTR (2130)..(2294)
  transit_peptide (2295)..(2402)
  CDS (2295)..(2402)
  transit_peptide (2480)..(2548)
  CDS (2480)..(2548)
  CDS (2549)..(2566): adapter
agctttgggcggatcctctagaggacaatcagtaaattgaacggagaatattattcataaaaatacgatagtaacgggtgatatattcattagaatgaaccgaaaccggcggtaaggatctgagctacacatgctcaggttttttacaacgtgcacaacagaattgaaagcaaatatcatgcgatcataggcgtctcgcatatctcattaaagcagggcatgccggtcgagtcaaatctcggtgacgggcaggaccggacggggcggtaccggcaggctgaagtccagctgccagaaacccacgtcatgccagttcccgtgcttgaagccggccgcccgcagcatgccgcggggggcatatccgagcgcctcgtgcatgcgcacgctcgggtcgttgggcagcccgatgacagcgaccacgctcttgaagccctgtgcctccagggacttcagcaggtgggtgtagagcgtggagcccagtcccgtccgctggtggcggggggagacgtacacggtcgactcggccgtccagtcgtaggcgttgcgtgccttccaggggcccgcgtaggcgatgccggcgacctcgccgtccacctcggcgacgagccagggatagcgctcccgcagacggacgaggtcgtccgtccactcctgcggttcctgcggctcggtacggaagttgaccgtgcttgtctcgatgtagtggttgacgatggtgcagaccgccggcatgtccgcctcggtggcacggcggatgtcggccgggcgtcgttctgggctcatggtagactcgacggatccacgtgtggaagatatgaatttttttgagaaactagataagattaatgaatatcggtgttttggttttttcttgtggccgtctttgtttatattgagatttttcaaatcagtgcgcaagacgtgacgtaagtatccgagtcagtttttatttttctactaatttggtcgaatctagattcgacggtatcgataagctcgcggatccctgaaagcgacgttggatgttaacatctacaaattgccttttcttatcgaccatgtacgtaagcgcttacgtttttggtggacccttgaggaaactggtagctgttgtgggcctgtggtctcaagatggatcattaatttccaccttcacctacgatggggggcatcgcaccggtgagtaatattgtacggctaagagcgaatttggcctgtaggatccctgaaagcgacgttggatgttaacatctacaaattgccttttcttatcgaccatgtacgtaagcgcttacgtttttggtggacccttgaggaaactggtagctgttgtgggcctgtggtctcaagatggatcattaatttccaccttcacctacgatggggggcatcgcaccggtgagtaatattgtacggctaagagcgaatttggcctgtaggatccctgaaagcgacgttggatgttaacatctacaaattgccttttcttatcgaccatgtacgtaagcgcttacgtttttggtggacccttgaggaaactggtagctgttgtgggcctgtggtctcaagatggatcattaatttccaccttcacctacgatggggggcatcgcaccggtgagtaatattgtacggctaagagcgaatttggcctgtaggatccgcgagctggtcaatcccattgcttttgaagcagctcaacattgatctctttctcgatcgagggagatttttcaaatcagtgcgcaagacgtgacgtaagtatccgagtcagtttttatttttctactaatttggtcgtttatttcggcgtgtaggacatggcaaccgggcctgaatttcgcgggtattctgtttctattccaactttttcttgatccgcagccattaacgacttttgaatagatacgctgacacgccaagcctcgctagtcaaaagtgtaccaaacaacgctttacagcaagaacggaatgcgcgtgacgctcgcggtgacgccatttcgccttttcagaaatggataaatagccttgcttcctattatatcttcccaaattaccaatacattacactagcatctgaatttcataaccaatctcgatacaccaaatcgaagatctccctggaattcgcataaacttatcttcatagttgccactccaatttgctccttgaatctcctccacccaatacataatccactcctccatcacccacttcactactaaatcaaacttaactctgtttttctctctcctcctttcatttcttattcttccaatcatcgtactccgccatgaccaccgctgtcaccgccgctgtttctttcccctctaccaaaaccacctctctctccgcccgaagctcctccgtcatttcccctgacaaaatcagctacaaaaaggtgattcccaatttcactgtgttttttattaataatttgttattttgatgatgagatgattaatttgggtgctgcaggttcctttgtactacaggaatgtatctgcaactgggaaaatgggacccatcagggcccagatcgcctctgaattccagctgaccaccatggcaattcccggggatcagctcgaatttccccgatcgttcaaacatttggcaataaagtttcttaagattgaatcctgttgccggtcttgcgatgattatcatataatttctgttgaattacgttaagcatgtaataattaacatgtaatgcatgacgttatttatgagatgggtttttatgattagagtcccgcaattatacatttaatacgcgatagaaaacaaaatatagcgcgcaaactaggataaattatcgcgcgcggtgtcatctatgttactagatcgggaattggcatgcaagcttggcactggccgtcgttttacaacgtcgtgactgggaaaaccctggcgttacccaacttaatcgccttgcagcacatccccctttcgccagctggcgtaatagcgaagaggcccgcaccgatcgcccttcccaacagttgcgcagcctgaatggcgaatgctagagcagcttgagcttggatcagattgtcgtttcccgccttcagtttaaactatcagtgtttgacaggatatattggcgggtaaacctaagagaaaagagcgtttattagaataatcggatatttaaaagggcgtgaaaaggtttatccgttcgtccatttgtatgtgcatgccaaccacagggttcccctcgggatcaaagtactttgatccaacccctccgctgctatagtgcagtcggcttctgacgttcagtgcagccgtcttctgaaaacgacatgtcgcacaagtcctaagttacgcgacaggctgccgccctgcccttttcctggcgttttcttgtcgcgtgttttagtcgcataaagtagaatacttgcgactagaaccggagacattacgccatgaacaagagcgccgccgctggcctgctgggctatgcccgcgtcagcaccgacgaccaggacttgaccaaccaacgggccgaactgcacgcggccggctgcaccaagctgttttccgagaagatcaccggcaccaggcgcgaccgcccggagctggccaggatgcttgaccacctacgccctggcgacgttgtgacagtgaccaggctagaccgcctggcccgcagcacccgcgacctactggacattgccgagcgcatccaggaggccggcgcgggcctgcgtagcctggcagagccgtgggccgacaccaccacgccggccggccgcatggtgttgaccgtgttcgccggcattgccgagttcgagcgttccctaatcatcgaccgcacccggagcgggcgcgaggccgccaaggcccgaggcgtgaagtttggcccccgccctaccctcaccccggcacagatcgcgcacgcccgcgagctgatcgaccaggaaggccgcaccgtgaaagaggcggctgcactgcttggcgtgcatcgctcgaccctgtaccgcgcacttgagcgcagcgaggaagtgacgcccaccgaggccaggcggcgcggtgccttccgtgaggacgcattgaccgaggccgacgccctggcggccgccgagaatgaacgccaagaggaacaagcatgaaaccgcaccaggacggccaggacgaaccgtttttcattaccgaagagatcgaggcggagatgatcgcggccgggtacgtgttcgagccgcccgcgcacgtctcaaccgtgcggctgcatgaaatcctggccggtttgtctgatgccaagctggcggcctggccggccagcttggccgctgaagaaaccgagcgccgccgtctaaaaaggtgatgtgtatttgagtaaaacagcttgcgtcatgcggtcgctgcgtatatgatgcgatgagtaaataaacaaatacgcaaggggaacgcatgaaggttatcgctgtacttaaccagaaaggcgggtcaggcaagacgaccatcgcaacccatctagcccgcgccctgcaactcgccggggccgatgttctgttagtcgattccgatccccagggcagtgcccgcgattgggcggccgtgcgggaagatcaaccgctaaccgttgtcggcatcgaccgcccgacgattgaccgcgacgtgaaggccatcggccggcgcgacttcgtagtgatcgacggagcgccccaggcggcggacttggctgtgtccgcgatcaaggcagccgacttcgtgctgattccggtgcagccaagcccttacgacatatgggccaccgccgacctggtggagctggttaagcagcgcattgaggtcacggatggaaggctacaagcggcctttgtcgtgtcgcgggcgatcaaaggcacgcgcatcggcggtgaggttgccgaggcgctggccgggtacgagctgcccattcttgagtcccgtatcacgcagcgcgtgagctacccaggcactgccgccgccggcacaaccgttcttgaatcagaacccgagggcgacgctgcccgcgaggtccaggcgctggccgctgaaattaaatcaaaactcatttgagttaatgaggtaaagagaaaatgagcaaaagcacaaacacgctaagtgccggccgtccgagcgcacgcagcagcaaggctgcaacgttggccagcctggcagacacgccagccatgaagcgggtcaactttcagttgccggcggaggatcacaccaagctgaagatgtacgcggtacgccaaggcaagaccattaccgagctgctatctgaatacatcgcgcagctaccagagtaaatgagcaaatgaataaatgagtagatgaattttagcggctaaaggaggcggcatggaaaatcaagaacaaccaggcaccgacgccgtggaatgccccatgtgtggaggaacgggcggttggccaggcgtaagcggctgggttgcctgccggccctgcaatggcactggaacccccaagcccgaggaatcggcgtgagcggtcgcaaaccatccggcccggtacaaatcggcgcggcgctgggtgatgacctggtggagaagttgaaggccgcgcaggccgcccagcggcaacgcatcgaggcagaagcacgccccggtgaatcgtggcaagcggccgctgatcgaatccgcaaagaatcccggcaaccgccggcagccggtgcgccgtcgattaggaagccgcccaagggcgacgagcaaccagattttttcgttccgatgctctatgacgtgggcacccgcgatagtcgcagcatcatggacgtggccgttttccgtctgtcgaagcgtgaccgacgagctggcgaggtgatccgctacgagcttccagacgggcacgtagaggtttccgcagggccggccggcatggccagtgtgtgggattacgacctggtactgatggcggtttcccatctaaccgaatccatgaaccgataccgggaagggaagggagacaagcccggccgcgtgttccgtccacacgttgcggacgtactcaagttctgccggcgagccgatggcggaaagcagaaagacgacctggtagaaacctgcattcggttaaacaccacgcacgttgccatgcagcgtacgaagaaggccaagaacggccgcctggtgacggtatccgagggtgaagccttgattagccgctacaagatcgtaaagagcgaaaccgggcggccggagtacatcgagatcgagctagctgattggatgtaccgcgagatcacagaaggcaagaacccggacgtgctgacggttcaccccgattactttttgatcgatcccggcatcggccgttttctctaccgcctggcacgccgcgccgcaggcaaggcagaagccagatggttgttcaagacgatctacgaacgcagtggcagcgccggagagttcaagaagttctgtttcaccgtgcgcaagctgatcgggtcaaatgacctgccggagtacgatttgaaggaggaggcggggcaggctggcccgatcctagtcatgcgctaccgcaacctgatcgagggcgaagcatccgccggttcctaatgtacggagcagatgctagggcaaattgccctagcaggggaaaaaggtcgaaaaggtctctttcctgtggatagcacgtacattgggaacccaaagccgtacattgggaaccggaacccgtacattgggaacccaaagccgtacattgggaaccggtcacacatgtaagtgactgatataaaagagaaaaaaggcgatttttccgcctaaaactctttaaaacttattaaaactcttaaaacccgcctggcctgtgcataactgtctggccagcgcacagccgaagagctgcaaaaagcgcctacccttcggtcgctgcgctccctacgccccgccgcttcgcgtcggcctatcgcggccgctggccgctcaaaaatggctggcctacggccaggcaatctaccagggcgcggacaagccgcgccgtcgccactcgaccgccggcgcccacatcaaggcaccctgcctcgcgcgtttcggtgatgacggtgaaaacctctgacacatgcagctcccggagacggtcacagcttgtctgtaagcggatgccgggagcagacaagcccgtcagggcgcgtcagcgggtgttggcgggtgtcggggcgcagccatgacccagtcacgtagcgatagcggagtgtatactggcttaactatgcggcatcagagcagattgtactgagagtgcaccatatgcggtgtgaaataccgcacagatgcgtaaggagaaaataccgcatcaggcgctcttccgcttcctcgctcactgactcgctgcgctcggtcgttcggctgcggcgagcggtatcagctcactcaaaggcggtaatacggttatccacagaatcaggggataacgcaggaaagaacatgtgagcaaaaggccagcaaaaggccaggaaccgtaaaaaggccgcgttgctggcgtttttccataggctccgcccccctgacgagcatcacaaaaatcgacgctcaagtcagaggtggcgaaacccgacaggactataaagataccaggcgtttccccctggaagctccctcgtgcgctctcctgttccgaccctgccgcttaccggatacctgtccgcctttctcccttcgggaagcgtggcgctttctcatagctcacgctgtaggtatctcagttcggtgtaggtcgttcgctccaagctgggctgtgtgcacgaaccccccgttcagcccgaccgctgcgccttatccggtaactatcgtcttgagtccaacccggtaagacacgacttatcgccactggcagcagccactggtaacaggattagcagagcgaggtatgtaggcggtgctacagagttcttgaagtggtggcctaactacggctacactagaaggacagtatttggtatctgcgctctgctgaagccagttaccttcggaaaaagagttggtagctcttgatccggcaaacaaaccaccgctggtagcggtggtttttttgtttgcaagcagcagattacgcgcagaaaaaaaggatctcaagaagatcctttgatcttttctacggggtctgacgctcagtggaacgaaaactcacgttaagggattttggtcatgcattctaggtactaaaacaattcatccagtaaaatataatattttattttctcccaatcaggcttgatccccagtaagtcaaaaaatagctcgacatactgttcttccccgatatcctccctgatcgaccggacgcagaaggcaatgtcataccacttgtccgccctgccgcttctcccaagatcaataaagccacttactttgccatctttcacaaagatgttgctgtctcccaggtcgccgtgggaaaagacaagttcctcttcgggcttttccgtctttaaaaaatcatacagctcgcgcggatctttaaatggagtgtcttcttcccagttttcgcaatccacatcggccagatcgttattcagtaagtaatccaattcggctaagcggctgtctaagctattcgtatagggacaatccgatatgtcgatggagtgaaagagcctgatgcactccgcatacagctcgataatcttttcagggctttgttcatcttcatactcttccgagcaaaggacgccatcggcctcactcatgagcagattgctccagccatcatgccgttcaaagtgcaggacctttggaacaggcagctttccttccagccatagcatcatgtccttttcccgttccacatcataggtggtccctttataccggctgtccgtcatttttaaatataggttttcattttctcccaccagcttatataccttagcaggagacattccttccgtatcttttacgcagcggtatttttcgatcagttttttcaattccggtgatattctcattttagccatttattatttccttcctcttttctacagtatttaaagataccccaagaagctaattataacaagacgaactccaattcactgttccttgcattctaaaaccttaaataccagaaaacagctttttcaaagttgttttcaaagttggcgtataacatagtatcgacggagccgattttgaaaccgcggtgatcacaggcagcaacgctctgtcatcgttacaatcaacatgctaccctccgcgagatcatccgtgtttcaaacccggcagcttagttgccgttcttccgaatagcatcggtaacatgagcaaagtctgccgccttacaacggctctcccgctgacgccgtcccggactgatgggctgcctgtatcgagtggtgattttgtgccgagctgccggtcggggagctgttggctggctggtggcaggatatattgtggtgtaaacaaattgacgcttagacaacttaataacacattgcggacgtttttaatgtactgaattaacgccgaatta

SEQ ID NO: 2901 - protein, 65 aa, Artificial Sequence
  Synthetic Construct
MTTAVTAAVSFPSTKTTSLSARSSSVISPDKISYKKVPLYYRNVSATGKMGPIRAQIASEFQLTT

SEQ ID NO: 2902 - DNA, 9045 bp, Artificial Sequence; identical to SEQ ID NO: 1
  plasmid VC-MME220-1qcz

SEQ ID NO: 2903 - DNA, 9466 bp, Artificial Sequence
  plasmid VC-MME432-1qcz
  5'UTR (2125)..(2289)
  transit_peptide (2290)..(2397)
  CDS (2290)..(2397)
  transit_peptide (2475)..(2543)
  CDS (2475)..(2543)
  CDS (2544)..(2552): adapter
gctttgggcggatcctctagaggacaatcagtaaattgaacggagaatattattcataaaaatacgatagtaacgggtgatatattcattagaatgaaccgaaaccggcggtaaggatctgagctacacatgctcaggttttttacaacgtgcacaacagaattgaaagcaaatatcatgcgatcataggcgtctcgcatatctcattaaagcagggcatgccggtcgagtcaaatctcggtgacgggcaggaccggacggggcggtaccggcaggctgaagtccagctgccagaaacccacgtcatgccagttcccgtgcttgaagccggccgcccgcagcatgccgcggggggcatatccgagcgcctcgtgcatgcgcacgctcgggtcgttgggcagcccgatgacagcgaccacgctcttgaagccctgtgcctccagggacttcagcaggtgggtgtagagcgtggagcccagtcccgtccgctggtggcggggggagacgtacacggtcgactcggccgtccagtcgtaggcgttgcgtgccttccaggggcccgcgtaggcgatgccggcgacctcgccgtccacctcggcgacgagccagggatagcgctcccgcagacggacgaggtcgtccgtccactcctgcggttcctgcggctcggtacggaagttgaccgtgcttgtctcgatgtagtggttgacgatggtgcagaccgccggcatgtccgcctcggtggcacggcggatgtcggccgggcgtcgttctgggctcatggtagactcgacggatccacgtgtggaagatatgaatttttttgagaaactagataagattaatgaatatcggtgttttggttttttcttgtggccgtctttgtttatattgagatttttcaaatcagtgcgcaagacgtgacgtaagtatccgagtcagtttttatttttctactaatttggtcgaatctagattcgacggtatcgataagctcgcggatccctgaaagcgacgttggatgttaacatctacaaattgccttttcttatcgaccatgtacgtaagcgcttacgtttttggtggacccttgaggaaactggtagctgttgtgggcctgtggtctcaagatggatcattaatttccaccttcacctacgatggggggcatcgcaccggtgagtaatattgtacggctaagagcgaatttggcctgtaggatccctgaaagcgacgttggatgttaacatctacaaattgccttttcttatcgaccatgtacgtaagcgcttacgtttttggtggacccttgaggaaactggtagctgttgtgggcctgtggtctcaagatggatcattaatttccaccttcacctacgatggggggcatcgcaccggtgagtaatattgtacggctaagagcgaatttggcctgtaggatccctgaaagcgacgttggatgttaacatctacaaattgccttttcttatcgaccatgtacgtaagcgcttacgtttttggtggacccttgaggaaactggtagctgttgtgggcctgtggtctcaagatggatcattaatttccaccttcacctacgatggggggcatcgcaccggtgagtaatattgtacggctaagagcgaatttggcctgtaggatccgcgagctggtcaatcccattgcttttgaagcagctcaacattgatctctttctcgatcgagggagatttttcaaatcagtgcgcaagacgtgacgtaagtatccgagtcagtttttatttttctactaatttggtcgtttatttcggcgtgtaggacatggcaaccgggcctgaatttcgcgggtattctgtttctattccaactttttcttgatccgcagccattaacgacttttgaatagatacgctgacacgccaagcctcgctagtcaaaagtgtaccaaacaacgctttacagcaagaacggaatgcgcgtgacgctcgcggtgacgccatttcgccttttcagaaatggataaatagccttgcttcctattatatcttcccaaattaccaatacattacactagcatctgaatttcataaccaatctcgatacaccaaatcgaagatctcccaaacgcataaacttatcttcatagttgccactccaatttgctccttgaatctcctccacccaatacataatccactcctccatcacccacttcactactaaatcaaacttaactctgtttttctctctcctcctttcatttcttattcttccaatcatcgtactccgccatgaccaccgctgtcaccgccgctgtttctttcccctctaccaaaaccacctctctctccgcccgaagctcctccgtcatttcccctgacaaaatcagctacaaaaaggtgattcccaatttcactgtgttttttattaataatttgttattttgatgatgagatgattaatttgggtgctgcaggttcctttgtactacaggaatgtatctgcaactgggaaaatgggacccatcagggcccagatcgcctcttgctcttccatggcaatgattaattaacgaagagcaagagctcgaatttccccgatcgttcaaacatttggcaataaagtttcttaagattgaatcctgttgccggtcttgcgatgattatcatataatttctgttgaattacgttaagcatgtaataattaacatgtaatgcatgacgttatttatgagatgggtttttatgattagagtcccgcaattatacatttaatacgcgatagaaaacaaaatatagcgcgcaaactaggataaattatcgcgcgcggtgtcatctatgttactagatcgggaattggcatgcaagcttggcactggccgtcgttttacaacgtcgtgactgggaaaaccctggcgttacccaacttaatcgccttgcagcacatccccctttcgccagctggcgtaatagcgaagaggcccgcaccgatcgcccttcccaacagttgcgcagcctgaatggcgaatgctagagcagcttgagcttggatcagattgtcgtttcccgccttcagtttaaactatcagtgtttgacaggatatattggcgggtaaacctaagagaaaagagcgtttattagaataatcggatatttaaaagggcgtgaaaaggtttatccgttcgtccatttgtatgtgcatgccaaccacagggttcccctcgggatcaaagtactttgatccaacccctccgctgctatagtgcagtcggcttctgacgttcagtgcagccgtcttctgaaaacgacatgtcgcacaagtcctaagttacgcgacaggctgccgccctgcccttttcctggcgttttcttgtcgcgtgttttagtcgcataaagtagaatacttgcgactagaaccggagacattacgccatgaacaagagcgccgccgctggcctgctgggctatgcccgcgtcagcaccgacgaccaggacttgaccaaccaacgggccgaactgcacgcggccggctgcaccaagctgttttccgagaagatcaccggcaccaggcgcgaccgcccggagctggccaggatgcttgaccacctacgccctggcgacgttgtgacagtgaccaggctagaccgcctggcccgcagcacccgcgacctactggacattgccgagcgcatccaggaggccggcgcgggcctgcgtagcctggcagagccgtgggccgacaccaccacgccggccggccgcatggtgttgaccgtgttcgccggcattgccgagttcgagcgttccctaatcatcgaccgcacccggagcgggcgcgaggccgccaaggcccgaggcgtgaagtttggcccccgccctaccctcaccccggcacagatcgcgcacgcccgcgagctgatcgaccaggaaggccgcaccgtgaaagaggcggctgcactgcttggcgtgcatcgctcgaccctgtaccgcgcacttgagcgcagcgaggaagtgacgcccaccgaggccaggcggcgcggtgccttccgtgaggacgcattgaccgaggccgacgccctggcggccgccgagaatgaacgccaagaggaacaagcatgaaaccgcaccaggacggccaggacgaaccgtttttcattaccgaagagatcgaggcggagatgatcgcggccgggtacgtgttcgagccgcccgcgcacgtctcaaccgtgcggctgcatgaaatcctggccggtttgtctgatgccaagctggcggcctggccggccagcttggccgctgaagaaaccgagcgccgccgtctaaaaaggtgatgtgtatttgagtaaaacagcttgcgtcatgcggtcgctgcgtatatgatgcgatgagtaaataaacaaatacgcaaggggaacgcatgaaggttatcgctgtacttaaccagaaaggcgggtcaggcaagacgaccatcgcaacccatctagcccgcgccctgcaactcgccggggccgatgttctgttagtcgattccgatccccagggcagtgcccgcgattgggcggccgtgcgggaagatcaaccgctaaccgttgtcggcatcgaccgcccgacgattgaccgcgacgtgaaggccatcggccggcgcgacttcgtagtgatcgacggagcgccccaggcggcggacttggctgtgtccgcgatcaaggcagccgacttcgtgctgattccggtgcagccaagcccttacgacatatgggccaccgccgacctggtggagctggttaagcagcgcattgaggtcacggatggaaggctacaagcggcctttgtcgtgtcgcgggcgatcaaaggcacgcgcatcggcggtgaggttgccgaggcgctggccgggtacgagctgcccattcttgagtcccgtatcacgcagcgcgtgagctacccaggcactgccgccgccggcacaaccgttcttgaatcagaacccgagggcgacgctgcccgcgaggtccaggcgctggccgctgaaattaaatcaaaactcatttgagttaatgaggtaaagagaaaatgagcaaaagcacaaacacgctaagtgccggccgtccgagcgcacgcagcagcaaggctgcaacgttggccagcctggcagacacgccagccatgaagcgggtcaactttcagttgccggcggaggatcacaccaagctgaagatgtacgcggtacgccaaggcaagaccattaccgagctgctatctgaatacatcgcgcagctaccagagtaaatgagcaaatgaataaatgagtagatgaattttagcggctaaaggaggcggcatggaaaatcaagaacaaccaggcaccgacgccgtggaatgccccatgtgtggaggaacgggcggttggccaggcgtaagcggctgggttgcctgccggccctgcaatggcactggaacccccaagcccgaggaatcggcgtgagcggtcgcaaaccatccggcccggtacaaatcggcgcggcgctgggtgatgacctggtggagaagttgaaggccgcgcaggccgcccagcggcaacgcatcgaggcagaagcacgccccggtgaatcgtggcaagcggccgctgatcgaatccgcaaagaatcccggcaaccgccggcagccggtgcgccgtcgattaggaagccgcccaagggcgacgagcaaccagattttttcgttccgatgctctatgacgtgggcacccgcgatagtcgcagcatcatggacgtggccgttttccgtctgtcgaagcgtgaccgacgagctggcgaggtgatccgctacgagcttccagacgggcacgtagaggtttccgcagggccggccggcatggccagtgtgtgggattacgacctggtactgatggcggtttcccatctaaccgaatccatgaaccgataccgggaagggaagggagacaagcccggccgcgtgttccgtccacacgttgcggacgtactcaagttctgccggcgagccgatggcggaaagcagaaagacgacctggtagaaacctgcattcggttaaacaccacgcacgttgccatgcagcgtacgaagaaggccaagaacggccgcctggtgacggtatccgagggtgaagccttgattagccgctacaagatcgtaaagagcgaaaccgggcggccggagtacatcgagatcgagctagctgattggatgtaccgcgagatcacagaaggcaagaacccggacgtgctgacggttcaccccgattactttttgatcgatcccggcatcggccgttttctctaccgcctggcacgccgcgccgcaggcaaggcagaagccagatggttgttcaagacgatctacgaacgcagtggcagcgccggagagttcaagaagttctgtttcaccgtgcgcaagctgatcgggtcaaatgacctgccggagtacgatttgaaggaggaggcggggcaggctggcccgatcctagtcatgcgctaccgcaacctgatcgagggcgaagcatccgccggttcctaatgtacggagcagatgctagggcaaattgccctagcaggggaaaaaggtcgaaaaggtctctttcctgtggatagcacgtacattgggaacccaaagccgtacattgggaaccggaacccgtacattgggaacccaaagccgtacattgggaaccggtcacacatgtaagtgactgatataaaagagaaaaaaggcgatttttccgcctaaaactctttaaaacttattaaaactcttaaaacccgcctggcctgtgcataactgtctggccagcgcacagccgaagagctgcaaaaagcgcctacccttcggtcgctgcgctccctacgccccgccgcttcgcgtcggcctatcgcggccgctggccgctcaaaaatggctggcctacggccaggcaatctaccagggcgcggacaagccgcgccgtcgccactcgaccgccggcgcccacatcaaggcaccctgcctcgcgcgtttcggtgatgacggtgaaaacctctgacacatgcagctcccggagacggtcacagcttgtctgtaagcggatgccgggagcagacaagcccgtcagggcgcgtcagcgggtgttggcgggtgtcggggcgcagccatgacccagtcacgtagcgatagcggagtgtatactggcttaactatgcggcatcagagcagattgtactgagagtgcaccatatgcggtgtgaaataccgcacagatgcgtaaggagaaaataccgcatcaggcgctcttccgcttcctcgctcactgactcgctgcgctcggtcgttcggctgcggcgagcggtatcagctcactcaaaggcggtaatacggttatccacagaatcaggggataacgcaggaaagaacatgtgagcaaaaggccagcaaaaggccaggaaccgtaaaaaggccgcgttgctggcgtttttccataggctccgcccccctgacgagcatcacaaaaatcgacgctcaagtcagaggtggcgaaacccgacaggactataaagataccaggcgtttccccctggaagctccctcgtgcgctctcctgttccgaccctgccgcttaccggatacctgtccgcctttctcccttcgggaagcgtggcgctttctcatagctcacgctgtaggtatctcagttcggtgtaggtcgttcgctccaagctgggctgtgtgcacgaaccccccgttcagcccgaccgctgcgccttatccggtaactatcgtcttgagtccaacccggtaagacacgacttatcgccactggcagcagccactggtaacaggattagcagagcgaggtatgtaggcggtgctacagagttcttgaagtggtggcctaactacggctacactagaaggacagtatttggtatctgcgctctgctgaagccagttaccttcggaaaaagagttggtagctcttgatccggcaaacaaaccaccgctggtagcggtggtttttttgtttgcaagcagcagattacgcgcagaaaaaaaggatctcaagaagatcctttgatcttttctacggggtctgacgctcagtggaacgaaaactcacgttaagggattttggtcatgcattctaggtactaaaacaattcatccagtaaaatataatattttattttctcccaatcaggcttgatccccagtaagtcaaaaaatagctcgacatactgttcttccccgatatcctccctgatcgaccggacgcagaaggcaatgtcataccacttgtccgccctgccgcttctcccaagatcaataaagccacttactttgccatctttcacaaagatgttgctgtctcccaggtcgccgtgggaaaagacaagttcctcttcgggcttttccgtctttaaaaaatcatacagctcgcgcggatctttaaatggagtgtcttcttcccagttttcgcaatccacatcggccagatcgttattcagtaagtaatccaattcggctaagcggctgtctaagctattcgtatagggacaatccgatatgtcgatggagtgaaagagcctgatgcactccgcatacagctcgataatcttttcagggctttgttcatcttcatactcttccgagcaaaggacgccatcggcctcactcatgagcagattgctccagccatcatgccgttcaaagtgcaggacctttggaacaggcagctttccttccagccatagcatcatgtccttttcccgttccacatcataggtggtccctttataccggctgtccgtcatttttaaatataggttttcattttctcccaccagcttatataccttagcaggagacattccttccgtatcttttacgcagcggtatttttcgatcagttttttcaattccggtgatattctcattttagccatttattatttccttcctcttttctacagtatttaaagataccccaagaagctaattataacaagacgaactccaattcactgttccttgcattctaaaaccttaaataccagaaaacagctttttcaaagttgttttcaaagttggcgtataacatagtatcgacggagccgattttgaaaccgcggtgatcacaggcagcaacgctctgtcatcgttacaatcaacatgctaccctccgcgagatcatccgtgtttcaaacccggcagcttagttgccgttcttccgaatagcatcggtaacatgagcaaagtctgccgccttacaacggctctcccgctgacgccgtcccggactgatgggctgcctgtatcgagtggtgattttgtgccgagctgccggtcggggagctgttggctggctggtggcaggatatattgtggtgtaaacaaattgacgcttagacaacttaataacacattgcggacgtttttaatgtactgaattaacgccgaattaa

SEQ ID NO: 2904 - protein, 62 aa, Artificial Sequence
  Synthetic Construct
MTTAVTAAVSFPSTKTTSLSARSSSVISPDKISYKKVPLYYRNVSATGKMGPIRAQIASCSS

SEQ ID NO: 2905 - DNA, 8885 bp, Artificial Sequence
  plasmid VC-MME221-1qcz
agcttggacaatcagtaaattgaacggagaatattattcataaaaatacgatagtaacgggtgatatattcattagaatgaaccgaaaccggcggtaaggatctgagctacacatgctcaggttttttacaacgtgcacaacagaattgaaagcaaatatcatgcgatcataggcgtctcgcatatctcattaaagcagggcatgccggtcgagtcaaatctcggtgacgggcaggaccggacggggcggtaccggcaggctgaagtccagctgccagaaacccacgtcatgccagttcccgtgcttgaagccggccgcccgcagcatgccgcggggggcatatccgagcgcctcgtgcatgcgcacgctcgggtcgttgggcagcccgatgacagcgaccacgctcttgaagccctgtgcctccagggacttcagcaggtgggtgtagagcgtggagcccagtcccgtccgctggtggcggggggagacgtacacggtcgactcggccgtccagtcgtaggcgttgcgtgccttccaggggcccgcgtaggcgatgccggcgacctcgccgtccacctcggcgacgagccagggatagcgctcccgcagacggacgaggtcgtccgtccactcctgcggttcctgcggctcggtacggaagttgaccgtgcttgtctcgatgtagtggttgacgatggtgcagaccgccggcatgtccgcctcggtggcacggcggatgtcggccgggcgtcgttctgggctcatggtagactcgacggatccacgtgtggaagatatgaatttttttgagaaactagataagattaatgaatatcggtgttttggttttttcttgtggccgtctttgtttatattgagatttttcaaatcagtgcgcaagacgtgacgtaagtatccgagtcagtttttatttttctactaatttggtcgaagctttgggcggatcctctagaattcgaatccaaaaattacggatatgaatataggcatatccgtatccgaattatccgtttgacagctagcaacgattgtacaattgcttctttaaaaaaggaagaaagaaagaaagaaaagaatcaacatcagcgttaacaaacggccccgttacggcccaaacggtcatatagagtaacggcgttaagcgttgaaagactcctatcgaaatacgtaaccgcaaacgtgtcatagtcagatcccctcttccttcaccgcctcaaacacaaaaataatcttctacagcctatatatacaacccccccttctatctctcctttctcacaattcatcatctttctttctctacccccaattttaagaaatcctctcttctcctcttcattttcaaggtaaatctctctctctctctctctctctgttattccttgttttaattaggtatgtattattgctagtttgttaatctgcttatcttatgtatgccttatgtgaatatctttatcttgttcatctcatccgtttagaagctataaatttgttgatttgactgtgtatctacacgtggttatgtttatatctaatcagatatgaatttcttcatattgttgcgtttgtgtgtaccaatccgaaatcgttgatttttttcatttaatcgtgtagctaattgtacgtatacatatggatctacgtatcaattgttcatctgtttgtgtttgtatgtatacagatctgaaaacatcacttctctcatctgattgtgttgttacatacatagatatagatctgttatatcattttttttattaattgtgtatatatatatgtgcatagatctggattacatgattgtgattatttacatgattttgttatttacgtatgtatatatgtagatctggactttttggagttgttgacttgattgtatttgtgtgtgtatatgtgtgttctgatcttgatatgttatgtatgtgcagcccgggttgctcttccatggcaatgattaattaacgaagagcaagagctcgaatttccccgatcgttcaaacatttggcaataaagtttcttaagattgaatcctgttgccggtcttgcgatgattatcatataatttctgttgaattacgttaagcatgtaataattaacatgtaatgcatgacgttatttatgagatgggtttttatgattagagtcccgcaattatacatttaatacgcgatagaaaacaaaatatagcgcgcaaactaggataaattatcgcgcgcggtgtcatctatgttactagatcgggaattggcatgcaagcttggcactggccgtcgttttacaacgtcgtgactgggaaaaccctggcgttacccaacttaatcgccttgcagcacatccccctttcgccagctggcgtaatagcgaagaggcccgcaccgatcgcccttcccaacagttgcgcagcctgaatggcgaatgctagagcagcttgagcttggatcagattgtcgtttcccgccttcagtttaaactatcagtgtttgacaggatatattggcgggtaaacctaagagaaaagagcgtttattagaataatcggatatttaaaagggcgtgaaaaggtttatccgttcgtccatttgtatgtgcatgccaaccacagggttcccctcgggatcaaagtactttgatccaacccctccgctgctatagtgcagtcggcttctgacgttcagtgcagccgtcttctgaaaacgacatgtcgcacaagtcctaagttacgcgacaggctgccgccctgcccttttcctggcgttttcttgtcgcgtgttttagtcgcataaagtagaatacttgcgactagaaccggagacattacgccatgaacaagagcgccgccgctggcctgctgggctatgcccgcgtcagcaccgacgaccaggacttgaccaaccaacgggccgaactgcacgcggccggctgcaccaagctgttttccgagaagatcaccggcaccaggcgcgaccgcccggagctggccaggatgcttgaccacctacgccctggcgacgttgtgacagtgaccaggctagaccgcctggcccgcagcacccgcgacctactggacattgccgagcgcatccaggaggccggcgcgggcctgcgtagcctggcagagccgtgggccgacaccaccacgccggccggccgcatggtgttgaccgtgttcgccggcattgccgagttcgagcgttccctaatcatcgaccgcacccggagcgggcgcgaggccgccaaggcccgaggcgtgaagtttggcccccgccctaccctcaccccggcacagatcgcgcacgcccgcgagctgatcgaccaggaaggccgcaccgtgaaagaggcggctgcactgcttggcgtgcatcgctcgaccctgtaccgcgcacttgagcgcagcgaggaagtgacgcccaccgaggccaggcggcgcggtgccttccgtgaggacgcattgaccgaggccgacgccctggcggccgccgagaatgaacgccaagaggaacaagcatgaaaccgcaccaggacggccaggacgaaccgtttttcattaccgaagagatcgaggcggagatgatcgcggccgggtacgtgttcgagccgcccgcgcacgtctcaaccgtgcggctgcatgaaatcctggccggtttgtctgatgccaagctggcggcctggccggccagcttggccgctgaagaaaccgagcgccgccgtctaaaaaggtgatgtgtatttgagtaaaacagcttgcgtcatgcggtcgctgcgtatatgatgcgatgagtaaataaacaaatacgcaaggggaacgcatgaaggttatcgctgtacttaaccagaaaggcgggtcaggcaagacgaccatcgcaacccatctagcccgcgccctgcaactcgccggggccgatgttctgttagtcgattccgatccccagggcagtgcccgcgattgggcggccgtgcgggaagatcaaccgctaaccgttgtcggcatcgaccgcccgacgattgaccgcgacgtgaaggccatcggccggcgcgacttcgtagtgatcgacggagcgccccaggcggcggacttggctgtgtccgcgatcaaggcagccgacttcgtgctgattccggtgcagccaagcccttacgacatatgggccaccgccgacctggtggagctggttaagcagcgcattgaggtcacggatggaaggctacaagcggcctttgtcgtgtcgcgggcgatcaaaggcacgcgcatcggcggtgaggttgccgaggcgctggccgggtacgagctgcccattcttgagtcccgtatcacgcagcgcgtgagctacccaggcactgccgccgccggcacaaccgttcttgaatcagaacccgagggcgacgctgcccgcgaggtccaggcgctggccgctgaaattaaatcaaaactcatttgagttaatgaggtaaagagaaaatgagcaaaagcacaaacacgctaagtgccggccgtccgagcgcacgcagcagcaaggctgcaacgttggccagcctggcagacacgccagccatgaagcgggtcaactttcagttgccggcggaggatcacaccaagctgaagatgtacgcggtacgccaaggcaagaccattaccgagctgctatctgaatacatcgcgcagctaccagagtaaatgagcaaatgaataaatgagtagatgaattttagcggctaaaggaggcggcatggaaaatcaagaacaaccaggcaccgacgccgtggaatgccccatgtgtggaggaacgggcggttggccaggcgtaagcggctgggttgcctgccggccctgcaatggcactggaacccccaagcccgaggaatcggcgtgagcggtcgcaaaccatccggcccggtacaaatcggcgcggcgctgggtgatgacctggtggagaagttgaaggccgcgcaggccgcccagcggcaacgcatcgaggcagaagcacgccccggtgaatcgtggcaagcggccgctgatcgaatccgcaaagaatcccggcaaccgccggcagccggtgcgccgtcgattaggaagccgcccaagggcgacgagcaaccagattttttcgttccgatgctctatgacgtgggcacccgcgatagtcgcagcatcatggacgtggccgttttccgtctgtcgaagcgtgaccgacgagctggcgaggtgatccgctacgagcttccagacgggcacgtagaggtttccgcagggccggccggcatggccagtgtgtgggattacgacctggtactgatggcggtttcccatctaaccgaatccatgaaccgataccgggaagggaagggagacaagcccggccgcgtgttccgtccacacgttgcggacgtactcaagttctgccggcgagccgatggcggaaagcagaaagacgacctggtagaaacctgcattcggttaaacaccacgcacgttgccatgcagcgtacgaagaaggccaagaacggccgcctggtgacggtatccgagggtgaagccttgattagccgctacaagatcgtaaagagcgaaaccgggcggccggagtacatcgagatcgagctagctgattggatgtaccgcgagatcacagaaggcaagaacccggacgtgctgacggttcaccccgattactttttgatcgatcccggcatcggccgttttctctaccgcctggcacgccgcgccgcaggcaaggcagaagccagatggttgttcaagacgatctacgaacgcagtggcagcgccggagagttcaagaagttctgtttcaccgtgcgcaagctgatcgggtcaaatgacctgccggagtacgatttgaaggaggaggcggggcaggctggcccgatcctagtcatgcgctaccgcaacctgatcgagggcgaagcatccgccggttcctaatgtacggagcagatgctagggcaaattgccctagcaggggaaaaaggtcgaaaaggtctctttcctgtggatagcacgtacattgggaacccaaagccgtacattgggaaccggaacccgtacattgggaacccaaagccgtacattgggaaccggtcacacatgtaagtgactgatataaaagagaaaaaaggcgatttttccgcctaaaactctttaaaacttattaaaactcttaaaacccgcctggcctgtgcataactgtctggccagcgcacagccgaagagctgcaaaaagcgcctacccttcggtcgctgcgctccctacgccccgccgcttcgcgtcggcctatcgcggccgctggccgctcaaaaatggctggcctacggccaggcaatctaccagggcgcggacaagccgcgccgtcgccactcgaccgccggcgcccacatcaaggcaccctgcctcgcgcgtttcggtgatgacggtgaaaacctctgacacatgcagctcccggagacggtcacagcttgtctgtaagcggatgccgggagcagacaagcccgtcagggcgcgtcagcgggtgttggcgggtgtcggggcgcagccatgacccagtcacgtagcgatagcggagtgtatactggcttaactatgcggcatcagagcagattgtactgagagtgcaccatatgcggtgtgaaataccgcacagatgcgtaaggagaaaataccgcatcaggcgctcttccgcttcctcgctcactgactcgctgcgctcggtcgttcggctgcggcgagcggtatcagctcactcaaaggcggtaatacggttatccacagaatcaggggataacgcaggaaagaacatgtgagcaaaaggccagcaaaaggccaggaaccgtaaaaaggccgcgttgctggcgtttttccataggctccgcccccctgacgagcatcacaaaaatcgacgctcaagtcagaggtggcgaaacccgacaggactataaagataccaggcgtttccccctggaagctccctcgtgcgctctcctgttccgaccctgccgcttaccggatacctgtccgcctttctcccttcgggaagcgtggcgctttctcatagctcacgctgtaggtatctcagttcggtgtaggtcgttcgctccaagctgggctgtgtgcacgaaccccccgttcagcccgaccgctgcgccttatccggtaactatcgtcttgagtccaacccggtaagacacgacttatcgccactggcagcagccactggtaacaggattagcagagcgaggtatgtaggcggtgctacagagttcttgaagtggtggcctaactacggctacactagaaggacagtatttggtatctgcgctctgctgaagccagttaccttcggaaaaagagttggtagctcttgatccggcaaacaaaccaccgctggtagcggtggtttttttgtttgcaagcagcagattacgcgcagaaaaaaaggatctcaagaagatcctttgatcttttctacggggtctgacgctcagtggaacgaaaactcacgttaagggattttggtcatgcattctaggtactaaaacaattcatccagtaaaatataatattttattttctcccaatcaggcttgatccccagtaagtcaaaaaatagctcgacatactgttcttccccgatatcctccctgatcgaccggacgcagaaggcaatgtcataccacttgtccgccctgccgcttctcccaagatcaataaagccacttactttgccatctttcacaaagatgttgctgtctcccaggtcgccgtgggaaaagacaagttcctcttcgggcttttccgtctttaaaaaatcatacagctcgcgcggatctttaaatggagtgtcttcttcccagttttcgcaatccacatcggccagatcgttattcagtaagtaatccaattcggctaagcggctgtctaagctattcgtatagggacaatccgatatgtcgatggagtgaaagagcctgatgcactccgcatacagctcgataatcttttcagggctttgttcatcttcatactcttccgagcaaaggacgccatcggcctcactcatgagcagattgctccagccatcatgccgttcaaagtgcaggacctttggaacaggcagctttccttccagccatagcatcatgtccttttcccgttccacatcataggtggtccctttataccggctgtccgtcatttttaaatataggttttcattttctcccaccagcttatataccttagcaggagacattccttccgtatcttttacgcagcggtatttttcgatcagttttttcaattccggtgatattctcattttagccatttattatttccttcctcttttctacagtatttaaagataccccaagaagctaattataacaagacgaactccaattcactgttccttgcattctaaaaccttaaataccagaaaacagctttttcaaagttgttttcaaagttggcgtataacatagtatcgacggagccgattttgaaaccgcggtgatcacaggcagcaacgctctgtcatcgttacaatcaacatgctaccctccgcgagatcatccgtgtttcaaacccggcagcttagttgccgttcttccgaatagcatcggtaacatgagcaaagtctgccgccttacaacggctctcccgctgacgccgtcccggactgatgggctgcctgtatcgagtggtgattttgtgccgagctgccggtcggggagctgttggctggctggtggcaggatatattgtggtgtaaacaaattgacgcttagacaacttaataacacattgcggacgtttttaatgtactgaattaacgccgaatta

SEQ ID NO: 2906 - DNA, 9043 bp, Artificial Sequence
  plasmid VC-MME489-1QCZ
agctttgggcggatcctctagaggacaatcagtaaattgaacggagaatattattcataaaaatacgatagtaacgggtgatatattcattagaatgaaccgaaaccggcggtaaggatctgagctacacatgctcaggttttttacaacgtgcacaacagaattgaaagcaaatatcatgcgatcataggcgtctcgcatatctcattaaagcagggcatgccggtcgagtcaaatctcggtgacgggcaggaccggacggggcggtaccggcaggctgaagtccagctgccagaaacccacgtcatgccagttcccgtgcttgaagccggccgcccgcagcatgccgcggggggcatatccgagcgcctcgtgcatgcgcacgctcgggtcgttgggcagcccgatgacagcgaccacgctcttgaagccctgtgcctccagggacttcagcaggtgggtgtagagcgtggagcccagtcccgtccgctggtggcggggggagacgtacacggtcgactcggccgtccagtcgtaggcgttgcgtgccttccaggggcccgcgtaggcgatgccggcgacctcgccgtccacctcggcgacgagccagggatagcgctcccgcagacggacgaggtcgtccgtccactcctgcggttcctgcggctcggtacggaagttgaccgtgcttgtctcgatgtagtggttgacgatggtgcagaccgccggcatgtccgcctcggtggcacggcggatgtcggccgggcgtcgttctgggctcatggtagactcgacggatccacgtgtggaagatatgaatttttttgagaaactagataagattaatgaatatcggtgttttggttttttcttgtggccgtctttgtttatattgagatttttcaaatcagtgcgcaagacgtgacgtaagtatccgagtcagtttttatttttctactaatttggtcgaatctagattcgacggtatcgataagctcgcggatccctgaaagcgacgttggatgttaacatctacaaattgccttttcttatcgaccatgtacgtaagcgcttacgtttttggtggacccttgaggaaactggtagctgttgtgggcctgtggtctcaagatggatcattaatttccaccttcacctacgatggggggcatcgcaccggtgagtaatattgtacggctaagagcgaatttggcctgtaggatccctgaaagcgacgttggatgttaacatctacaaattgccttttcttatcgaccatgtacgtaagcgcttacgtttttggtggacccttgaggaaactggtagctgttgtgggcctgtggtctcaagatggatcattaatttccaccttcacctacgatggggggcatcgcaccggtgagtaatattgtacggctaagagcgaatttggcctgtaggatccctgaaagcgacgttggatgttaacatctacaaattgccttttcttatcgaccatgtacgtaagcgcttacgtttttggtggacccttgaggaaactggtagctgttgtgggcctgtggtctcaagatggatcattaatttccaccttcacctacgatggggggcatcgcaccggtgagtaatattgtacggctaagagcgaatttggcctgtaggatccgcgagctggtcaatcccattgcttttgaagcagctcaacattgatctctttctcgatcgagggagatttttcaaatcagtgcgcaagacgtgacgtaagtatccgagtcagtttttatttttctactaatttggtcgtttatttcggcgtgtaggacatggcaaccgggcctgaatttcgcgggtattctgtttctattccaactttttcttgatccgcagccattaacgacttttgaatagatacgctgacacgccaagcctcgctagtcaaaagtgtaccaaacaacgctttacagcaagaacggaatgcgcgtgacgctcgcggtgacgccatttcgccttttcagaaatggataaatagccttgcttcctattatatcttcccaaattaccaatacattacactagcatctgaatttcataaccaatctcgatacaccaaatcgaagatctccctggaattccagctgaccaccatggcaattcccggggatcagctcgaatttccccgatcgttcaaacatttggcaataaagtttcttaagattgaatcctgttgccggtcttgcgatgattatcatataatttctgttgaattacgttaagcatgtaataattaacatgtaatgcatgacgttatttatgagatgggtttttatgattagagtcccgcaattatacatttaatacgcgatagaaaacaaaatatagcgcgcaaactaggataaattatcgcgcgcggtgtcatctatgttactagatcgggaattggcatgcaagcttggcactggccgtcgttttacaacgtcgtgactgggaaaaccctggcgttacccaacttaatcgccttgcagcacatccccctttcgccagctggcgtaatagcgaagaggcccgcaccgatcgcccttcccaacagttgcgcagcctgaatggcgaatgctagagcagcttgagcttggatcagattgtcgtttcccgccttcagtttaaactatcagtgtttgacaggatatattggcgggtaaacctaagagaaaagagcgtttattagaataatcggatatttaaaagggcgtgaaaaggtttatccgttcgtccatttgtatgtgcatgccaaccacagggttcccctcgggatcaaagtactttgatccaacccctccgctgctatagtgcagtcggcttctgacgttcagtgcagccgtcttctgaaaacgacatgtcgcacaagtcctaagttacgcgacaggctgccgccctgcccttttcctggcgttttcttgtcgcgtgttttagtcgcataaagtagaatacttgcgactagaaccggagacattacgccatgaacaagagcgccgccgctggcctgctgggctatgcccgcgtcagcaccgacgaccaggacttgaccaaccaacgggccgaactgcacgcggccggctgcaccaagctgttttccgagaagatcaccggcaccaggcgcgaccgcccggagctggccaggatgcttgaccacctacgccctggcgacgttgtgacagtgaccaggctagaccgcctggcccgcagcacccgcgacctactggacattgccgagcgcatccaggaggccggcgcgggcctgcgtagcctggcagagccgtgggccgacaccaccacgccggccggccgcatggtgttgaccgtgttcgccggcattgccgagttcgagcgttccctaatcatcgaccgcacccggagcgggcgcgaggccgccaaggcccgaggcgtgaagtttggcccccgccctaccctcaccccggcacagatcgcgcacgcccgcgagctgatcgaccaggaaggccgcaccgtgaaagaggcggctgcactgcttggcgtgcatcgctcgaccctgtaccgcgcacttgagcgcagcgaggaagtgacgcccaccgaggccaggcggcgcggtgccttccgtgaggacgcattgaccgaggccgacgccctggcggccgccgagaatgaacgccaagaggaacaagcatgaaaccgcaccaggacggccaggacgaaccgtttttcattaccgaagagatcgaggcggagatgatcgcggccgggtacgtgttcgagccgcccgcgcacgtctcaaccgtgcggctgcatgaaatcctggccggtttgtctgatgccaagctggcggcctggccggccagcttggccgctgaagaaaccgagcgccgccgtctaaaaaggtgatgtgtatttgagtaaaacagcttgcgtcatgcggtcgctgcgtatatgatgcgatgagtaaataaacaaatacgcaaggggaacgcatgaaggttatcgctgtacttaaccagaaaggcgggtcaggcaagacgaccatcgcaacccatctagcccgcgccctgcaactcgccggggccgatgttctgttagtcgattccgatccccagggcagtgcccgcgattgggcggccgtgcgggaagatcaaccgctaaccgttgtcggcatcgaccgcccgacgattgaccgcgacgtgaaggccatcggccggcgcgacttcgtagtgatcgacggagcgccccaggcggcggacttggctgtgtccgcgatcaaggcagccgacttcgtgctgattccggtgcagccaagcccttacgacatatgggccaccgccgacctggtggagctggttaagcagcgcattgaggtcacggatggaaggctacaagcggcctttgtcgtgtcgcgggcgatcaaaggcacgcgcatcggcggtgaggttgccgaggcgctggccgggtacgagctgcccattcttgagtcccgtatcacgcagcgcgtgagctacccaggcactgccgccgccggcacaaccgttcttgaatcagaacccgagggcgacgctgcccgcgaggtccaggcgctggccgctgaaattaaatcaaaactcatttgagttaatgaggtaaagagaaaatgagcaaaagcacaaacacgctaagtgccggccgtccgagcgcacgcagcagcaaggctgcaacgttggccagcctggcagacacgccagccatgaagcgggtcaactttcagttgccggcggaggatcacaccaagctgaagatgtacgcggtacgccaaggcaagaccattaccgagctgctatctgaatacatcgcgcagctaccagagtaaatgagcaaatgaataaatgagtagatgaattttagcggctaaaggaggcggcatggaaaatcaagaacaaccaggcaccgacgccgtggaatgccccatgtgtggaggaacgggcggttggccaggcgtaagcggctgggttgtctgccggccctgcaatggcactggaacccccaagcccgaggaatcggcgtgacggtcgcaaaccatccggcccggtacaaatcggcgcggcgctgggtgatgacctggtggagaagttgaaggccgcgcaggccgcccagcggcaacgcatcgaggcagaagcacgccccggtgaatcgtggcaagcggccgctgatcgaatccgcaaagaatcccggcaaccgccggcagccggtgcgccgtcgattaggaagccgcccaagggcgacgagcaaccagattttttcgttccgatgctctatgacgtgggcacccgcgatagtcgcagcatcatggacgtggccgttttccgtctgtcgaagcgtgaccgacgagctggcgaggtgatccgctacgagcttccagacgggcacgtagaggtttccgcagggccggccggcatggccagtgtgtgggattacgacctggtactgatggcggtttcccatctaaccgaatccatgaaccgataccgggaagggaagggagacaagcccggccgcgtgttccgtccacacgttgcggacgtactcaagttctgccggcgagccgatggcggaaagcagaaagacgacctggtagaaacctgcattcggttaaacaccacgcacgttgccatgcagcgtacgaagaaggccaagaacggccgcctggtgacggtatccgagggtgaagccttgattagccgctacaagatcgtaaagagcgaaaccgggcggccggagtacatcgagatcgagctagctgattggatgtaccgcgagatcacagaaggcaagaacccggacgtgctgacggttcaccccgattactttttgatcgatcccggcatcggccgttttctctaccgcctggcacgccgcgccgcaggcaaggcagaagccagatggttgttcaagacgatctacgaacgcagtggcagcgccggagagttcaagaagttctgtttcaccgtgcgcaagctgatcgggtcaaatgacctgccggagtacgatttgaaggaggaggcggggcaggctggcccgatcctagtcatgcgctaccgcaacctgatcgagggcgaagcatccgccggttcctaatgtacggagcagatgctagggcaaattgccctagcaggggaaaaaggtcgaaaaggtctctttcctgtggatagcacgtacattgggaacccaaagccgtacattgggaaccggaacccgtacattgggaacccaaagccgtacattgggaaccggtcacacatgtaagtgactgatataaaagagaaaaaaggcgatttttccgcctaaaactctttaaaacttattaaaactcttaaaacccgcctggcctgtgcataactgtctggccagcgcacagccgaagagctgcaaaaagcgcctacccttcggtcgctgcgctccctacgccccgccgcttcgcgtcggcctatcgcggccgctggccgctcaaaaatggctggcctacggccaggcaatctaccagggcgcggacaagccgcgccgtcgccactcgaccgccggcgcccacatcaaggcaccctgcctcgcgcgtttcggtgatgacggtgaaaacctctgacacatgcagctcccggagacggtcacagcttgtctgtaagcggatgccgggagcagacaagcccgtcagggcgcgtcagcgggtgttggcgggtgtcggggcgcagccatgacccagtcacgtagcgatagcggagtgtatactggcttaactatgcggcatcagagcagattgtactgagagtgcaccatatgcggtgtgaaataccgcacagatgcgtaaggagaaaataccgcatcaggcgctcttccgcttcctcgctcactgactcgctgcgctcggtcgttcggctgcggcgagcggtatcagctcactcaaaggcggtaatacggttatccacagaatcaggggataacgcaggaaagaacatgtgagcaaaaggccagcaaaaggccaggaaccgtaaaaaggccgcgttgctggcgtttttccataggctccgcccccctgacgagcatcacaaaaatcgacgctcaagtcagaggtggcgaaacccgacaggactataaagataccaggcgtttccccctggaagctccctcgtgcgctctcctgttccgaccctgccgcttaccggatacctgtccgcctttctcccttcgggaagcgtggcgctttctcatagctcacgctgtaggtatctcagttcggtgtaggtcgttcgctccaagctgggctgtgtgcacgaaccccccgttcagcccgaccgctgcgccttatccggtaactatcgtcttgagtccaacccggtaagacacgacttatcgccactggcagcagccactggtaacaggattagcagagcgaggtatgtaggcggtgctacagagttcttgaagtggtggcctaactacggctacactagaaggacagtatttggtatctgcgctctgctgaagccagttaccttcggaaaaagagttggtagctcttgatccggcaaacaaaccaccgctggtagcggtggtttttttgtttgcaagcagcagattacgcgcagaaaaaaaggatctcaagaagatcctttgatcttttctacggggtctgacgctcagtggaacgaaaactcacgttaagggattttggtcatgcattctaggtactaaaacaattcatccagtaaaatataatattttattttctcccaatcaggcttgatccccagtaagtcaaaaaatagctcgacatactgttcttccccgatatcctccctgatcgaccggacgcagaaggcaatgtcataccacttgtccgccctgccgcttctcccaagatcaataaagccacttactttgccatctttcacaaagatgttgctgtctcccaggtcgccgtgggaaaagacaagttcctcttcgggcttttccgtctttaaaaaatcatacagctcgcgcggatctttaaatggagtgtcttcttcccagttttcgcaatccacatcggccagatcgttattcagtaagtaatccaattcggctaagcggctgtctaagctattcgtatagggacaatccgatatgtcgatggagtgaaagagcctgatgcactccgcatacagctcgataatcttttcagggctttgttcatcttcatactcttccgagcaaaggacgccatcggcctcactcatgagcagattgctccagccatcatgccgttcaaagtgcaggacctttggaacaggcagctttccttccagccatagcatcatgtccttttcccgttccacatcataggtggtccctttataccggctgtccgtcatttttaaatataggttttcattttctcccaccagcttatataccttagcaggagacattccttccgtatcttttacgcagcggtatttttcgatcagttttttcaattccggtgatattctcattttagccatttattatttccttcctcttttctacagtatttaaagataccccaagaagctaattataacaagacgaactccaattcactgttccttgcattctaaaaccttaaataccagaaaacagctttttcaaagttgttttcaaagttggcgtataacatagtatcgacggagccgattttgaaaccgcggtgatcacaggcagcaacgctctgtcatcgttacaatcaacatgctaccctccgcgagatcatccgtgtttcaaacccggcagcttagttgccgttcttccgaatagcatcggtaacatgagcaaagtctgccgccttacaacggctctcccgctgacgccgtcccggactgatgggctgcctgtatcgagtggtgattttgtgccgagctgccggtcggggagctgttggctggctggtggcaggatatattgtggtgtaaacaaattgacgcttagacaacttaataacacattgcggacgtttttaatgtactgaattaacgccgaatta

SEQ ID NO: 2907 - DNA, 858 bp, Escherichia coli
  CDS (1)..(858): transl_table=11
atgtttatcctgtattttcagagggaatggagtgtaacgctctgtattaacaaggagagcattaaaatgggtaaactcacgggcaagacagcactgattacgggcgcattgcagggaattggcgaaggaattgccagaacttttgcacgtcatggcgcgaacctaatcttgctggatatctcccctgagatcgaaaagctggcggacgaactgtgtggtcgtggtcatcgctgtacggcggttgtcgccgatgtgcgtgacccggcgtcggtagccgcagctatcaaacgcgcgaaggaaaaagaagggcgcattgatatcctggtgaataacgcaggcgtttgtcgtctgggcagtttcctcgatatgagcgatgacgatcgcgatttccatattgacatcaatattaaaggcgtatggaacgtcacgaaggcggtgctgccggagatgattgcccgcaaagatggtcgcattgtgatgatgtcttcagtcactggtgatatggtggccgatcctggcgaaacggcgtacgccttaacgaaagcggcgattgttggcctgacaaaatcgctggcggtggagtacgcgcagtctggtattcgcgttaacgccatttgcccgggacacgtgcgcacaccaatggcggaaagcattgcccgccagtcgaacccggaagatccagagtcggtgctgactgaaatggcgaaagcaatcccgatgcgtcgcctcgccgatccgctggaagtcggcgaactggcggccttcctcgcatcggatgaatccagctatttaaccggtacacagaatgtgattgatggcggcagcacactgccggagacggttagcgtcggtatctaa

SEQ ID NO: 2908 - protein, 285 aa, Escherichia coli
MFILYFQREWSVTLCINKESIKMGKLTGKTALITGALQGIGEGIARTFARHGANLILLDISPEIEKLADELCGRGHRCTAVVADVRDPASVAAAIKRAKEKEGRIDILVNNAGVCRLGSFLDMSDDDRDFHIDINIKGVWNVTKAVLPEMIARKDGRIVMMSSVTGDMVADPGETAYALTKAAIVGLTKSLAVEYAQSGIRVNAICPGHVRTPMAESIARQSNPEDPESVLTEMAKAIPMRRLADPLEVGELAAFLASDESSYLTGTQNVIDGGSTLPETVSVGI

SEQ ID NO: 2909 - DNA, 858 bp, ESCHERICHIA COLI; identical to SEQ ID NO: 1449
  CDS (1)..(858): transl_table=11

SEQ ID NO: 2910 - protein, 285 aa, ESCHERICHIA COLI; identical to SEQ ID NO: 1450

SEQ ID NO: 2911 - DNA, 792 bp, Unknown; identical to SEQ ID NO: 1451
  Unidentified
  CDS (1)..(792)

SEQ ID NO: 2912 - protein, 263 aa, Unknown; identical to SEQ ID NO: 1452
  Unidentified

SEQ ID NO: 2913 - DNA, 846 bp, Oryza sativa Japonica Group; identical to SEQ ID NO: 1453
  CDS (1)..(846)

SEQ ID NO: 2914 - protein, 281 aa, Oryza sativa Japonica Group; identical to SEQ ID NO: 1454

SEQ ID NO: 2915 - DNA, 825 bp, Oryza sativa Japonica Group; identical to SEQ ID NO: 1455
  CDS (1)..(825)

SEQ ID NO: 2916 - protein, 274 aa, Oryza sativa Japonica Group; identical to SEQ ID NO: 1456

SEQ ID NO: 2917 - DNA, 825 bp, Oryza sativa Japonica Group; identical to SEQ ID NO: 1457
  CDS (1)..(825)

SEQ ID NO: 2918 - protein, 274 aa, Oryza sativa Japonica Group; identical to SEQ ID NO: 1458

SEQ ID NO: 2919 - DNA, 828 bp, Oryza sativa Japonica Group; identical to SEQ ID NO: 1459
  CDS (1)..(828)

SEQ ID NO: 2920 - protein, 275 aa, Oryza sativa Japonica Group; identical to SEQ ID NO: 1460

SEQ ID NO: 2921 - DNA, 903 bp, Oryza sativa Japonica Group; identical to SEQ ID NO: 1461
  CDS (1)..(903)

SEQ ID NO: 2922 - protein, 300 aa, Oryza sativa Japonica Group; identical to SEQ ID NO: 1462

SEQ ID NO: 2923 - DNA, 876 bp, Oryza sativa Japonica Group; identical to SEQ ID NO: 1463
  CDS (1)..(876)

SEQ ID NO: 2924 - protein, 291 aa, Oryza sativa Japonica Group; identical to SEQ ID NO: 1464

SEQ ID NO: 2925 - DNA, 909 bp, Oryza sativa Japonica Group; identical to SEQ ID NO: 1465
  CDS (1)..(909)

SEQ ID NO: 2926 - protein, 302 aa, Oryza sativa Japonica Group; identical to SEQ ID NO: 1466

SEQ ID NO: 2927 - DNA, 903 bp, Oryza sativa Japonica Group; identical to SEQ ID NO: 1467
  CDS (1)..(903)

SEQ ID NO: 2928 - protein, 300 aa, Oryza sativa Japonica Group; identical to SEQ ID NO: 1468

SEQ ID NO: 2929 - DNA, 813 bp, Oryza sativa Japonica Group; identical to SEQ ID NO: 1469
  CDS (1)..(813)

SEQ ID NO: 2930 - protein, 270 aa, Oryza sativa Japonica Group; identical to SEQ ID NO: 1470

SEQ ID NO: 2931 - DNA, 906 bp, Oryza sativa Japonica Group; identical to SEQ ID NO: 1471
  CDS (1)..(906)

SEQ ID NO: 2932 - protein, 301 aa, Oryza sativa Japonica Group; identical to SEQ ID NO: 1472

SEQ ID NO: 2933 - DNA, 888 bp, Oryza sativa Japonica Group; identical to SEQ ID NO: 1473
  CDS (1)..(888)

SEQ ID NO: 2934 - protein, 295 aa, Oryza sativa Japonica Group; identical to SEQ ID NO: 1474

SEQ ID NO: 2935 - DNA, 1026 bp, Oryza sativa Japonica Group; identical to SEQ ID NO: 1475
  CDS (1)..(1026)

SEQ ID NO: 2936 - protein, 341 aa, Oryza sativa Japonica Group; identical to SEQ ID NO: 1476

SEQ ID NO: 2937 - DNA, 897 bp, Oryza sativa Japonica Group; identical to SEQ ID NO: 1477
  CDS (1)..(897)

SEQ ID NO: 2938 - protein, 298 aa, Oryza sativa Japonica Group; identical to SEQ ID NO: 1478

SEQ ID NO: 2939 - DNA, 924 bp, Oryza sativa Japonica Group; identical to SEQ ID NO: 1479
  CDS (1)..(924)

SEQ ID NO: 2940 - protein, 307 aa, Oryza sativa Japonica Group; identical to SEQ ID NO: 1480

SEQ ID NO: 2941 - DNA, 933 bp, Oryza sativa Japonica Group; identical to SEQ ID NO: 1481
  CDS (1)..(933)

SEQ ID NO: 2942 - protein, 310 aa, Oryza sativa Japonica Group; identical to SEQ ID NO: 1482

SEQ ID NO: 2943 - DNA, 795 bp, Oryza sativa Japonica Group; identical to SEQ ID NO: 1483
  CDS (1)..(795)

SEQ ID NO: 2944 - protein, 264 aa, Oryza sativa Japonica Group; identical to SEQ ID NO: 1484

SEQ ID NO: 2945 - DNA, 807 bp, Oryza sativa Japonica Group; identical to SEQ ID NO: 1485
  CDS (1)..(807)

SEQ ID NO: 2946 - protein, 268 aa, Oryza sativa Japonica Group; identical to SEQ ID NO: 1486

SEQ ID NO: 2947 - DNA, 777 bp, Mesorhizobium loti MAFF303099; identical to SEQ ID NO: 1487
  CDS (1)..(777): transl_table=11

SEQ ID NO: 2948 - protein, 258 aa, Mesorhizobium loti MAFF303099; identical to SEQ ID NO: 1488

SEQ ID NO: 2949 - DNA, 732 bp, Mesorhizobium loti MAFF303099; identical to SEQ ID NO: 1489
  CDS (1)..(732): transl_table=11

SEQ ID NO: 2950 - protein, 243 aa, Mesorhizobium loti MAFF303099; identical to SEQ ID NO: 1490

SEQ ID NO: 2951 - DNA, 777 bp, Mesorhizobium loti MAFF303099; identical to SEQ ID NO: 1491
  CDS (1)..(777): transl_table=11

SEQ ID NO: 2952 - protein, 258 aa, Mesorhizobium loti MAFF303099; identical to SEQ ID NO: 1492

SEQ ID NO: 2953 - DNA, 912 bp, Arabidopsis thaliana; identical to SEQ ID NO: 1493
  CDS (1)..(912)

SEQ ID NO: 2954 - protein, 303 aa, Arabidopsis thaliana; identical to SEQ ID NO: 1494

SEQ ID NO: 2955 - DNA, 774 bp, Thermotoga maritima MSB8; identical to SEQ ID NO: 1495
  CDS (1)..(774): transl_table=11

SEQ ID NO: 2956 - protein, 257 aa, Thermotoga maritima MSB8; identical to SEQ ID NO: 1496

SEQ ID NO: 2957 - DNA, 741 bp, Bacillus halodurans C-125; identical to SEQ ID NO: 1497
  CDS (1)..(741): transl_table=11

SEQ ID NO: 2958 - protein, 246 aa, Bacillus halodurans C-125; identical to SEQ ID NO: 1498

SEQ ID NO: 2959 - DNA, 741 bp, Bacillus halodurans C-125; identical to SEQ ID NO: 1499
  CDS (1)..(741): transl_table=11

SEQ ID NO: 2960 - protein, 246 aa, Bacillus halodurans C-125; identical to SEQ ID NO: 1500

SEQ ID NO: 2961 - DNA, 783 bp, Pseudomonas aeruginosa PAO1; identical to SEQ ID NO: 1501
  CDS (1)..(783): transl_table=11

SEQ ID NO: 2962 - protein, 260 aa, Pseudomonas aeruginosa PAO1; identical to SEQ ID NO: 1502

SEQ ID NO: 2963 - DNA, 786 bp, Agrobacterium tumefaciens str. C58; identical to SEQ ID NO: 1503
  CDS (1)..(786): transl_table=11

SEQ ID NO: 2964 - protein, 261 aa, Agrobacterium tumefaciens str. C58; identical to SEQ ID NO: 1504

SEQ ID NO: 2965 - DNA, 918 bp, Agrobacterium tumefaciens str. C58; identical to SEQ ID NO: 1505
  CDS (1)..(918): transl_table=11

SEQ ID NO: 2966 - protein, 305 aa, Agrobacterium tumefaciens str. C58; identical to SEQ ID NO: 1506

SEQ ID NO: 2967 - DNA, 816 bp, Agrobacterium tumefaciens str. C58; identical to SEQ ID NO: 1507
  CDS (1)..(816): transl_table=11

SEQ ID NO: 2968 - protein, 271 aa, Agrobacterium tumefaciens str. C58; identical to SEQ ID NO: 1508

SEQ ID NO: 2969 - DNA, 786 bp, Agrobacterium tumefaciens str. C58; identical to SEQ ID NO: 1509
  CDS (1)..(786): transl_table=11

SEQ ID NO: 2970 - protein, 261 aa, Agrobacterium tumefaciens str. C58; identical to SEQ ID NO: 1510

SEQ ID NO: 2971 - DNA, 735 bp, Sinorhizobium meliloti 1021; identical to SEQ ID NO: 1511
  CDS (1)..(735): transl_table=11

SEQ ID NO: 2972 - protein, 244 aa, Sinorhizobium meliloti 1021; identical to SEQ ID NO: 1512

SEQ ID NO: 2973 - DNA, 798 bp, Ralstonia solanacearum GMI1000; identical to SEQ ID NO: 1513
  CDS (1)..(798): transl_table=11

SEQ ID NO: 2974 - protein, 265 aa, Ralstonia solanacearum GMI1000; identical to SEQ ID NO: 1514

SEQ ID NO: 2975 - DNA, 921 bp, Arabidopsis thaliana; identical to SEQ ID NO: 1515
  CDS (1)..(921)

SEQ ID NO: 2976 - protein, 306 aa, Arabidopsis thaliana; identical to SEQ ID NO: 1516

SEQ ID NO: 2977 - DNA, 1282 bp, Arabidopsis thaliana; identical to SEQ ID NO: 1517
  CDS (71)..(1102)

SEQ ID NO: 2978 - protein, 343 aa, Arabidopsis thaliana; identical to SEQ ID NO: 1518

SEQ ID NO: 2979 - DNA, 756 bp, Drosophila melanogaster; identical to SEQ ID NO: 1519
  CDS (1)..(756)

SEQ ID NO: 2980 - protein, 251 aa, Drosophila melanogaster; identical to SEQ ID NO: 1520

SEQ ID NO: 2981 - DNA, 750 bp, Drosophila melanogaster; identical to SEQ ID NO: 1521
  CDS (1)..(750)

SEQ ID NO: 2982 - protein, 249 aa, Drosophila melanogaster; identical to SEQ ID NO: 1522

SEQ ID NO: 2983 - DNA, 777 bp, Methanosarcina acetivorans C2A; identical to SEQ ID NO: 1523
  CDS (1)..(777): transl_table=11

SEQ ID NO: 2984 - protein, 258 aa, Methanosarcina acetivorans C2A; identical to SEQ ID NO: 1524

SEQ ID NO: 2985 - DNA, 801 bp, Streptomyces coelicolor A3(2); identical to SEQ ID NO: 1016
  CDS (1)..(801): transl_table=11

SEQ ID NO: 2986 - protein, 266 aa, Streptomyces coelicolor A3(2); identical to SEQ ID NO: 1017

SEQ ID NO: 2987 - DNA, 768 bp, Streptomyces coelicolor A3(2); identical to SEQ ID NO: 1527
  CDS (1)..(768): transl_table=11

SEQ ID NO: 2988 - protein, 255 aa, Streptomyces coelicolor A3(2); identical to SEQ ID NO: 1528

SEQ ID NO: 2989 - DNA, 795 bp, Streptomyces coelicolor A3(2); identical to SEQ ID NO: 1529
  CDS (1)..(795): transl_table=11

SEQ ID NO: 2990 - protein, 264 aa, Streptomyces coelicolor A3(2); identical to SEQ ID NO: 1530

SEQ ID NO: 2991 - DNA, 774 bp, Drosophila melanogaster; identical to SEQ ID NO: 1531
  CDS (1)..(774)

SEQ ID NO: 2992 - protein, 257 aa, Drosophila melanogaster; identical to SEQ ID NO: 1532

SEQ ID NO: 2993 - DNA, 741 bp, Yersinia pestis KIM; identical to SEQ ID NO: 1533
  CDS (1)..(741): transl_table=11

SEQ ID NO: 2994 - protein, 246 aa, Yersinia pestis KIM; identical to SEQ ID NO: 1534

SEQ ID NO: 2995 - DNA, 780 bp, Leptospira interrogans serovar Lai str. 56601; identical to SEQ ID NO: 1535
  CDS (1)..(780): transl_table=11

SEQ ID NO: 2996 - protein, 259 aa, Leptospira interrogans serovar Lai str. 56601; identical to SEQ ID NO: 1536

SEQ ID NO: 2997 - DNA, 948 bp, Escherichia coli CFT073; identical to SEQ ID NO: 1537
  CDS (1)..(948): transl_table=11

SEQ ID NO: 2998 - protein, 315 aa, Escherichia coli CFT073; identical to SEQ ID NO: 1538

SEQ ID NO: 2999 - DNA, 747 bp, Bradyrhizobium japonicum USDA 110; identical to SEQ ID NO: 1539
  CDS (1)..(747): transl_table=11

SEQ ID NO: 3000 - protein, 248 aa, Bradyrhizobium japonicum USDA 110; identical to SEQ ID NO: 1540

SEQ ID NO: 3001 - DNA, 810 bp, Bradyrhizobium japonicum USDA 110; identical to SEQ ID NO: 1541
  CDS (1)..(810): transl_table=11

SEQ ID NO: 3002 - protein, 269 aa, Bradyrhizobium japonicum USDA 110; identical to SEQ ID NO: 1542

SEQ ID NO: 3003 - DNA, 750 bp, Clostridium tetani E88; identical to SEQ ID NO: 1543
  CDS (1)..(750): transl_table=11

SEQ ID NO: 3004 - protein, 249 aa, Clostridium tetani E88; identical to SEQ ID NO: 1544

SEQ ID NO: 3005 - DNA, 747 bp, Bacteroides thetaiotaomicron VPI-5482; identical to SEQ ID NO: 1545
  CDS (1)..(747): transl_table=11

SEQ ID NO: 3006 - protein, 248 aa, Bacteroides thetaiotaomicron VPI-5482; identical to SEQ ID NO: 1546

SEQ ID NO: 3007 - DNA, 765 bp, Enterococcus faecalis V583; identical to SEQ ID NO: 1547
  CDS (1)..(765): transl_table=11

SEQ ID NO: 3008 - protein, 254 aa, Enterococcus faecalis V583; identical to SEQ ID NO: 1548

SEQ ID NO: 3009 - DNA, 831 bp, Streptomyces avermitilis MA-4680; identical to SEQ ID NO: 1549
  CDS (1)..(831): transl_table=11

SEQ ID NO: 3010 - protein, 276 aa, Streptomyces avermitilis MA-4680; identical to SEQ ID NO: 1550

SEQ ID NO: 3011 - DNA, 765 bp, Streptomyces rochei; identical to SEQ ID NO: 1551
  CDS (1)..(765): transl_table=11

SEQ ID NO: 3012 - protein, 254 aa, Streptomyces rochei; identical to SEQ ID NO: 1552

SEQ ID NO: 3013 - DNA, 753 bp, Bordetella parapertussis 12822; identical to SEQ ID NO: 1553
  CDS (1)..(753): transl_table=11

SEQ ID NO: 3014 - protein, 250 aa, Bordetella parapertussis 12822; identical to SEQ ID NO: 1554

SEQ ID NO: 3015 - DNA, 789 bp, Bordetella parapertussis 12822; identical to SEQ ID NO: 1555
  CDS (1)..(789): transl_table=11

SEQ ID NO: 3016 - protein, 262 aa, Bordetella parapertussis 12822; identical to SEQ ID NO: 1556

SEQ ID NO: 3017 - DNA, 753 bp, Bordetella bronchiseptica RB50; identical to SEQ ID NO: 1557
  CDS (1)..(753): transl_table=11

SEQ ID NO: 3018 - protein, 250 aa, Bordetella bronchiseptica RB50; identical to SEQ ID NO: 1558

SEQ ID NO: 3019 - DNA, 789 bp, Bordetella bronchiseptica RB50; identical to SEQ ID NO: 1559
  CDS (1)..(789): transl_table=11

SEQ ID NO: 3020 - protein, 262 aa, Bordetella bronchiseptica RB50; identical to SEQ ID NO: 1560

SEQ ID NO: 3021 - DNA, 738 bp, Bordetella bronchiseptica RB50; identical to SEQ ID NO: 1561
  CDS (1)..(738): transl_table=11

SEQ ID NO: 3022 - protein, 245 aa, Bordetella bronchiseptica RB50; identical to SEQ ID NO: 1562

SEQ ID NO: 3023 - DNA, 741 bp, Chromobacterium violaceum ATCC 12472; identical to SEQ ID NO: 1563
  CDS (1)..(741): transl_table=11

SEQ ID NO: 3024 - protein, 246 aa, Chromobacterium violaceum ATCC 12472; identical to SEQ ID NO: 1564

SEQ ID NO: 3025 - DNA, 735 bp, Rhodopseudomonas palustris CGA009; identical to SEQ ID NO: 1565
  CDS (1)..(735): transl_table=11

SEQ ID NO: 3026 - protein, 244 aa, Rhodopseudomonas palustris CGA009; identical to SEQ ID NO: 1566

SEQ ID NO: 3027 - DNA, 750 bp, Mycobacterium avium subsp. paratuberculosis K-10; identical to SEQ ID NO: 1567
  CDS (1)..(750): transl_table=11

SEQ ID NO: 3028 - protein, 249 aa, Mycobacterium avium subsp. paratuberculosis K-10; identical to SEQ ID NO: 1568

SEQ ID NO: 3029 - DNA, 795 bp, Bacillus cereus ATCC 10987; identical to SEQ ID NO: 1569
  CDS (1)..(795): transl_table=11

SEQ ID NO: 3030 - protein, 264 aa, Bacillus cereus ATCC 10987; identical to SEQ ID NO: 1570

SEQ ID NO: 3031 - DNA, 871 bp, Strongylocentrotus purpuratus; identical to SEQ ID NO: 1571
  CDS (119)..(871)

SEQ ID NO: 3032 - protein, 250 aa, Strongylocentrotus purpuratus; identical to SEQ ID NO: 1572

SEQ ID NO: 3033 - DNA, 833 bp, Strongylocentrotus purpuratus; identical to SEQ ID NO: 1573
  CDS (81)..(833)

SEQ ID NO: 3034 - protein, 250 aa, Strongylocentrotus purpuratus; identical to SEQ ID NO: 1574

SEQ ID NO: 3035 - DNA, 768 bp, Drosophila pseudoobscura; identical to SEQ ID NO: 1575
  CDS (1)..(768)

SEQ ID NO: 3036 - protein, 255 aa, Drosophila pseudoobscura; identical to SEQ ID NO: 1576

SEQ ID NO: 3037 - DNA, 819 bp, Magnaporthe grisea 70-15; identical to SEQ ID NO: 1046
  CDS (1)..(819)

SEQ ID NO: 3038 - protein, 272 aa, Magnaporthe grisea 70-15; identical to SEQ ID NO: 1047

SEQ ID NO: 3039 - DNA, 1119 bp, Nasonia vitripennis; identical to SEQ ID NO: 1579
  CDS (234)..(968)

SEQ ID NO: 3040 - protein, 244 aa, Nasonia vitripennis; identical to SEQ ID NO: 1580

SEQ ID NO: 3041 - DNA, 815 bp, Nasonia vitripennis; identical to SEQ ID NO: 1581
  CDS (1)..(753)

SEQ ID NO: 3042 - protein, 250 aa, Nasonia vitripennis; identical to SEQ ID NO: 1582

SEQ ID NO: 3043 - DNA, 1152 bp, Aedes aegypti; identical to SEQ ID NO: 1583
  CDS (59)..(787)

SEQ ID NO: 3044 - protein, 242 aa, Aedes aegypti; identical to SEQ ID NO: 1584

SEQ ID NO: 3045 - DNA, 1014 bp, Aedes aegypti; identical to SEQ ID NO: 1585
  CDS (112)..(951)

SEQ ID NO: 3046 - protein, 279 aa, Aedes aegypti; identical to SEQ ID NO: 1586

SEQ ID NO: 3047 - DNA, 787 bp, Aedes aegypti; identical to SEQ ID NO: 1587
  CDS (59)..(787)

SEQ ID NO: 3048 - protein, 242 aa, Aedes aegypti; identical to SEQ ID NO: 1588

SEQ ID NO: 3049 - DNA, 849 bp, Anopheles gambiae str. PEST; identical to SEQ ID NO: 1589
  CDS (1)..(849)

SEQ ID NO: 3050 - protein, 282 aa, Anopheles gambiae str. PEST; identical to SEQ ID NO: 1590

SEQ ID NO: 3051 - DNA, 825 bp, Magnaporthe grisea 70-15; identical to SEQ ID NO: 1056
  CDS (1)..(825)

SEQ ID NO: 3052 - protein, 274 aa, Magnaporthe grisea 70-15; identical to SEQ ID NO: 1057

SEQ ID NO: 3053 - DNA, 816 bp, Magnaporthe grisea 70-15; identical to SEQ ID NO: 1593
  CDS (1)..(816)

SEQ ID NO: 3054 - protein, 271 aa, Magnaporthe grisea 70-15; identical to SEQ ID NO: 1594

SEQ ID NO: 3055 - DNA, 837 bp, Magnaporthe grisea 70-15; identical to SEQ ID NO: 1595
  CDS (1)..(837)

SEQ ID NO: 3056 - protein, 278 aa, Magnaporthe grisea 70-15; identical to SEQ ID NO: 1596

SEQ ID NO: 3057 - DNA, 861 bp, Magnaporthe grisea 70-15; identical to SEQ ID NO: 1597
  CDS (1)..(861)

SEQ ID NO: 3058 - protein, 286 aa, Magnaporthe grisea 70-15; identical to SEQ ID NO: 1598

SEQ ID NO: 3059 - DNA, 1110 bp, Magnaporthe grisea 70-15; identical to SEQ ID NO: 1599
  CDS (1)..(1110)

SEQ ID NO: 3060 - protein, 369 aa, Magnaporthe grisea 70-15; identical to SEQ ID NO: 1600

SEQ ID NO: 3061 - DNA, 816 bp, Magnaporthe grisea 70-15; identical to SEQ ID NO: 1601
  CDS (1)..(816)

SEQ ID NO: 3062 - protein, 271 aa, Magnaporthe grisea 70-15; identical to SEQ ID NO: 1602

SEQ ID NO: 3063 - DNA, 852 bp, Gibberella zeae PH-1; identical to SEQ ID NO: 1603
  CDS (1)..(852)

SEQ ID NO: 3064 - protein, 283 aa, Gibberella zeae PH-1; identical to SEQ ID NO: 1604

SEQ ID NO: 3065 - DNA, 936 bp, Gibberella zeae PH-1; identical to SEQ ID NO: 1605
  CDS (1)..(936)

SEQ ID NO: 3066 - protein, 311 aa, Gibberella zeae PH-1; identical to SEQ ID NO: 1606

SEQ ID NO: 3067 - DNA, 882 bp, Gibberella zeae PH-1; identical to SEQ ID NO: 1607
  CDS (1)..(882)

SEQ ID NO: 3068 - protein, 293 aa, Gibberella zeae PH-1; identical to SEQ ID NO: 1608

SEQ ID NO: 3069 - DNA, 807 bp, Gibberella zeae PH-1; identical to SEQ ID NO: 1609
  CDS (1)..(807)

SEQ ID NO: 3070 - protein, 268 aa, Gibberella zeae PH-1; identical to SEQ ID NO: 1610

SEQ ID NO: 3071 - DNA, 1038 bp, Gibberella zeae PH-1; identical to SEQ ID NO: 1611
  CDS (1)..(1038)

SEQ ID NO: 3072 - protein, 345 aa, Gibberella zeae PH-1; identical to SEQ ID NO: 1612

SEQ ID NO: 3073 - DNA, 1086 bp, Gibberella zeae PH-1; identical to SEQ ID NO: 1613
  CDS (1)..(1086)

SEQ ID NO: 3074 - protein, 361 aa, Gibberella zeae PH-1; identical to SEQ ID NO: 1614

SEQ ID NO: 3075 - DNA, 819 bp, Gibberella zeae PH-1; identical to SEQ ID NO: 1615
  CDS (1)..(819)

SEQ ID NO: 3076 - protein, 272 aa, Gibberella zeae PH-1; identical to SEQ ID NO: 1616

SEQ ID NO: 3077 - DNA, 885 bp, Gibberella zeae PH-1; identical to SEQ ID NO: 1617
  CDS (1)..(885)

SEQ ID NO: 3078 - protein, 294 aa, Gibberella zeae PH-1; identical to SEQ ID NO: 1618

SEQ ID NO: 3079 - DNA, 813 bp, Gibberella zeae PH-1; identical to SEQ ID NO: 1619
  CDS (1)..(813)

SEQ ID NO: 3080 - protein, 270 aa, Gibberella zeae PH-1; identical to SEQ ID NO: 1620

SEQ ID NO: 3081 - DNA, 729 bp, Gibberella zeae PH-1; identical to SEQ ID NO: 1621
  CDS (1)..(729)

SEQ ID NO: 3082 - protein, 242 aa, Gibberella zeae PH-1; identical to SEQ ID NO: 1622

SEQ ID NO: 3083 - DNA, 771 bp, Kluyveromyces lactis NRRL Y-1140; identical to SEQ ID NO: 1623
  CDS (1)..(771)

SEQ ID NO: 3084 - protein, 256 aa, Kluyveromyces lactis NRRL Y-1140; identical to SEQ ID NO: 1624

SEQ ID NO: 3085 - DNA, 870 bp, Debaryomyces hansenii CBS767; identical to SEQ ID NO: 1625
  CDS (1)..(870)

SEQ ID NO: 3086 - protein, 289 aa, Debaryomyces hansenii CBS767; identical to SEQ ID NO: 1626

SEQ ID NO: 3087 - DNA, 825 bp, Yarrowia lipolytica CLIB122; identical to SEQ ID NO: 1627
  CDS (1)..(825)

SEQ ID NO: 3088 - protein, 274 aa, Yarrowia lipolytica CLIB122; identical to SEQ ID NO: 1628

SEQ ID NO: 3089 - DNA, 876 bp, Yarrowia lipolytica CLIB122; identical to SEQ ID NO: 1629
  CDS (1)..(876)

SEQ ID NO: 3090 - protein, 291 aa, Yarrowia lipolytica CLIB122; identical to SEQ ID NO: 1630

SEQ ID NO: 3091 - DNA, 942 bp, Yarrowia lipolytica CLIB122; identical to SEQ ID NO: 1631
  CDS (1)..(942)

SEQ ID NO: 3092 - protein, 313 aa, Yarrowia lipolytica CLIB122; identical to SEQ ID NO: 1632

SEQ ID NO: 3093 - DNA, 864 bp, Aspergillus nidulans FGSC A4; identical to SEQ ID NO: 1633
  CDS (1)..(864)

SEQ ID NO: 3094 - protein, 287 aa, Aspergillus nidulans FGSC A4; identical to SEQ ID NO: 1634

SEQ ID NO: 3095 - DNA, 837 bp, Aspergillus nidulans FGSC A4; identical to SEQ ID NO: 1635
  CDS (1)..(837)

SEQ ID NO: 3096 - protein, 278 aa, Aspergillus nidulans FGSC A4; identical to SEQ ID NO: 1636

SEQ ID NO: 3097 - DNA, 885 bp, Aspergillus nidulans FGSC A4; identical to SEQ ID NO: 1637
  CDS (1)..(885)

SEQ ID NO: 3098 - protein, 294 aa, Aspergillus nidulans FGSC A4; identical to SEQ ID NO: 1638

SEQ ID NO: 3099 - DNA, 993 bp, Aspergillus nidulans FGSC A4; identical to SEQ ID NO: 1639
  CDS (1)..(993)

SEQ ID NO: 3100 - protein, 330 aa, Aspergillus nidulans FGSC A4; identical to SEQ ID NO: 1640

SEQ ID NO: 3101 - DNA, 840 bp, Aspergillus nidulans FGSC A4; identical to SEQ ID NO: 1641
  CDS (1)..(840)

SEQ ID NO: 3102 - protein, 279 aa, Aspergillus nidulans FGSC A4; identical to SEQ ID NO: 1642

SEQ ID NO: 3103 - DNA, 801 bp, Aspergillus nidulans FGSC A4; identical to SEQ ID NO: 1643
  CDS (1)..(801)

SEQ ID NO: 3104 - protein, 266 aa, Aspergillus nidulans FGSC A4; identical to SEQ ID NO: 1644

SEQ ID NO: 3105 - DNA, 897 bp, Aspergillus nidulans FGSC A4; identical to SEQ ID NO: 1645
  CDS (1)..(897)

SEQ ID NO: 3106 - protein, 298 aa, Aspergillus nidulans FGSC A4; identical to SEQ ID NO: 1646

SEQ ID NO: 3107 - DNA, 891 bp, Aspergillus nidulans FGSC A4; identical to SEQ ID NO: 1647
  CDS (1)..(891)

SEQ ID NO: 3108 - protein, 296 aa, Aspergillus nidulans FGSC A4; identical to SEQ ID NO: 1648

SEQ ID NO: 3109 - DNA, 1122 bp, Ustilago maydis 521; identical to SEQ ID NO: 1649
  CDS (1)..(1122)

SEQ ID NO: 3110 - protein, 373 aa, Ustilago maydis 521; identical to SEQ ID NO: 1650

SEQ ID NO: 3111 - DNA, 879 bp, Ustilago maydis 521; identical to SEQ ID NO: 1651
  CDS (1)..(879)

SEQ ID NO: 3112 - protein, 292 aa, Ustilago maydis 521; identical to SEQ ID NO: 1652

SEQ ID NO: 3113 - DNA, 837 bp, Ustilago maydis 521; identical to SEQ ID NO: 1653
  CDS (1)..(837)

SEQ ID NO: 3114 - protein, 278 aa, Ustilago maydis 521; identical to SEQ ID NO: 1654

SEQ ID NO: 3115 - DNA, 1068 bp, Cryptococcus neoformans var. neoformans B-3501A; identical to SEQ ID NO: 1655
  CDS (1)..(1068)

SEQ ID NO: 3116 - protein, 355 aa, Cryptococcus neoformans var. neoformans B-3501A; identical to SEQ ID NO: 1656

SEQ ID NO: 3117 - DNA, 879 bp, Cryptococcus neoformans var. neoformans B-3501A; identical to SEQ ID NO: 1657
  CDS (1)..(879)

SEQ ID NO: 3118 - protein, 292 aa, Cryptococcus neoformans var. neoformans B-3501A; identical to SEQ ID NO: 1658

SEQ ID NO: 3119 - DNA, 837 bp, Cryptococcus neoformans var. neoformans B-3501A; identical to SEQ ID NO: 1659
  CDS (1)..(837)

SEQ ID NO: 3120 - protein, 278 aa, Cryptococcus neoformans var. neoformans B-3501A; identical to SEQ ID NO: 1660

SEQ ID NO: 3121 - DNA, 819 bp, Strongylocentrotus purpuratus; identical to SEQ ID NO: 1661
  CDS (1)..(819)

SEQ ID NO: 3122 - protein, 272 aa, Strongylocentrotus purpuratus; identical to SEQ ID NO: 1662

SEQ ID NO: 3123 - DNA, 801 bp, Tribolium castaneum; identical to SEQ ID NO: 1663
  CDS (1)..(801)

SEQ ID NO: 3124 - protein, 266 aa, Tribolium castaneum; identical to SEQ ID NO: 1664

SEQ ID NO: 3125 - DNA, 753 bp, Prochlorococcus marinus str. NATL1A; identical to SEQ ID NO: 1665
  CDS (1)..(753): transl_table=11

SEQ ID NO: 3126 - protein, 250 aa, Prochlorococcus marinus str. NATL1A; identical to SEQ ID NO: 1666

SEQ ID NO: 3127 - DNA, 774 bp, Mycobacterium sp. JLS; identical to SEQ ID NO: 1667
  CDS (1)..(774): transl_table=11

SEQ ID NO: 3128 - protein, 257 aa, Mycobacterium sp. JLS; identical to SEQ ID NO: 1668

SEQ ID NO: 3129 - DNA, 750 bp, Clostridium difficile 630; identical to SEQ ID NO: 1669
  CDS (1)..(750): transl_table=11

SEQ ID NO: 3130 - protein, 249 aa, Clostridium difficile 630; identical to SEQ ID NO: 1670

SEQ ID NO: 3131 - DNA, 765 bp, Burkholderia vietnamiensis G4; identical to SEQ ID NO: 1671
  CDS (1)..(765): transl_table=11

SEQ ID NO: 3132 - protein, 254 aa, Burkholderia vietnamiensis G4; identical to SEQ ID NO: 1672

SEQ ID NO: 3133 - DNA, 780 bp, Burkholderia vietnamiensis G4; identical to SEQ ID NO: 1673
  CDS (1)..(780): transl_table=11

SEQ ID NO: 3134 - protein, 259 aa, Burkholderia vietnamiensis G4; identical to SEQ ID NO: 1674

SEQ ID NO: 3135 - DNA, 780 bp, Streptococcus pyogenes str. Manfredo; identical to SEQ ID NO: 1675
  CDS (1)..(780)

SEQ ID NO: 3136 - protein, 259 aa, Streptococcus pyogenes str. Manfredo; identical to SEQ ID NO: 1676

SEQ ID NO: 3137 - DNA, 801 bp, Bradyrhizobium sp. ORS278; identical to SEQ ID NO: 1677
  CDS (1)..(801): transl_table=11

SEQ ID NO: 3138 - protein, 266 aa, Bradyrhizobium sp. ORS278; identical to SEQ ID NO: 1678

SEQ ID NO: 3139 - DNA, 735 bp, Bradyrhizobium sp. ORS278; identical to SEQ ID NO: 1679
  CDS (1)..(735): transl_table=11

SEQ ID NO: 3140 - protein, 244 aa, Bradyrhizobium sp. ORS278; identical to SEQ ID NO: 1680

SEQ ID NO: 3141 - DNA, 744 bp, Xanthobacter autotrophicus Py2; identical to SEQ ID NO: 1681
  CDS (1)..(744): transl_table=11

SEQ ID NO: 3142 - protein, 247 aa, Xanthobacter autotrophicus Py2; identical to SEQ ID NO: 1682

SEQ ID NO: 3143 - DNA, 765 bp, Symbiobacterium thermophilum IAM 14863; identical to SEQ ID NO: 1683
  CDS (1)..(765): transl_table=11

SEQ ID NO: 3144 - protein, 254 aa, Symbiobacterium thermophilum IAM 14863; identical to SEQ ID NO: 1684

SEQ ID NO: 3145 - DNA, 729 bp, Agrobacterium tumefaciens; identical to SEQ ID NO: 1685
  CDS (1)..(729): transl_table=11

SEQ ID NO: 3146 - protein, 242 aa, Agrobacterium tumefaciens; identical to SEQ ID NO: 1686

SEQ ID NO: 3147 - DNA, 744 bp, Bacillus licheniformis ATCC 14580; identical to SEQ ID NO: 1687
  CDS (1)..(744): transl_table=11

SEQ ID NO: 3148 - protein, 247 aa, Bacillus licheniformis ATCC 14580; identical to SEQ ID NO: 1688

SEQ ID NO: 3149 - DNA, 780 bp, Burkholderia pseudomallei K96243; identical to SEQ ID NO: 1689
  CDS (1)..(780): transl_table=11

SEQ ID NO: 3150 - protein, 259 aa, Burkholderia pseudomallei K96243; identical to SEQ ID NO: 1690

SEQ ID NO: 3151 - DNA, 738 bp, Silicibacter pomeroyi DSS-3; identical to SEQ ID NO: 1691
  CDS (1)..(738): transl_table=11

SEQ ID NO: 3152 - protein, 245 aa, Silicibacter pomeroyi DSS-3; identical to SEQ ID NO: 1692

SEQ ID NO: 3153 - DNA, 744 bp, Bacillus clausii KSM-K16; identical to SEQ ID NO: 1693
  CDS (1)..(744): transl_table=11

SEQ ID NO: 3154 - protein, 247 aa, Bacillus clausii KSM-K16; identical to SEQ ID NO: 1694

SEQ ID NO: 3155 - DNA, 804 bp, Thermobifida fusca YX; identical to SEQ ID NO: 1695
  CDS (1)..(804): transl_table=11

SEQ ID NO: 3156 - protein, 267 aa, Thermobifida fusca YX; identical to SEQ ID NO: 1696

SEQ ID NO: 3157 - DNA, 753 bp, Prochlorococcus marinus str. NATL2A; identical to SEQ ID NO: 1697
  CDS (1)..(753): transl_table=11

SEQ ID NO: 3158 - protein, 250 aa, Prochlorococcus marinus str. NATL2A; identical to SEQ ID NO: 1698

SEQ ID NO: 3159 - DNA, 741 bp, Ralstonia eutropha JMP134; identical to SEQ ID NO: 1699
  CDS (1)..(741): transl_table=11

SEQ ID NO: 3160 - protein, 246 aa, Ralstonia eutropha JMP134; identical to SEQ ID NO: 1700

SEQ ID NO: 3161 - DNA, 756 bp, Ralstonia eutropha JMP134; identical to SEQ ID NO: 1701
  CDS (1)..(756): transl_table=11

SEQ ID NO: 3162 - protein, 251 aa, Ralstonia eutropha JMP134; identical to SEQ ID NO: 1702

SEQ ID NO: 3163 - DNA, 774 bp, Pseudomonas fluorescens PfO-1; identical to SEQ ID NO: 1703
  CDS (1)..(774): transl_table=11

SEQ ID NO: 3164 - protein, 257 aa, Pseudomonas fluorescens PfO-1; identical to SEQ ID NO: 1704

SEQ ID NO: 3165 - DNA, 819 bp, Pseudomonas fluorescens PfO-1; identical to SEQ ID NO: 1705
  CDS (1)..(819): transl_table=11

SEQ ID NO: 3166 - protein, 272 aa, Pseudomonas fluorescens PfO-1; identical to SEQ ID NO: 1706

SEQ ID NO: 3167 - DNA, 741 bp, Rhodobacter sphaeroides 2.4.1; identical to SEQ ID NO: 1707
  CDS (1)..(741): transl_table=11

SEQ ID NO: 3168 - protein, 246 aa, Rhodobacter sphaeroides 2.4.1; identical to SEQ ID NO: 1708

SEQ ID NO: 3169 - DNA, 774 bp, Burkholderia sp. 383; identical to SEQ ID NO: 1709
  CDS (1)..(774): transl_table=11

SEQ ID NO: 3170 - protein, 257 aa, Burkholderia sp. 383; identical to SEQ ID NO: 1710

SEQ ID NO: 3171 - DNA, 780 bp, Burkholderia sp. 383; identical to SEQ ID NO: 1711
  CDS (1)..(780): transl_table=11

SEQ ID NO: 3172 - protein, 259 aa, Burkholderia sp. 383; identical to SEQ ID NO: 1712

SEQ ID NO: 3173 - DNA, 741 bp, Burkholderia sp. 383; identical to SEQ ID NO: 1713
  CDS (1)..(741): transl_table=11

SEQ ID NO: 3174 - protein, 246 aa, Burkholderia sp. 383; identical to SEQ ID NO: 1714

SEQ ID NO: 3175 - DNA, 792 bp, Burkholderia thailandensis E264; identical to SEQ ID NO: 1715
  CDS (1)..(792): transl_table=11

SEQ ID NO: 3176 - protein, 263 aa, Burkholderia thailandensis E264; identical to SEQ ID NO: 1716

SEQ ID NO: 3177 - DNA, 744 bp, Burkholderia thailandensis E264; identical to SEQ ID NO: 1717
  CDS (1)..(744): transl_table=11

SEQ ID NO: 3178 - protein, 247 aa, Burkholderia thailandensis E264; identical to SEQ ID NO: 1718

SEQ ID NO: 3179 - DNA, 810 bp, Burkholderia thailandensis E264; identical to SEQ ID NO: 1719
  CDS (1)..(810): transl_table=11

SEQ ID NO: 3180 - protein, 269 aa, Burkholderia thailandensis E264; identical to SEQ ID NO: 1720

SEQ ID NO: 3181 - DNA, 747 bp, Novosphingobium aromaticivorans DSM 12444; identical to SEQ ID NO: 1721
  CDS (1)..(747): transl_table=11

SEQ ID NO: 3182 - protein, 248 aa, Novosphingobium aromaticivorans DSM 12444; identical to SEQ ID NO: 1722

SEQ ID NO: 3183 - DNA, 744 bp, Desulfitobacterium hafniense Y51; identical to SEQ ID NO: 1723
  CDS (1)..(744)

SEQ ID NO: 3184 - protein, 247 aa, Desulfitobacterium hafniense Y51; identical to SEQ ID NO: 1724

SEQ ID NO: 3185 - DNA, 744 bp, Burkholderia xenovorans LB400; identical to SEQ ID NO: 1725
  CDS (1)..(744): transl_table=11

SEQ ID NO: 3186 - protein, 247 aa, Burkholderia xenovorans LB400; identical to SEQ ID NO: 1726

SEQ ID NO: 3187 - DNA, 777 bp, Burkholderia xenovorans LB400; identical to SEQ ID NO: 1727
  CDS (1)..(777): transl_table=11

SEQ ID NO: 3188 - protein, 258 aa, Burkholderia xenovorans LB400; identical to SEQ ID NO: 1728

SEQ ID NO: 3189 - DNA, 741 bp, Ralstonia metallidurans CH34; identical to SEQ ID NO: 1729
  CDS (1)..(741): transl_table=11

SEQ ID NO: 3190 - protein, 246 aa, Ralstonia metallidurans CH34; identical to SEQ ID NO: 1730

SEQ ID NO: 3191 - DNA, 759 bp, Silicibacter sp. TM1040; identical to SEQ ID NO: 1731
  CDS (1)..(759): transl_table=11

SEQ ID NO: 3192 - protein, 252 aa, Silicibacter sp. TM1040; identical to SEQ ID NO: 1732

SEQ ID NO: 3193 - DNA, 738 bp, Silicibacter sp. TM1040; identical to SEQ ID NO: 1733
  CDS (1)..(738): transl_table=11

SEQ ID NO: 3194 - protein, 245 aa, Silicibacter sp. TM1040; identical to SEQ ID NO: 1734

SEQ ID NO: 3195 - DNA, 804 bp, Mycobacterium sp. MCS; identical to SEQ ID NO: 1735
  CDS (1)..(804): transl_table=11

SEQ ID NO: 3196 - protein, 267 aa, Mycobacterium sp. MCS; identical to SEQ ID NO: 1736

SEQ ID NO: 3197 - DNA, 840 bp, Mycobacterium sp. MCS; identical to SEQ ID NO: 1737
  CDS (1)..(840): transl_table=11

SEQ ID NO: 3198 - protein, 279 aa, Mycobacterium sp. MCS; identical to SEQ ID NO: 1738

SEQ ID NO: 3199 - DNA, 801 bp, Mycobacterium sp. MCS; identical to SEQ ID NO: 1739
  CDS (1)..(801): transl_table=11

SEQ ID NO: 3200 - protein, 266 aa, Mycobacterium sp. MCS; identical to SEQ ID NO: 1740

SEQ ID NO: 3201 - DNA, 795 bp, Mycobacterium sp. MCS; identical to SEQ ID NO: 1741
  CDS (1)..(795): transl_table=11

SEQ ID NO: 3202 - protein, 264 aa, Mycobacterium sp. MCS; identical to SEQ ID NO: 1742

SEQ ID NO: 3203 - DNA, 771 bp, Mycobacterium sp. MCS; identical to SEQ ID NO: 1743
  CDS (1)..(771): transl_table=11

SEQ ID NO: 3204 - protein, 256 aa, Mycobacterium sp. MCS; identical to SEQ ID NO: 1744

SEQ ID NO: 3205 - DNA, 738 bp, Mesorhizobium sp. BNC1; identical to SEQ ID NO: 1745
  CDS (1)..(738): transl_table=11

SEQ ID NO: 3206 - protein, 245 aa, Mesorhizobium sp. BNC1; identical to SEQ ID NO: 1746

SEQ ID NO: 3207 - DNA, 786 bp, Mesorhizobium sp. BNC1; identical to SEQ ID NO: 1747
  CDS (1)..(786): transl_table=11

SEQ ID NO: 3208 - protein, 261 aa, Mesorhizobium sp. BNC1; identical to SEQ ID NO: 1748

SEQ ID NO: 3209 - DNA, 777 bp, Mesorhizobium sp. BNC1; identical to SEQ ID NO: 1749
  CDS (1)..(777): transl_table=11

SEQ ID NO: 3210 - protein, 258 aa, Mesorhizobium sp. BNC1; identical to SEQ ID NO: 1750

SEQ ID NO: 3211 - DNA, 747 bp, Cytophaga hutchinsonii ATCC 33406; identical to SEQ ID NO: 1751
  CDS (1)..(747): transl_table=11

SEQ ID NO: 3212 - protein, 248 aa, Cytophaga hutchinsonii ATCC 33406; identical to SEQ ID NO: 1752

SEQ ID NO: 3213 - DNA, 741 bp, Clostridium perfringens ATCC 13124; identical to SEQ ID NO: 1753
  CDS (1)..(741): transl_table=11

SEQ ID NO: 3214 - protein, 246 aa, Clostridium perfringens ATCC 13124; identical to SEQ ID NO: 1754

SEQ ID NO: 3215 - DNA, 831 bp, Rhodococcus sp. RHA1; identical to SEQ ID NO: 1755
  CDS (1)..(831): transl_table=11

SEQ ID NO: 3216 - protein, 276 aa, Rhodococcus sp. RHA1; identical to SEQ ID NO: 1756

SEQ ID NO: 3217 - DNA, 744 bp, Rhodococcus sp. RHA1; identical to SEQ ID NO: 1757
  CDS (1)..(744): transl_table=11

SEQ ID NO: 3218 - protein, 247 aa, Rhodococcus sp. RHA1; identical to SEQ ID NO: 1758

SEQ ID NO: 3219 - DNA, 849 bp, Rhodococcus sp. RHA1; identical to SEQ ID NO: 1759
  CDS (1)..(849): transl_table=11

SEQ ID NO: 3220 - protein, 282 aa, Rhodococcus sp. RHA1; identical to SEQ ID NO: 1760

SEQ ID NO: 3221 - DNA, 750 bp, Rhodococcus sp. RHA1; identical to SEQ ID NO: 1761
  CDS (1)..(750): transl_table=11

SEQ ID NO: 3222 - protein, 249 aa, Rhodococcus sp. RHA1; identical to SEQ ID NO: 1762

SEQ ID NO: 3223 - DNA, 807 bp, Rhodococcus sp. RHA1; identical to SEQ ID NO: 1763
  CDS (1)..(807): transl_table=11

SEQ ID NO: 3224 - protein, 268 aa, Rhodococcus sp. RHA1; identical to SEQ ID NO: 1764

SEQ ID NO: 3225 - DNA, 744 bp, Alkalilimnicola ehrlichei MLHE-1; identical to SEQ ID NO: 1765
  CDS (1)..(744): transl_table=11

SEQ ID NO: 3226 - protein, 247 aa, Alkalilimnicola ehrlichei MLHE-1; identical to SEQ ID NO: 1766

SEQ ID NO: 3227 - DNA, 738 bp, Hyphomonas neptunium ATCC 15444; identical to SEQ ID NO: 1767
  CDS (1)..(738)

SEQ ID NO: 3228 - protein, 245 aa, Hyphomonas neptunium ATCC 15444; identical to SEQ ID NO: 1768

SEQ ID NO: 3229 - DNA, 780 bp, Rhizobium leguminosarum bv. viciae 3841; identical to SEQ ID NO: 1769
  CDS (1)..(780): transl_table=11

SEQ ID NO: 3230 - protein, 259 aa, Rhizobium leguminosarum bv. viciae 3841; identical to SEQ ID NO: 1770

SEQ ID NO: 3231 - DNA, 750 bp, Rhizobium leguminosarum bv. viciae 3841; identical to SEQ ID NO: 1771
  CDS (1)..(750): transl_table=11

SEQ ID NO: 3232 - protein, 249 aa, Rhizobium leguminosarum bv. viciae 3841; identical to SEQ ID NO: 1772

SEQ ID NO: 3233 - DNA, 783 bp, Pseudomonas aeruginosa UCBPP-PA14; identical to SEQ ID NO: 1773
  CDS (1)..(783): transl_table=11

SEQ ID NO: 3234 - protein, 260 aa, Pseudomonas aeruginosa UCBPP-PA14; identical to SEQ ID NO: 1774

SEQ ID NO: 3235 - DNA, 741 bp, Mycobacterium avium 104; identical to SEQ ID NO: 1775
  CDS (1)..(741): transl_table=11

SEQ ID NO: 3236 - protein, 246 aa, Mycobacterium avium 104; identical to SEQ ID NO: 1776

SEQ ID NO: 3237 - DNA, 750 bp, Mycobacterium avium 104; identical to SEQ ID NO: 1777
  CDS (1)..(750): transl_table=11

SEQ ID NO: 3238 - protein, 249 aa, Mycobacterium avium 104; identical to SEQ ID NO: 1778

SEQ ID NO: 3239 - DNA, 735 bp, Mycobacterium smegmatis str. MC2 155; identical to SEQ ID NO: 1779
  CDS (1)..(735): transl_table=11

SEQ ID NO: 3240 - protein, 244 aa, Mycobacterium smegmatis str. MC2 155; identical to SEQ ID NO: 1780

SEQ ID NO: 3241 - DNA, 768 bp, Mycobacterium smegmatis str. MC2 155; identical to SEQ ID NO: 1781
  CDS (1)..(768): transl_table=11

SEQ ID NO: 3242 - protein, 255 aa, Mycobacterium smegmatis str. MC2 155; identical to SEQ ID NO: 1782

SEQ ID NO: 3243 - DNA, 774 bp, Nocardioides sp. JS614; identical to SEQ ID NO: 1783
  CDS (1)..(774): transl_table=11

SEQ ID NO: 3244 - protein, 257 aa, Nocardioides sp. JS614; identical to SEQ ID NO: 1784

SEQ ID NO: 3245 - DNA, 777 bp, Nocardioides sp. JS614; identical to SEQ ID NO: 1785
  CDS (1)..(777): transl_table=11

SEQ ID NO: 3246 - protein, 258 aa, Nocardioides sp. JS614; identical to SEQ ID NO: 1786

SEQ ID NO: 3247 - DNA, 801 bp, Mycobacterium sp. KMS; identical to SEQ ID NO: 1787
  CDS (1)..(801): transl_table=11

SEQ ID NO: 3248 - protein, 266 aa, Mycobacterium sp. KMS; identical to SEQ ID NO: 1788

SEQ ID NO: 3249 - DNA, 783 bp, Acidovorax sp. JS42; identical to SEQ ID NO: 1789
  CDS (1)..(783): transl_table=11

SEQ ID NO: 3250 - protein, 260 aa, Acidovorax sp. JS42; identical to SEQ ID NO: 1790

SEQ ID NO: 3251 - DNA, 783 bp, Exiguobacterium sibiricum 255-15; identical to SEQ ID NO: 1791
  CDS (1)..(783)

SEQ ID NO: 3252 - protein, 260 aa, Exiguobacterium sibiricum 255-15; identical to SEQ ID NO: 1792

SEQ ID NO: 3253 - DNA, 741 bp, Roseovarius nubinhibens ISM; identical to SEQ ID NO: 1793
  CDS (1)..(741): transl_table=11

SEQ ID NO: 3254 - protein, 246 aa, Roseovarius nubinhibens ISM; identical to SEQ ID NO: 1794

SEQ ID NO: 3255 - DNA, 753 bp, Synechococcus sp. WH 7805; identical to SEQ ID NO: 1795
  CDS (1)..(753): transl_table=11

SEQ ID NO: 3256 - protein, 250 aa, Synechococcus sp. WH 7805; identical to SEQ ID NO: 1796

SEQ ID NO: 3257 - DNA, 744 bp, Desulfitobacterium hafniense DCB-2; identical to SEQ ID NO: 1797
  CDS (1)..(744): transl_table=11

SEQ ID NO: 3258 - protein, 247 aa, Desulfitobacterium hafniense DCB-2; identical to SEQ ID NO: 1798

SEQ ID NO: 3259 - DNA, 756 bp, marine gamma proteobacterium HTCC2080; identical to SEQ ID NO: 1799
  CDS (1)..(756): transl_table=11

SEQ ID NO: 3260 - protein, 251 aa, marine gamma proteobacterium HTCC2080; identical to SEQ ID NO: 1800

SEQ ID NO: 3261 - DNA, 771 bp, Pseudomonas putida GB-1; identical to SEQ ID NO: 1801
  CDS (1)..(771): transl_table=11

SEQ ID NO: 3262 - protein, 256 aa, Pseudomonas putida GB-1; identical to SEQ ID NO: 1802

SEQ ID NO: 3263 - DNA, 774 bp, Pseudomonas putida GB-1; identical to SEQ ID NO: 1803
  CDS (1)..(774): transl_table=11

SEQ ID NO: 3264 - protein, 257 aa, Pseudomonas putida GB-1; identical to SEQ ID NO: 1804

SEQ ID NO: 3265 - DNA, 744 bp, Bacillus sp. SG-1; identical to SEQ ID NO: 1805
  CDS (1)..(744): transl_table=11

SEQ ID NO: 3266 - protein, 247 aa, Bacillus sp. SG-1; identical to SEQ ID NO: 1806

SEQ ID NO: 3267 - DNA, 786 bp, Streptomyces echinatus; identical to SEQ ID NO: 1807
  CDS (1)..(786): transl_table=11

SEQ ID NO: 3268 - protein, 261 aa, Streptomyces echinatus; identical to SEQ ID NO: 1808

SEQ ID NO: 3269 - DNA, 846 bp, Oryza sativa subsp; identical to SEQ ID NO: 1809
  CDS (1)..(846)

SEQ ID NO: 3270 - protein, 281 aa, Oryza sativa subsp; identical to SEQ ID NO: 1810

SEQ ID NO: 3271 - DNA, 963 bp, Oryza sativa subsp; identical to SEQ ID NO: 1811
  CDS (1)..(963)

SEQ ID NO: 3272 - protein, 320 aa, Oryza sativa subsp; identical to SEQ ID NO: 1812

SEQ ID NO: 3273 - DNA, 837 bp, Oryza sativa subsp; identical to SEQ ID NO: 1813
  CDS (1)..(837)

SEQ ID NO: 3274 - protein, 278 aa, Oryza sativa subsp; identical to SEQ ID NO: 1814

SEQ ID NO: 3275 - DNA, 1179 bp, Oryza sativa subsp; identical to SEQ ID NO: 1815
  CDS (1)..(1179)

SEQ ID NO: 3276 - protein, 392 aa, Oryza sativa subsp; identical to SEQ ID NO: 1816

SEQ ID NO: 3277 - DNA, 897 bp, Oryza sativa subsp; identical to SEQ ID NO: 1817
  CDS (1)..(897)

SEQ ID NO: 3278 - protein, 298 aa, Oryza sativa subsp; identical to SEQ ID NO: 1818

SEQ ID NO: 3279 - DNA, 864 bp, Oryza sativa subsp; identical to SEQ ID NO: 1819
  CDS (1)..(864)

SEQ ID NO: 3280 - protein, 287 aa, Oryza sativa subsp; identical to SEQ ID NO: 1820

SEQ ID NO: 3281 - DNA, 873 bp, Oryza sativa subsp; identical to SEQ ID NO: 1821
  CDS (1)..(873)

SEQ ID NO: 3282 - protein, 290 aa, Oryza sativa subsp; identical to SEQ ID NO: 1822

SEQ ID NO: 3283 - DNA, 843 bp, Oryza sativa subsp; identical to SEQ ID NO: 1823
  CDS (1)..(843)

SEQ ID NO: 3284 - protein, 280 aa, Oryza sativa subsp; identical to SEQ ID NO: 1824

SEQ ID NO: 3285 - DNA, 924 bp, Oryza sativa subsp; identical to SEQ ID NO: 1825
  CDS (1)..(924)

SEQ ID NO: 3286 - protein, 307 aa, Oryza sativa subsp; identical to SEQ ID NO: 1826

SEQ ID NO: 3287 - DNA, 954 bp, Oryza sativa subsp; identical to SEQ ID NO: 1827
  CDS (1)..(954)

SEQ ID NO: 3288 - protein, 317 aa, Oryza sativa subsp; identical to SEQ ID NO: 1828

SEQ ID NO: 3289 - DNA, 1044 bp, Oryza sativa subsp; identical to SEQ ID NO: 1829
  CDS (1)..(1044)

SEQ ID NO: 3290 - protein, 347 aa, Oryza sativa subsp; identical to SEQ ID NO: 1830

SEQ ID NO: 3291 - DNA, 1134 bp, Oryza sativa subsp; identical to SEQ ID NO: 1831
  CDS (1)..(1134)

SEQ ID NO: 3292 - protein, 377 aa, Oryza sativa subsp; identical to SEQ ID NO: 1832

SEQ ID NO: 3293 - DNA, 876 bp, Oryza sativa subsp; identical to SEQ ID NO: 1833
  CDS (1)..(876)

SEQ ID NO: 3294 - protein, 291 aa, Oryza sativa subsp; identical to SEQ ID NO: 1834

SEQ ID NO: 3295 - DNA, 864 bp, Oryza sativa subsp; identical to SEQ ID NO: 1835
  CDS (1)..(864)

SEQ ID NO: 3296 - protein, 287 aa, Oryza sativa subsp; identical to SEQ ID NO: 1836

SEQ ID NO: 3297 - DNA, 1167 bp, Vitis vinifera; identical to SEQ ID NO: 1837
  CDS (1)..(1167)
  misc_feature (202)..(202): y is t or c
  misc_feature (250)..(250): s is g or c
  misc_feature (431)..(431): k is g or t
  misc_feature (576)..(576): r is g or a

SEQ ID NO: 3298 - protein, 388 aa, Vitis vinifera; identical to SEQ ID NO: 1838
  misc_feature (68)..(68): The Xaa at location 68 stands for His, or Tyr.
  misc_feature (84)..(84): The Xaa at location 84 stands for Asp, or His.
  misc_feature (144)..(144): The Xaa at location 144 stands for Cys, or Phe.

SEQ ID NO: 3299 - DNA, 777 bp, Agrobacterium tumefaciens; identical to SEQ ID NO: 1839
  CDS (1)..(777): transl_table=11

SEQ ID NO: 3300 - protein, 258 aa, Agrobacterium tumefaciens; identical to SEQ ID NO: 1840

SEQ ID NO: 3301 - DNA, 858 bp, Vitis vinifera; identical to SEQ ID NO: 1841
  CDS (1)..(858)

SEQ ID NO: 3302 - protein, 285 aa, Vitis vinifera; identical to SEQ ID NO: 1842

SEQ ID NO: 3303 - DNA, 849 bp, Vitis vinifera; identical to SEQ ID NO: 1843
  CDS (1)..(849)

SEQ ID NO: 3304 - protein, 282 aa, Vitis vinifera; identical to SEQ ID NO: 1844

SEQ ID NO: 3305 - DNA, 777 bp, Vitis vinifera; identical to SEQ ID NO: 1845
  CDS (1)..(777)

SEQ ID NO: 3306 - protein, 258 aa, Vitis vinifera; identical to SEQ ID NO: 1846

SEQ ID NO: 3307 - DNA, 789 bp, Vitis vinifera; identical to SEQ ID NO: 1847
  CDS (1)..(789)

SEQ ID NO: 3308 - protein, 262 aa, Vitis vinifera; identical to SEQ ID NO: 1848

SEQ ID NO: 3309 - DNA, 996 bp, Tripsacum dactyloides; identical to SEQ ID NO: 1849
  CDS (1)..(996)

SEQ ID NO: 3310 - protein, 331 aa, Tripsacum dactyloides; identical to SEQ ID NO: 1850

SEQ ID NO: 3311 - DNA, 825 bp, Streptomyces fungicidicus; identical to SEQ ID NO: 1851
  CDS (1)..(825): transl_table=11

SEQ ID NO: 3312 - protein, 274 aa, Streptomyces fungicidicus; identical to SEQ ID NO: 1852

SEQ ID NO: 3313 - DNA, 852 bp, Phaeosphaeria nodorum; identical to SEQ ID NO: 1853
  CDS (1)..(852)

SEQ ID NO: 3314 - protein, 283 aa, Phaeosphaeria nodorum; identical to SEQ ID NO: 1854

SEQ ID NO: 3315 - DNA, 759 bp, Phaeosphaeria nodorum; identical to SEQ ID NO: 1855
  CDS (1)..(759)

SEQ ID NO: 3316 - protein, 252 aa, Phaeosphaeria nodorum; identical to SEQ ID NO: 1856

SEQ ID NO: 3317 - DNA, 900 bp, Phaeosphaeria nodorum; identical to SEQ ID NO: 1857
  CDS (1)..(900)

SEQ ID NO: 3318 - protein, 299 aa, Phaeosphaeria nodorum; identical to SEQ ID NO: 1858

SEQ ID NO: 3319 - DNA, 744 bp, Phaeosphaeria nodorum; identical to SEQ ID NO: 1859
  CDS (1)..(744)

SEQ ID NO: 3320 - protein, 247 aa, Phaeosphaeria nodorum; identical to SEQ ID NO: 1860

SEQ ID NO: 3321 - DNA, 975 bp, Buchloe dactyloides; identical to SEQ ID NO: 1861
  CDS (1)..(975)

SEQ ID NO: 3322 - protein, 324 aa, Buchloe dactyloides; identical to SEQ ID NO: 1862

SEQ ID NO: 3323 - DNA, 810 bp, Aspergillus oryzae; identical to SEQ ID NO: 1863
  CDS (1)..(810)

SEQ ID NO: 3324 - protein, 269 aa, Aspergillus oryzae; identical to SEQ ID NO: 1864

SEQ ID NO: 3325 - DNA, 882 bp, Aspergillus oryzae; identical to SEQ ID NO: 1865
  CDS (1)..(882)

SEQ ID NO: 3326 - protein, 293 aa, Aspergillus oryzae; identical to SEQ ID NO: 1866

SEQ ID NO: 3327 - DNA, 816 bp, Aspergillus oryzae; identical to SEQ ID NO: 1867
  CDS (1)..(816)

SEQ ID NO: 3328 - protein, 271 aa, Aspergillus oryzae; identical to SEQ ID NO: 1868

SEQ ID NO: 3329 - DNA, 732 bp, Aspergillus oryzae; identical to SEQ ID NO: 1869
  CDS (1)..(732)

SEQ ID NO: 3330 - protein, 243 aa, Aspergillus oryzae; identical to SEQ ID NO: 1870

SEQ ID NO: 3331 - DNA, 1131 bp, Aspergillus oryzae; identical to SEQ ID NO: 1871
  CDS (1)..(1131)

SEQ ID NO: 3332 - protein, 376 aa, Aspergillus oryzae; identical to SEQ ID NO: 1872

SEQ ID NO: 3333 - DNA, 780 bp, Aspergillus oryzae; identical to SEQ ID NO: 1873
  CDS (1)..(780)

SEQ ID NO: 3334 - protein, 259 aa, Aspergillus oryzae; identical to SEQ ID NO: 1874

SEQ ID NO: 3335 - DNA, 822 bp, Aspergillus oryzae; identical to SEQ ID NO: 1875
  CDS (1)..(822)

SEQ ID NO: 3336 - protein, 273 aa, Aspergillus oryzae; identical to SEQ ID NO: 1876

SEQ ID NO: 3337 - DNA, 954 bp, Aspergillus oryzae; identical to SEQ ID NO: 1877
  CDS (1)..(954)

SEQ ID NO: 3338 - protein, 317 aa, Aspergillus oryzae; identical to SEQ ID NO: 1878

SEQ ID NO: 3339 - DNA, 786 bp, Aspergillus oryzae; identical to SEQ ID NO: 1879
  CDS (1)..(786)

SEQ ID NO: 3340 - protein, 261 aa, Aspergillus oryzae; identical to SEQ ID NO: 1880

SEQ ID NO: 3341 - DNA, 927 bp, Aspergillus oryzae; identical to SEQ ID NO: 1881
  CDS (1)..(927)

SEQ ID NO: 3342 - protein, 308 aa, Aspergillus oryzae; identical to SEQ ID NO: 1882

SEQ ID NO: 3343 - DNA, 867 bp, Aspergillus oryzae; identical to SEQ ID NO: 1883
  CDS (1)..(867)

SEQ ID NO: 3344 - protein, 288 aa, Aspergillus oryzae; identical to SEQ ID NO: 1884

SEQ ID NO: 3345 - DNA, 822 bp, Aspergillus oryzae; identical to SEQ ID NO: 1885
  CDS (1)..(822)

SEQ ID NO: 3346 - protein, 273 aa, Aspergillus oryzae; identical to SEQ ID NO: 1886

SEQ ID NO: 3347 - DNA, 873 bp, Aspergillus oryzae; identical to SEQ ID NO: 1887
  CDS (1)..(873)

SEQ ID NO: 3348 - protein, 290 aa, Aspergillus oryzae; identical to SEQ ID NO: 1888

SEQ ID NO: 3349 - DNA, 816 bp, Aspergillus oryzae; identical to SEQ ID NO: 1889
  CDS (1)..(816)

SEQ ID NO: 3350 - protein, 271 aa, Aspergillus oryzae; identical to SEQ ID NO: 1890

SEQ ID NO: 3351 - DNA, 774 bp, Streptomyces natalensis; identical to SEQ ID NO: 1891
  CDS (1)..(774): transl_table=11

SEQ ID NO: 3352 - protein, 257 aa, Streptomyces natalensis; identical to SEQ ID NO: 1892

SEQ ID NO: 3353 - DNA, 939 bp, Ixodes scapularis; identical to SEQ ID NO: 1893
  CDS (1)..(939)

SEQ ID NO: 3354 - protein, 312 aa, Ixodes scapularis; identical to SEQ ID NO: 1894

SEQ ID NO: 3355 - DNA, 786 bp, Streptomyces chartreusis; identical to SEQ ID NO: 1895
  CDS (1)..(786): transl_table=11

SEQ ID NO: 3356 - protein, 261 aa, Streptomyces chartreusis; identical to SEQ ID NO: 1896

SEQ ID NO: 3357 - DNA, 780 bp, Digitalis purpurea; identical to SEQ ID NO: 1897
  CDS (1)..(780)

SEQ ID NO: 3358 - protein, 259 aa, Digitalis purpurea; identical to SEQ ID NO: 1898

SEQ ID NO: 3359 - DNA, 780 bp, Digitalis thapsi; identical to SEQ ID NO: 1899
  CDS (1)..(780)

SEQ ID NO: 3360 - protein, 259 aa, Digitalis thapsi; identical to SEQ ID NO: 1900

SEQ ID NO: 3361 - DNA, 780 bp, Digitalis parviflora; identical to SEQ ID NO: 1901
  CDS (1)..(780)

SEQ ID NO: 3362 - protein, 259 aa, Digitalis parviflora; identical to SEQ ID NO: 1902

SEQ ID NO: 3363 - DNA, 780 bp, Digitalis grandiflora; identical to SEQ ID NO: 1903
  CDS (1)..(780)

SEQ ID NO: 3364 - protein, 259 aa, Digitalis grandiflora; identical to SEQ ID NO: 1904

SEQ ID NO: 3365 - DNA, 783 bp, uncultured bacterium; identical to SEQ ID NO: 1905
  CDS (1)..(783): transl_table=11

SEQ ID NO: 3366 - protein, 260 aa, uncultured bacterium; identical to SEQ ID NO: 1906

SEQ ID NO: 3367 - DNA, 780 bp, Streptomyces griseoruber; identical to SEQ ID NO: 1907
  CDS (1)..(780): transl_table=11

SEQ ID NO: 3368 - protein, 259 aa, Streptomyces griseoruber; identical to SEQ ID NO: 1908

SEQ ID NO: 3369 - DNA, 885 bp, Oryza sativa subsp; identical to SEQ ID NO: 1909
  CDS (1)..(885)

SEQ ID NO: 3370 - protein, 294 aa, Oryza sativa subsp; identical to SEQ ID NO: 1910

SEQ ID NO: 3371 - DNA, 738 bp, Neurospora crassa; identical to SEQ ID NO: 1911
  CDS (1)..(738)

SEQ ID NO: 3372 - protein, 245 aa, Neurospora crassa; identical to SEQ ID NO: 1912

SEQ ID NO: 3373 - DNA, 777 bp, Sinorhizobium sp; identical to SEQ ID NO: 1913
  CDS (1)..(777): transl_table=11

SEQ ID NO: 3374 - protein, 258 aa, Sinorhizobium sp; identical to SEQ ID NO: 1914

SEQ ID NO: 3375 - DNA, 936 bp, Oryza sativa subsp; identical to SEQ ID NO: 1915
  CDS (1)..(936)

SEQ ID NO: 3376 - protein, 311 aa, Oryza sativa subsp; identical to SEQ ID NO: 1916

SEQ ID NO: 3377 - DNA, 831 bp, Streptomyces atroolivaceus; identical to SEQ ID NO: 1917
  CDS (1)..(831): transl_table=11

SEQ ID NO: 3378 - protein, 276 aa, Streptomyces atroolivaceus; identical to SEQ ID NO: 1918

SEQ ID NO: 3379 - DNA, 825 bp, Phaseolus lunatus; identical to SEQ ID NO: 1919
  CDS (1)..(825)

SEQ ID NO: 3380 - protein, 274 aa, Phaseolus lunatus; identical to SEQ ID NO: 1920

SEQ ID NO: 3381 - DNA, 951 bp, Oryza sativa subsp; identical to SEQ ID NO: 1921
  CDS (1)..(951)

SEQ ID NO: 3382 - protein, 316 aa, Oryza sativa subsp; identical to SEQ ID NO: 1922

SEQ ID NO: 3383 - DNA, 951 bp, Oryza sativa subsp; identical to SEQ ID NO: 1923
  CDS (1)..(951)

SEQ ID NO: 3384 - protein, 316 aa, Oryza sativa subsp; identical to SEQ ID NO: 1924

SEQ ID NO: 3385 - DNA, 921 bp, Oryza sativa subsp; identical to SEQ ID NO: 1925
  CDS (1)..(921)

SEQ ID NO: 3386 - protein, 306 aa, Oryza sativa subsp; identical to SEQ ID NO: 1926

SEQ ID NO: 3387 - DNA, 930 bp, Oryza sativa subsp; identical to SEQ ID NO: 1927
  CDS (1)..(930)

SEQ ID NO: 3388 - protein, 309 aa, Oryza sativa subsp; identical to SEQ ID NO: 1928

SEQ ID NO: 3389 - DNA, 786 bp, Azospirillum brasilense; identical to SEQ ID NO: 1929
  CDS (1)..(786): transl_table=11

SEQ ID NO: 3390 - protein, 261 aa, Azospirillum brasilense; identical to SEQ ID NO: 1930

SEQ ID NO: 3391 - DNA, 780 bp, Digitalis lanata; identical to SEQ ID NO: 1931
  CDS (1)..(780)

SEQ ID NO: 3392 - protein, 259 aa, Digitalis lanata; identical to SEQ ID NO: 1932

SEQ ID NO: 3393 - DNA, 921 bp, Arabidopsis thaliana; identical to SEQ ID NO: 1933
  CDS (1)..(921)

SEQ ID NO: 3394 - protein, 306 aa, Arabidopsis thaliana; identical to SEQ ID NO: 1934

SEQ ID NO: 3395 - DNA, 810 bp, Ophiostoma floccosum; identical to SEQ ID NO: 1935
  CDS (1)..(810)

SEQ ID NO: 3396 - protein, 269 aa, Ophiostoma floccosum; identical to SEQ ID NO: 1936

SEQ ID NO: 3397 - DNA, 771 bp, Pseudomonas putida; identical to SEQ ID NO: 1937
  CDS (1)..(771): transl_table=11

SEQ ID NO: 3398 - protein, 256 aa, Pseudomonas putida; identical to SEQ ID NO: 1938

SEQ ID NO: 3399 - DNA, 852 bp, Candida magnoliae; identical to SEQ ID NO: 1939
  CDS (1)..(852)

SEQ ID NO: 3400 - protein, 283 aa, Candida magnoliae; identical to SEQ ID NO: 1940

SEQ ID NO: 3401 - DNA, 741 bp, Rhodococcus erythropolis; identical to SEQ ID NO: 1941
  CDS (1)..(741): transl_table=11

SEQ ID NO: 3402 - protein, 246 aa, Rhodococcus erythropolis; identical to SEQ ID NO: 1942

SEQ ID NO: 3403 - DNA, 822 bp, Streptomyces antibioticus; identical to SEQ ID NO: 1943
  CDS (1)..(822): transl_table=11

SEQ ID NO: 3404 - protein, 273 aa, Streptomyces antibioticus; identical to SEQ ID NO: 1944

SEQ ID NO: 3405 - DNA, 768 bp, Pseudomonas sp; identical to SEQ ID NO: 1945
  CDS (1)..(768): transl_table=11

SEQ ID NO: 3406 - protein, 255 aa, Pseudomonas sp; identical to SEQ ID NO: 1946

SEQ ID NO: 3407 - DNA, 825 bp, Streptomyces griseus subsp; identical to SEQ ID NO: 1947
  CDS (1)..(825): transl_table=11

SEQ ID NO: 3408 - protein, 274 aa, Streptomyces griseus subsp; identical to SEQ ID NO: 1948

SEQ ID NO: 3409 - DNA, 738 bp, Rhizobium leguminosarum; identical to SEQ ID NO: 1949
  CDS (1)..(738): transl_table=11

SEQ ID NO: 3410 - protein, 245 aa, Rhizobium leguminosarum; identical to SEQ ID NO: 1950

SEQ ID NO: 3411 - DNA, 774 bp, Streptomyces virginiae; identical to SEQ ID NO: 1951
  CDS (1)..(774): transl_table=11

SEQ ID NO: 3412 - protein, 257 aa, Streptomyces virginiae; identical to SEQ ID NO: 1952

SEQ ID NO: 3413 - DNA, 828 bp, Rhodococcus erythropolis; identical to SEQ ID NO: 1953
  CDS (1)..(828): transl_table=11

SEQ ID NO: 3414 - protein, 275 aa, Rhodococcus erythropolis; identical to SEQ ID NO: 1954

SEQ ID NO: 3415 - DNA, 852 bp, Arabidopsis thaliana; identical to SEQ ID NO: 1955
  CDS (1)..(852)

SEQ ID NO: 3416 - protein, 283 aa, Arabidopsis thaliana; identical to SEQ ID NO: 1956

SEQ ID NO: 3417 - DNA, 858 bp, Arabidopsis thaliana; identical to SEQ ID NO: 1957
  CDS (1)..(858)

SEQ ID NO: 3418 - protein, 285 aa, Arabidopsis thaliana; identical to SEQ ID NO: 1958

SEQ ID NO: 3419 - DNA, 768 bp, Bacillus subtilis; identical to SEQ ID NO: 1959
  CDS (7)..(768): transl_table=11

SEQ ID NO: 3420 - protein, 253 aa, Bacillus subtilis; identical to SEQ ID NO: 1960

SEQ ID NO: 3421 - DNA, 777 bp, Rhizobium meliloti; identical to SEQ ID NO: 1961
  CDS (1)..(777): transl_table=11

SEQ ID NO: 3422 - protein, 258 aa, Rhizobium meliloti; identical to SEQ ID NO: 1962

SEQ ID NO: 3423 - DNA, 777 bp, Bacillus subtilis; identical to SEQ ID NO: 1963
  CDS (1)..(777): transl_table=11

SEQ ID NO: 3424 - protein, 258 aa, Bacillus subtilis; identical to SEQ ID NO: 1964

SEQ ID NO: 3425 - DNA, 786 bp, Streptomyces cinnamonensis; identical to SEQ ID NO: 1965
  CDS (1)..(786): transl_table=11

SEQ ID NO: 3426 - protein, 261 aa, Streptomyces cinnamonensis; identical to SEQ ID NO: 1966

SEQ ID NO: 3427 - DNA, 741 bp, Bacillus subtilis; identical to SEQ ID NO: 1967
  CDS (1)..(741): transl_table=11

SEQ ID NO: 3428 - protein, 246 aa, Bacillus subtilis; identical to SEQ ID NO: 1968

SEQ ID NO: 3429 - DNA, 741 bp, Thermotoga maritima; identical to SEQ ID NO: 1969
  CDS (1)..(741): transl_table=11

SEQ ID NO: 3430 - protein, 246 aa, Thermotoga maritima; identical to SEQ ID NO: 1970

SEQ ID NO: 3431 - DNA, 738 bp, Rhizobium meliloti; identical to SEQ ID NO: 1971
  CDS (1)..(738): transl_table=11

SEQ ID NO: 3432 - protein, 245 aa, Rhizobium meliloti; identical to SEQ ID NO: 1972

SEQ ID NO: 3433 - DNA, 846 bp, Candida albicans; identical to SEQ ID NO: 1973
  CDS (1)..(846): transl_table=12

SEQ ID NO: 3434 - protein, 281 aa, Candida albicans; identical to SEQ ID NO: 1974

SEQ ID NO: 3435 - DNA, 1011 bp, Zea mays; identical to SEQ ID NO: 1975
  CDS (1)..(1011)

SEQ ID NO: 3436 - protein, 336 aa, Zea mays; identical to SEQ ID NO: 1976

SEQ ID NO: 3437 - DNA, 792 bp, Escherichia coli; identical to SEQ ID NO: 1977
  CDS (1)..(792): transl_table=11

SEQ ID NO: 3438 - protein, 263 aa, Escherichia coli; identical to SEQ ID NO: 1978

SEQ ID NO: 3439 - DNA, 792 bp, Salmonella typhi; identical to SEQ ID NO: 1979
  CDS (1)..(792): transl_table=11

SEQ ID NO: 3440 - protein, 263 aa, Salmonella typhi; identical to SEQ ID NO: 1980

SEQ ID NO: 3441 - DNA, 744 bp, Mycobacterium tuberculosis; identical to SEQ ID NO: 1981
  CDS (1)..(744): transl_table=11

SEQ ID NO: 3442 - protein, 247 aa, Mycobacterium tuberculosis; identical to SEQ ID NO: 1982

SEQ ID NO: 3443 - DNA, 756 bp, Thermotoga maritima; identical to SEQ ID NO: 1983
  CDS (1)..(756): transl_table=11

SEQ ID NO: 3444 - protein, 251 aa, Thermotoga maritima; identical to SEQ ID NO: 1984

SEQ ID NO: 3445 - DNA, 822 bp, Bacillus subtilis; identical to SEQ ID NO: 1985
  CDS (1)..(822): transl_table=11

SEQ ID NO: 3446 - protein, 273 aa, Bacillus subtilis; identical to SEQ ID NO: 1986

SEQ ID NO: 3447 - DNA, 774 bp, Bacillus subtilis; identical to SEQ ID NO: 1987
  CDS (1)..(774): transl_table=11

SEQ ID NO: 3448 - protein, 257 aa, Bacillus subtilis; identical to SEQ ID NO: 1988

SEQ ID NO: 3449 - DNA, 1002 bp, Oryza sativa; identical to SEQ ID NO: 1989
  CDS (1)..(1002)

SEQ ID NO: 3450 - protein, 333 aa, Oryza sativa; identical to SEQ ID NO: 1990

SEQ ID NO: 3451 - DNA, 960 bp, Oryza sativa; identical to SEQ ID NO: 1991
  CDS (1)..(960)

SEQ ID NO: 3452 - protein, 319 aa, Oryza sativa; identical to SEQ ID NO: 1992

SEQ ID NO: 3453 - DNA, 897 bp, Oryza sativa; identical to SEQ ID NO: 1993
  CDS (1)..(897)

SEQ ID NO: 3454 - protein, 298 aa, Oryza sativa; identical to SEQ ID NO: 1994

SEQ ID NO: 3455 - DNA, 855 bp, Brassica napus; identical to SEQ ID NO: 1180
  CDS (1)..(855)

SEQ ID NO: 3456 - protein, 284 aa, Brassica napus; identical to SEQ ID NO: 1181

SEQ ID NO: 3457 - DNA, 903 bp, Brassica napus; identical to SEQ ID NO: 1182
  CDS (1)..(903)

SEQ ID NO: 3458 - protein, 300 aa, Brassica napus; identical to SEQ ID NO: 1183

SEQ ID NO: 3459 - DNA, 789 bp, Brassica napus; identical to SEQ ID NO: 1999
  CDS (1)..(789)

SEQ ID NO: 3460 - protein, 262 aa, Brassica napus; identical to SEQ ID NO: 2000

SEQ ID NO: 3461 - DNA, 786 bp, Brassica napus; identical to SEQ ID NO: 2001
  CDS (1)..(786)

SEQ ID NO: 3462 - protein, 261 aa, Brassica napus; identical to SEQ ID NO: 2002

SEQ ID NO: 3463 - DNA, 1044 bp, Brassica napus; identical to SEQ ID NO: 2003
  CDS (1)..(1044)

SEQ ID NO: 3464 - protein, 347 aa, Brassica napus; identical to SEQ ID NO: 2004

SEQ ID NO: 3465 - DNA, 777 bp, Brassica napus; identical to SEQ ID NO: 2005
  CDS (1)..(777)

SEQ ID NO: 3466 - protein, 258 aa, Brassica napus; identical to SEQ ID NO: 2006

SEQ ID NO: 3467 - DNA, 828 bp, Glycine max; identical to SEQ ID NO: 1186
  CDS (1)..(828)

SEQ ID NO: 3468 - protein, 275 aa, Glycine max; identical to SEQ ID NO: 1187

SEQ ID NO: 3469 - DNA, 987 bp, Brassica napus; identical to SEQ ID NO: 1188
  CDS (1)..(987)

SEQ ID NO: 3470 - protein, 328 aa, Brassica napus; identical to SEQ ID NO: 1189

SEQ ID NO: 3471 - DNA, 987 bp, Brassica napus; identical to SEQ ID NO: 1190
  CDS (1)..(987)

SEQ ID NO: 3472 - protein, 328 aa, Brassica napus; identical to SEQ ID NO: 1191

SEQ ID NO: 3473 - DNA, 897 bp, Glycine max; identical to SEQ ID NO: 2013
  CDS (1)..(897)

SEQ ID NO: 3474 - protein, 298 aa, Glycine max; identical to SEQ ID NO: 2014

SEQ ID NO: 3475 - DNA, 816 bp, Glycine max; identical to SEQ ID NO: 1192
  CDS (1)..(816)

SEQ ID NO: 3476 - protein, 271 aa, Glycine max; identical to SEQ ID NO: 1193

SEQ ID NO: 3477 - DNA, 795 bp, Glycine max; identical to SEQ ID NO: 2017
  CDS (1)..(795)

SEQ ID NO: 3478 - protein, 264 aa, Glycine max; identical to SEQ ID NO: 2018

SEQ ID NO: 3479 - DNA, 852 bp, Glycine max; identical to SEQ ID NO: 1194
  CDS (1)..(852)

SEQ ID NO: 3480 - protein, 283 aa, Glycine max; identical to SEQ ID NO: 1195

SEQ ID NO: 3481 - DNA, 810 bp, Glycine max; identical to SEQ ID NO: 1196
  CDS (1)..(810)

SEQ ID NO: 3482 - protein, 269 aa, Glycine max; identical to SEQ ID NO: 1197

SEQ ID NO: 3483 - DNA, 810 bp, Glycine max; identical to SEQ ID NO: 2023
  CDS (1)..(810)

SEQ ID NO: 3484 - protein, 269 aa, Glycine max; identical to SEQ ID NO: 2024

SEQ ID NO: 3485 - DNA, 915 bp, Triticum aestivum; identical to SEQ ID NO: 2025
  CDS (1)..(915)

SEQ ID NO: 3486 - protein, 304 aa, Triticum aestivum; identical to SEQ ID NO: 2026

SEQ ID NO: 3487 - DNA, 804 bp, Glycine max; identical to SEQ ID NO: 2027
  CDS (1)..(804)

SEQ ID NO: 3488 - protein, 267 aa, Glycine max; identical to SEQ ID NO: 2028

SEQ ID NO: 3489 - DNA, 951 bp, Zea mays; identical to SEQ ID NO: 2029
  CDS (1)..(951)

SEQ ID NO: 3490 - protein, 316 aa, Zea mays; identical to SEQ ID NO: 2030

SEQ ID NO: 3491 - DNA, 969 bp, Linum usitatissimum; identical to SEQ ID NO: 2031
  CDS (1)..(969)

SEQ ID NO: 3492 - protein, 322 aa, Linum usitatissimum; identical to SEQ ID NO: 2032

SEQ ID NO: 3493 - DNA, 834 bp, Linum usitatissimum; identical to SEQ ID NO: 1200
  CDS (1)..(834)

SEQ ID NO: 3494 - protein, 277 aa, Linum usitatissimum; identical to SEQ ID NO: 1201

SEQ ID NO: 3495 - DNA, 870 bp, Linum usitatissimum; identical to SEQ ID NO: 2035
  CDS (1)..(870)

SEQ ID NO: 3496 - protein, 289 aa, Linum usitatissimum; identical to SEQ ID NO: 2036

SEQ ID NO: 3497 - DNA, 843 bp, Linum usitatissimum; identical to SEQ ID NO: 2037
  CDS (1)..(843)

SEQ ID NO: 3498 - protein, 280 aa, Linum usitatissimum; identical to SEQ ID NO: 2038

SEQ ID NO: 3499 - DNA, 819 bp, Hordeum vulgare; identical to SEQ ID NO: 2039
  CDS (1)..(819)

SEQ ID NO: 3500 - protein, 272 aa, Hordeum vulgare; identical to SEQ ID NO: 2040

SEQ ID NO: 3501 - DNA, 984 bp, Hordeum vulgare; identical to SEQ ID NO: 2041
  CDS (1)..(984)

SEQ ID NO: 3502 - protein, 327 aa, Hordeum vulgare; identical to SEQ ID NO: 2042

SEQ ID NO: 3503 - DNA, 789 bp, Hordeum vulgare; identical to SEQ ID NO: 2043
  CDS (1)..(789)

SEQ ID NO: 3504 - protein, 262 aa, Hordeum vulgare; identical to SEQ ID NO: 2044

SEQ ID NO: 3505 - DNA, 762 bp, Zea mays; identical to SEQ ID NO: 2045
  CDS (1)..(762)

SEQ ID NO: 3506 - protein, 253 aa, Zea mays; identical to SEQ ID NO: 2046

SEQ ID NO: 3507 - DNA, 792 bp, Brassica napus; identical to SEQ ID NO: 2047
  CDS (1)..(792)

SEQ ID NO: 3508 - protein, 263 aa, Brassica napus; identical to SEQ ID NO: 2048

SEQ ID NO: 3509 - DNA, 849 bp, Brassica napus; identical to SEQ ID NO: 2049
  CDS (1)..(849)

SEQ ID NO: 3510 - protein, 282 aa, Brassica napus; identical to SEQ ID NO: 2050

SEQ ID NO: 3511 - DNA, 960 bp, Brassica napus; identical to SEQ ID NO: 2051
  CDS (1)..(960)

SEQ ID NO: 3512 - protein, 319 aa, Brassica napus; identical to SEQ ID NO: 2052

SEQ ID NO: 3513 - DNA, 849 bp, Brassica napus; identical to SEQ ID NO: 2053
  CDS (1)..(849)

SEQ ID NO: 3514 - protein, 282 aa, Brassica napus; identical to SEQ ID NO: 2054

SEQ ID NO: 3515 - DNA, 801 bp, Brassica napus; identical to SEQ ID NO: 2055
  CDS (1)..(801)

SEQ ID NO: 3516 - protein, 266 aa, Brassica napus; identical to SEQ ID NO: 2056

SEQ ID NO: 3517 - DNA, 789 bp, Brassica napus; identical to SEQ ID NO: 2057
  CDS (1)..(789)

SEQ ID NO: 3518 - protein, 262 aa, Brassica napus; identical to SEQ ID NO: 2058

SEQ ID NO: 3519 - DNA, 987 bp, Brassica napus; identical to SEQ ID NO: 1206
  CDS (1)..(987)

SEQ ID NO: 3520 - protein, 328 aa, Brassica napus; identical to SEQ ID NO: 1207

SEQ ID NO: 3521 - DNA, 849 bp, Brassica napus; identical to SEQ ID NO: 1208
  CDS (1)..(849)

SEQ ID NO: 3522 - protein, 282 aa, Brassica napus; identical to SEQ ID NO: 1209

SEQ ID NO: 3523 - DNA, 801 bp, Brassica napus; identical to SEQ ID NO: 2063
  CDS (1)..(801)

SEQ ID NO: 3524 - protein, 266 aa, Brassica napus; identical to SEQ ID NO: 2064

SEQ ID NO: 3525 - DNA, 987 bp, Brassica napus; identical to SEQ ID NO: 1212
  CDS (1)..(987)

SEQ ID NO: 3526 - protein, 328 aa, Brassica napus; identical to SEQ ID NO: 1213

SEQ ID NO: 3527 - DNA, 858 bp, Brassica napus; identical to SEQ ID NO: 2067
  CDS (1)..(858)

SEQ ID NO: 3528 - protein, 285 aa, Brassica napus; identical to SEQ ID NO: 2068

SEQ ID NO: 3529 - DNA, 798 bp, Glycine max; identical to SEQ ID NO: 2069
  CDS (1)..(798)

SEQ ID NO: 3530 - protein, 265 aa, Glycine max; identical to SEQ ID NO: 2070

SEQ ID NO: 3531 - DNA, 882 bp, Glycine max; identical to SEQ ID NO: 2071
  CDS (1)..(882)

SEQ ID NO: 3532 - protein, 293 aa, Glycine max; identical to SEQ ID NO: 2072

SEQ ID NO: 3533 - DNA, 882 bp, Glycine max; identical to SEQ ID NO: 2073
  CDS (1)..(882)

SEQ ID NO: 3534 - protein, 293 aa, Glycine max; identical to SEQ ID NO: 2074

SEQ ID NO: 3535 - DNA, 849 bp, Glycine max; identical to SEQ ID NO: 2075
  CDS (1)..(849)

SEQ ID NO: 3536 - protein, 282 aa, Glycine max; identical to SEQ ID NO: 2076

SEQ ID NO: 3537 - DNA, 963 bp, Glycine max; identical to SEQ ID NO: 2077
  CDS (1)..(963)

SEQ ID NO: 3538 - protein, 320 aa, Glycine max; identical to SEQ ID NO: 2078

SEQ ID NO: 3539 - DNA, 861 bp, Glycine max; identical to SEQ ID NO: 2079
  CDS (1)..(861)

SEQ ID NO: 3540 - protein, 286 aa, Glycine max; identical to SEQ ID NO: 2080

SEQ ID NO: 3541 - DNA, 759 bp, Glycine max; identical to SEQ ID NO: 2081
  CDS (1)..(759)

SEQ ID NO: 3542 - protein, 252 aa, Glycine max; identical to SEQ ID NO: 2082

SEQ ID NO: 3543 - DNA, 885 bp, Glycine max; identical to SEQ ID NO: 2083
  CDS (1)..(885)

SEQ ID NO: 3544 - protein, 294 aa, Glycine max; identical to SEQ ID NO: 2084

SEQ ID NO: 3545 - DNA, 768 bp, Glycine max; identical to SEQ ID NO: 2085
  CDS (1)..(768)

SEQ ID NO: 3546 - protein, 255 aa, Glycine max; identical to SEQ ID NO: 2086

SEQ ID NO: 3547 - DNA, 804 bp, Glycine max; identical to SEQ ID NO: 2087
  CDS (1)..(804)

SEQ ID NO: 3548 - protein, 267 aa, Glycine max; identical to SEQ ID NO: 2088

SEQ ID NO: 3549 - DNA, 843 bp, Glycine max; identical to SEQ ID NO: 2089
  CDS (1)..(843)

SEQ ID NO: 3550 - protein, 280 aa, Glycine max; identical to SEQ ID NO: 2090

SEQ ID NO: 3551 - DNA, 795 bp, Glycine max; identical to SEQ ID NO: 2091
  CDS (1)..(795)

SEQ ID NO: 3552 - protein, 264 aa, Glycine max; identical to SEQ ID NO: 2092

SEQ ID NO: 3553 - DNA, 963 bp, Glycine max; identical to SEQ ID NO: 2093
  CDS (1)..(963)

SEQ ID NO: 3554 - protein, 320 aa, Glycine max; identical to SEQ ID NO: 2094

SEQ ID NO: 3555 - DNA, 810 bp, Glycine max; identical to SEQ ID NO: 1214
  CDS (1)..(810)

SEQ ID NO: 3556 - protein, 269 aa, Glycine max; identical to SEQ ID NO: 1215

SEQ ID NO: 3557 - DNA, 816 bp, Glycine max; identical to SEQ ID NO: 2097
  CDS (1)..(816)

SEQ ID NO: 3558 - protein, 271 aa, Glycine max; identical to SEQ ID NO: 2098

SEQ ID NO: 3559 - DNA, 963 bp, Glycine max; identical to SEQ ID NO: 2099
  CDS (1)..(963)

SEQ ID NO: 3560 - protein, 320 aa, Glycine max; identical to SEQ ID NO: 2100

SEQ ID NO: 3561 - DNA, 822 bp, Glycine max; identical to SEQ ID NO: 2101
  CDS (1)..(822)

SEQ ID NO: 3562 - protein, 273 aa, Glycine max; identical to SEQ ID NO: 2102

SEQ ID NO: 3563 - DNA, 819 bp, Glycine max; identical to SEQ ID NO: 2103
  CDS (1)..(819)

SEQ ID NO: 3564 - protein, 272 aa, Glycine max; identical to SEQ ID NO: 2104

SEQ ID NO: 3565 - DNA, 804 bp, Glycine max; identical to SEQ ID NO: 2105
  CDS (1)..(804)

SEQ ID NO: 3566 - protein, 267 aa, Glycine max; identical to SEQ ID NO: 2106

SEQ ID NO: 3567 - DNA, 960 bp, Glycine max; identical to SEQ ID NO: 2107
  CDS (1)..(960)

SEQ ID NO: 3568 - protein, 319 aa, Glycine max; identical to SEQ ID NO: 2108

SEQ ID NO: 3569 - DNA, 864 bp, Glycine max; identical to SEQ ID NO: 1216
  CDS (1)..(864)

SEQ ID NO: 3570 - protein, 287 aa, Glycine max; identical to SEQ ID NO: 1217

SEQ ID NO: 3571 - DNA, 849 bp, Glycine max; identical to SEQ ID NO: 2111
  CDS (1)..(849)

SEQ ID NO: 3572 - protein, 282 aa, Glycine max; identical to SEQ ID NO: 2112

SEQ ID NO: 3573 - DNA, 858 bp, Brassica napus; identical to SEQ ID NO: 2113
  CDS (1)..(858)

SEQ ID NO: 3574 - protein, 285 aa, Brassica napus; identical to SEQ ID NO: 2114

SEQ ID NO: 3575 - DNA, 762 bp, Oryza sativa; identical to SEQ ID NO: 2115
  CDS (1)..(762)

SEQ ID NO: 3576 - protein, 253 aa, Oryza sativa; identical to SEQ ID NO: 2116

SEQ ID NO: 3577 - DNA, 888 bp, Oryza sativa; identical to SEQ ID NO: 2117
  CDS (1)..(888)

SEQ ID NO: 3578 - protein, 295 aa, Oryza sativa; identical to SEQ ID NO: 2118

SEQ ID NO: 3579 - DNA, 1107 bp, Oryza sativa; identical to SEQ ID NO: 2119
  CDS (1)..(1107)

SEQ ID NO: 3580 - protein, 368 aa, Oryza sativa; identical to SEQ ID NO: 2120

SEQ ID NO: 3581 - DNA, 900 bp, Oryza sativa; identical to SEQ ID NO: 2121
  CDS (1)..(900)

SEQ ID NO: 3582 - protein, 299 aa, Oryza sativa; identical to SEQ ID NO: 2122

SEQ ID NO: 3583 - DNA, 795 bp, Oryza sativa; identical to SEQ ID NO: 2123
  CDS (1)..(795)

SEQ ID NO: 3584 - protein, 264 aa, Oryza sativa; identical to SEQ ID NO: 2124

SEQ ID NO: 3585 - DNA, 966 bp, Oryza sativa; identical to SEQ ID NO: 2125
  CDS (1)..(966)

SEQ ID NO: 3586 - protein, 321 aa, Oryza sativa; identical to SEQ ID NO: 2126

SEQ ID NO: 3587 - DNA, 1077 bp, Zea mays; identical to SEQ ID NO: 2127
  CDS (1)..(1077)

SEQ ID NO: 3588 - protein, 358 aa, Zea mays; identical to SEQ ID NO: 2128

SEQ ID NO: 3589 - DNA, 762 bp, Zea mays; identical to SEQ ID NO: 2129
  CDS (1)..(762)

SEQ ID NO: 3590 - protein, 253 aa, Zea mays; identical to SEQ ID NO: 2130

SEQ ID NO: 3591 - DNA, 843 bp, Zea mays; identical to SEQ ID NO: 2131
  CDS (1)..(843)

SEQ ID NO: 3592 - protein, 280 aa, Zea mays; identical to SEQ ID NO: 2132

SEQ ID NO: 3593 - DNA, 939 bp, Zea mays; identical to SEQ ID NO: 2133
  CDS (1)..(939)

SEQ ID NO: 3594 - protein, 312 aa, Zea mays; identical to SEQ ID NO: 2134

SEQ ID NO: 3595 - DNA, 843 bp, Zea mays; identical to SEQ ID NO: 2135
  CDS (1)..(843)

SEQ ID NO: 3596 - protein, 280 aa, Zea mays; identical to SEQ ID NO: 2136

SEQ ID NO: 3597 - DNA, 1011 bp, Zea mays; identical to SEQ ID NO: 2137
  CDS (1)..(1011)

SEQ ID NO: 3598 - protein, 336 aa, Zea mays; identical to SEQ ID NO: 2138

SEQ ID NO: 3599 - DNA, 1026 bp, Zea mays; identical to SEQ ID NO: 2139
  CDS (1)..(1026)

SEQ ID NO: 3600 - protein, 341 aa, Zea mays; identical to SEQ ID NO: 2140

SEQ ID NO: 3601 - DNA, 957 bp, Zea mays; identical to SEQ ID NO: 2141
  CDS (1)..(957)

SEQ ID NO: 3602 - protein, 318 aa, Zea mays; identical to SEQ ID NO: 2142

SEQ ID NO: 3603 - DNA, 939 bp, Zea mays; identical to SEQ ID NO: 2143
  CDS (1)..(939)

SEQ ID NO: 3604 - protein, 312 aa, Zea mays; identical to SEQ ID NO: 2144

SEQ ID NO: 3605 - DNA, 915 bp, Zea mays; identical to SEQ ID NO: 2145
  CDS (1)..(915)

SEQ ID NO: 3606 - protein, 304 aa, Zea mays; identical to SEQ ID NO: 2146

SEQ ID NO: 3607 - DNA, 843 bp, Zea mays; identical to SEQ ID NO: 2147
  CDS (1)..(843)

SEQ ID NO: 3608 - protein, 280 aa, Zea mays; identical to SEQ ID NO: 2148

SEQ ID NO: 3609 - DNA, 813 bp, Zea mays; identical to SEQ ID NO: 2149
  CDS (1)..(813)

SEQ ID NO: 3610 - protein, 270 aa, Zea mays; identical to SEQ ID NO: 2150

SEQ ID NO: 3611 - DNA, 762 bp, Zea mays; identical to SEQ ID NO: 2151
  CDS (1)..(762)

SEQ ID NO: 3612 - protein, 253 aa, Zea mays; identical to SEQ ID NO: 2152

SEQ ID NO: 3613 - DNA, 969 bp, Zea mays; identical to SEQ ID NO: 2153
  CDS (1)..(969)

SEQ ID NO: 3614 - protein, 322 aa, Zea mays; identical to SEQ ID NO: 2154

SEQ ID NO: 3615 - DNA, 762 bp, Zea mays; identical to SEQ ID NO: 2155
  CDS (1)..(762)

SEQ ID NO: 3616 - protein, 253 aa, Zea mays; identical to SEQ ID NO: 2156

SEQ ID NO: 3617 - DNA, 762 bp, Zea mays; identical to SEQ ID NO: 2157
  CDS (1)..(762)

SEQ ID NO: 3618 - protein, 253 aa, Zea mays; identical to SEQ ID NO: 2158

SEQ ID NO: 3619 - DNA, 957 bp, Zea mays; identical to SEQ ID NO: 2159
  CDS (1)..(957)

SEQ ID NO: 3620 - protein, 318 aa, Zea mays; identical to SEQ ID NO: 2160

SEQ ID NO: 3621 - DNA, 822 bp, Zea mays; identical to SEQ ID NO: 2161
  CDS (1)..(822)

SEQ ID NO: 3622 - protein, 273 aa, Zea mays; identical to SEQ ID NO: 2162

SEQ ID NO: 3623 - DNA, 792 bp, Zea mays; identical to SEQ ID NO: 2163
  CDS (1)..(792)

SEQ ID NO: 3624 - protein, 263 aa, Zea mays; identical to SEQ ID NO: 2164

SEQ ID NO: 3625 - DNA, 957 bp, Zea mays; identical to SEQ ID NO: 2165
  CDS (1)..(957)

SEQ ID NO: 3626 - protein, 318 aa, Zea mays; identical to SEQ ID NO: 2166

SEQ ID NO: 3627 - DNA, 762 bp, Zea mays; identical to SEQ ID NO: 2167
  CDS (1)..(762)

SEQ ID NO: 3628 - protein, 253 aa, Zea mays; identical to SEQ ID NO: 2168

SEQ ID NO: 3629 - DNA, 26 bp, Artificial sequence
  primer
atgtttatcctgtattttcagaggga

SEQ ID NO: 3630 - DNA, 24 bp, Artificial sequence
  primer
ttagataccgacgctaaccgtctc

SEQ ID NO: 3631 - protein, 354 aa, Artificial sequence; identical to SEQ ID NO: 2171
  consensus sequence
  Variant (2)..(8): Xaa in position 2 to 8 is any amino acid
  Variant (11)..(12): Xaa in position 11 to 12 is any amino acid
  Variant (13)..(22): Xaa in position 13 to 22 is any or no amino acid
  Variant (26)..(35): Xaa in position 26 to 35 is any amino acid
  Variant (37)..(57): Xaa in position 37 to 57 is any amino acid
  Variant (58)..(81): Xaa in position 58 to 81 is any or no amino acid
  Variant (83)..(93): Xaa in position 83 to 93 is any amino acid
  Variant (94)..(109): Xaa in position 94 to 109 is any or no amino acid
  Variant (111)..(114): Xaa in position 111 to 114 is any amino acid
  Variant (118)..(136): Xaa in position 118 to 136 is any amino acid
  Variant (137)..(149): Xaa in position 137 to 149 is any or no amino acid
  Variant (151)..(168): Xaa in position 151 to 168 is any amino acid
  Variant (169)..(189): Xaa in position 169 to 189 is any or no amino acid
  Variant (191)..(191): Xaa in position 191 is any amino acid
  Variant (193)..(196): Xaa in position 193 to 196 is any amino acid
  Variant (198)..(208): Xaa in position 198 to 208 is any amino acid
  Variant (209)..(212): Xaa in position 209 to 212 is any or no amino acid
  Variant (214)..(216): Xaa in position 214 to 216 is any amino acid
  Variant (218)..(236): Xaa in position 218 to 236 is any amino acid
  Variant (237)..(244): Xaa in position 237 to 244 is any or no amino acid
  Variant (246)..(248): Xaa in position 246 to 248 is any amino acid
  Variant (250)..(253): Xaa in position 250 to 253 is any amino acid
  Variant (255)..(279): Xaa in position 255 to 279 is any amino acid
  Variant (280)..(325): Xaa in position 280 to 325 is any or no amino acid
  Variant (327)..(333): Xaa in position 327 to 333 is any amino acid
  Variant (334)..(336): Xaa in position 334 to 336 is any or no amino acid
  Variant (338)..(341): Xaa in position 338 to 341 is any amino acid
  Variant (342)..(351): Xaa in position 342 to 351 is any or no amino acid

SEQ ID NO: 3632 - DNA, 258 bp, Glycine max
  CDS (1)..(258)
atggctcgcgcaggagggataacaaacgcagtgaacgtgggaatcgcggtgcaagccgattgggagaaccgcgaattcatctctcacatttctctcaacgttcatcgcctcttcgacttccttgtccaattcgaggctacgacgaagagcaagttggcgtctttgaatgagaagctggatgtgttggagcggaggttggagctgcttgaagttcaagtgggcaatgcttcggctaatccttctctttttgccacttga

SEQ ID NO: 3633 - protein, 85 aa, Glycine max
MARAGGITNAVNVGIAVQADWENREFISHISLNVHRLFDFLVQFEATTKSKLASLNEKLDVLERRLELLEVQVGNASANPSLFAT

SEQ ID NO: 3634 - DNA, 414 bp, Zea mays subsp. mays; identical to SEQ ID NO: 2174
  CDS (61)..(297)

SEQ ID NO: 3635 - protein, 78 aa, Zea mays subsp. mays; identical to SEQ ID NO: 2175

SEQ ID NO: 3636 - DNA, 426 bp, Zea mays; identical to SEQ ID NO: 2176
  CDS (58)..(312)

SEQ ID NO: 3637 - protein, 84 aa, Zea mays; identical to SEQ ID NO: 2177

SEQ ID NO: 3638 - DNA, 267 bp, Triticum aestivum; identical to SEQ ID NO: 2178
  CDS (1)..(267)

SEQ ID NO: 3639 - protein, 88 aa, Triticum aestivum; identical to SEQ ID NO: 2179

SEQ ID NO: 3640 - DNA, 358 bp, Gossypium hirsutum; identical to SEQ ID NO: 2180
  CDS (45)..(302)

SEQ ID NO: 3641 - protein, 85 aa, Gossypium hirsutum; identical to SEQ ID NO: 2181

SEQ ID NO: 3642 - DNA, 231 bp, Drosophila melanogaster; identical to SEQ ID NO: 2182
  CDS (1)..(231)

SEQ ID NO: 3643 - protein, 76 aa, Drosophila melanogaster; identical to SEQ ID NO: 2183

SEQ ID NO: 3644 - DNA, 234 bp, Strongylocentrotus purpuratus; identical to SEQ ID NO: 2184
  CDS (1)..(234)

SEQ ID NO: 3645 - protein, 77 aa, Strongylocentrotus purpuratus; identical to SEQ ID NO: 2185

SEQ ID NO: 3646 - DNA, 384 bp, Nasonia vitripennis; identical to SEQ ID NO: 2186
  CDS (56)..(286)

SEQ ID NO: 3647 - protein, 76 aa, Nasonia vitripennis; identical to SEQ ID NO: 2187

SEQ ID NO: 3648 - DNA, 228 bp, Anopheles gambiae str. PEST; identical to SEQ ID NO: 2188
  CDS (1)..(228)

SEQ ID NO: 3649 - protein, 75 aa, Anopheles gambiae str. PEST; identical to SEQ ID NO: 2189

SEQ ID NO: 3650 - DNA, 231 bp, Tribolium castaneum; identical to SEQ ID NO: 2190
  CDS (1)..(231)

SEQ ID NO: 3651 - protein, 76 aa, Tribolium castaneum; identical to SEQ ID NO: 2191

SEQ ID NO: 3652 - DNA, 948 bp, Oryza sativa subsp; identical to SEQ ID NO: 2192
  CDS (1)..(948)

SEQ ID NO: 3653 - protein, 315 aa, Oryza sativa subsp; identical to SEQ ID NO: 2193

SEQ ID NO: 3654 - DNA, 258 bp, Vitis vinifera; identical to SEQ ID NO: 2194
  CDS (1)..(258)

SEQ ID NO: 3655 - protein, 85 aa, Vitis vinifera; identical to SEQ ID NO: 2195

SEQ ID NO: 3656 - DNA, 231 bp, Triatoma infestans; identical to SEQ ID NO: 2196
  CDS (1)..(231)

SEQ ID NO: 3657 - protein, 76 aa, Triatoma infestans; identical to SEQ ID NO: 2197

SEQ ID NO: 3658 - DNA, 240 bp, Physcomitrella patens; identical to SEQ ID NO: 2198
  CDS (1)..(240)

SEQ ID NO: 3659 - protein, 79 aa, Physcomitrella patens; identical to SEQ ID NO: 2199

SEQ ID NO: 3660 - DNA, 231 bp, Ixodes scapularis; identical to SEQ ID NO: 2200
  CDS (1)..(231)

SEQ ID NO: 3661 - protein, 76 aa, Ixodes scapularis; identical to SEQ ID NO: 2201

SEQ ID NO: 3662 - DNA, 258 bp, Arabidopsis thaliana; identical to SEQ ID NO: 2202
  CDS (1)..(258)

SEQ ID NO: 3663 - protein, 85 aa, Arabidopsis thaliana; identical to SEQ ID NO: 2203

SEQ ID NO: 3664 - DNA, 255 bp, Zea mays; identical to SEQ ID NO: 2204
  CDS (1)..(255)

SEQ ID NO: 3665 - protein, 84 aa, Zea mays; identical to SEQ ID NO: 2205

SEQ ID NO: 3666 - DNA, 261 bp, Oryza sativa subsp; identical to SEQ ID NO: 2206
  CDS (1)..(261)

SEQ ID NO: 3667 - protein, 86 aa, Oryza sativa subsp; identical to SEQ ID NO: 2207

SEQ ID NO: 3668 - DNA, 231 bp, Oryza sativa; identical to SEQ ID NO: 2208
  CDS (1)..(231)

SEQ ID NO: 3669 - protein, 76 aa, Oryza sativa; identical to SEQ ID NO: 2209

SEQ ID NO: 3670 - DNA, 258 bp, GLYCINE MAX; identical to SEQ ID NO: 2172
  CDS (1)..(258)

SEQ ID NO: 3671 - protein, 85 aa, GLYCINE MAX; identical to SEQ ID NO: 2173

SEQ ID NO: 3672 - DNA, 23 bp, Artificial sequence
  primer
atggctcgcgcaggagggataac

SEQ ID NO: 3673 - DNA, 20 bp, Artificial sequence
  primer
tcaagtggcaaaaagagaag

SEQ ID NO: 3674 - protein, 76 aa, Artificial sequence; identical to SEQ ID NO: 2212
  consensus sequence
  Variant (2)..(12): Xaa in position 2 to 12 is any amino acid
  Variant (13)..(20): Xaa in position 13 to 20 is any or no amino acid
  Variant (22)..(22): Xaa in position 22 is any amino acid
  Variant (25)..(25): Xaa in position 25 is any amino acid
  Variant (29)..(29): Xaa in position 29 is any amino acid
  Variant (31)..(32): Xaa in position 31 to 32 is any amino acid
  Variant (34)..(42): Xaa in position 34 to 42 is any amino acid
  Variant (45)..(46): Xaa in position 45 to 46 is any amino acid
  Variant (48)..(52): Xaa in position 48 to 52 is any amino acid
  Variant (54)..(54): Xaa in position 54 is any amino acid
  Variant (57)..(57): Xaa in position 57 is any amino acid
  Variant (63)..(64): Xaa in position 63 to 64 is any amino acid
  Variant (68)..(69): Xaa in position 68 to 69 is any amino acid
  Variant (71)..(71): Xaa in position 71 is any amino acid
  Variant (74)..(75): Xaa in position 74 to 75 is any amino acid

SEQ ID NO: 3675 - protein, 59 aa, Artificial sequence; identical to SEQ ID NO: 2213
  protein pattern
  Variant (2)..(2): Xaa in position 2 is any amino acid
  Variant (3)..(3): Xaa in position 3 is any or no amino acid
  Variant (5)..(5): Xaa in position 5 is any or no amino acid
  Variant (8)..(8): Xaa in position 8 is any amino acid
  Variant (12)..(12): Xaa in position 12 is Phe or Tyr
  Variant (14)..(14): Xaa in position 14 is Glu or Ser
  Variant (15)..(15): Xaa in position 15 is any amino acid
  Variant (17)..(17): Xaa in position 17 is Ser or Thr
  Variant (18)..(18): Xaa in position 18 is Ala, Gly, Leu or Val
  Variant (19)..(19): Xaa in position 19 is Asn or Ser
  Variant (20)..(20): Xaa in position 20 is Ile or Val
  Variant (21)..(22): Xaa in position 21 to 22 is Lys or Arg
  Variant (23)..(23): Xaa in position 23 is Ile or Leu
  Variant (24)..(24): Xaa in position 24 is any amino acid
  Variant (25)..(25): Xaa in position 25 is Asp or Glu
  Variant (28)..(28): Xaa in position 28 is any amino acid
  Variant (29)..(29): Xaa in position 29 is Gln, Arg or Ser
  Variant (31)..(31): Xaa in position 31 is Asp or Glu
  Variant (32)..(32): Xaa in position 32 is any amino acid
  Variant (33)..(33): Xaa in position 33 is Ser or Thr
  Variant (34)..(34): Xaa in position 34 is Cys or Thr
  Variant (35)..(35): Xaa in position 35 is Lys or Arg
  Variant (37)..(37): Xaa in position 37 is Lys or Arg
  Variant (40)..(40): Xaa in position 40 is Ser or Val
  Variant (46)..(46): Xaa in position 46 is Asp or Thr
  Variant (47)..(47): Xaa in position 47 is any amino acid
  Variant (51)..(51): Xaa in position 51 is Lys or Arg
  Variant (52)..(52): Xaa in position 52 is Ile or Leu
  Variant (53)..(53): Xaa in position 53 is Asp or Glu
  Variant (54)..(54): Xaa in position 54 is any amino acid
  Variant (57)..(57): Xaa in position 57 is Ala or Val
  Variant (58)..(58): Xaa in position 58 is any amino acid
  Variant (59)..(59): Xaa in position 59 is Cys or Val

SEQ ID NO: 3676 - DNA, 2322 bp, Saccharomyces cerevisiae
  CDS (1)..(2322)
atgtcgagggagtcgaacgacacaatacagagcgatacggttagatcatcctctaaatcagactattttagaatccagctaaataatcaagactactatatgtcaaaacccacctttttggacccatcgcacggtgaaagcctgcccttaaaccagttttcacaggtcccaaacatcagggtgtttggtgctttacccacagggcatcaagtattgtgccacgtccatggcattctaccttacatgttcatcaagtatgatggacaaataactgacacgagtacattgagacaccaaagatgtgcccaagttcataaaacgctggaagtaaaaattagggcatcctttaaaaggaaaaaagatgataaacacgatttagccggcgacaaacttggaaatctcaattttgtcgctgatgtctctgttgtaaagggtataccattttatggttaccacgttggctggaatctgttttacaaaatttctttgcttaatccttcttgtctaagtaggatttcggaattgattagagatggcaagattttcggaaagaaattcgaaatttatgaatcacatattccttacttgctacaatggaccgcagattttaacttatttggatgttcatggataaacgtggataggtgttattttcgctctcctgttttaaatagtatactggacatagataagctgacaattaatgatgatcttcagttgttactagatcgattttgtgacttcaagtgtaacgtactcagtagaagggattttccacgggttggaaatggattgattgagatagatatactaccgcaattcatcaaaaatagagaaaagttacagcatagagatatacatcacgactttttggaaaaactgggagatatttctgacatacctgtcaaaccatatgtatcctctgctagggacatgataaatgaacttaccatgcaacgagaggagttgtccttgaaggaatataaagaaccaccagaaacaaagcgccatgtgagtggtcatcaatggcaatcttctggagagttcgaagcgttttataagaaagcacaacataaaacaagtacttttgatggtcaaataccaaattttgagaactttatagataagaatcaaaaattctcagccataaatacgccctatgaagcattaccgcaattgtggccaaggcttccacagattgaaataaacaataatagtatgcaagataaaaagaacgacgaccaagttaatgcatcgttcaccgaatacgagatatgtggtgttgataatgagaacgaaggtgtaaaaggaagcaatataaagtctcggtcttattcatggttaccggaaagcattgcgtctccgaaagattctactatactattagatcatcaaacaaaatatcacaatacgataaatttttcaatggattgtgctatgacgcaaaatatggcaagtaaacgaaaacttagatcatctgtttctgctaataaaacatcgttgctgtctcggaaaagaaagaaggttatggctgcgggattacgctatggaaaaagagcctttgtttatggtgagcctcctttcggttatcaagatattctgaataaattggaagacgagggattcccaaaaatagactataaggaccctttcttttcgaatccagttgatctagaaaataaaccttacgcgtacgcaggtaagaggtttgaaataagctcgacacatgtatcaacgagaatacccgtccaatttgggggagagaccgtatcagtttataacaagccaactttcgacatgttttcctcctggaaatatgcgttaaaaccacctacgtatgatgctgttcaaaaatggtacaataaagtaccctcgatgggaaacaaaaaaactgagtctcagataagcatgcacacccctcatagtaagtttttatacaaatttgctagtgacgtttctggaaaacaaaaaagaaaaaaaagtagcgttcacgattctcttactcatctgacacttgagattcatgcaaacacgagaagtgataaaattccagaccctgcaatagatgaagtttccatgattatatggtgtcttgaagaagaaactttccctttagatttggatatcgcttacgaagggattatgatagtccacaaagcttctgaggatagtacatttcctactaaaattcaacattgtattaacgaaattcccgtgatgttctatgaaagtgaatttgaaatgtttgaggctctaactgatttggtattacttcttgatcctgatattctttccggtttcgaaatacataatttttcgtga

SEQ ID NO: 3677 - protein, 773 aa, Saccharomyces cerevisiae
MSRESNDTIQSDTVRSSSKSDYFRIQLNNQDYYMSKPTFLDPSHGESLPLNQFSQVPNIRVFGALPTGHQVLCHVHGILPYMFIKYDGQITDTSTLRHQRCAQVHKTLEVKIRASFKRKKDDKHDLAGDKLGNLNFVADVSVVKGIPFYGYHVGWNLFYKISLLNPSCLSRISELIRDGKIFGKKFEIYESHIPYLLQWTADFNLFGCSWINVDRCYFRSPVLNSILDIDKLTINDDLQLLLDRFCDFKCNVLSRRDFPRVGNGLIEIDILPQFIKNREKLQHRDIHHDFLEKLGDISDIPVKPYVSSARDMINELTMQREELSLKEYKEPPETKRHVSGHQWQSSGEFEAFYKKAQHKTSTFDGQIPNFENFIDKNQKFSAINTPYEALPQLWPRLPQIEINNNSMQDKKNDDQVNASFTEYEICGVDNENEGVKGSNIKSRSYSWLPESIASPKDSTILLDHQTKYHNTINFSMDCAMTQNMASKRKLRSSVSANKTSLLSRKRKKVMAAGLRYGKRAFVYGEPPFGYQDILNKLEDEGFPKIDYKDPFFSNPVDLENKPYAYAGKRFEISSTHVSTRIPVQFGGETVSVYNKPTFDMFSSWKYALKPPTYDAVQKWYNKVPSMGNKKTESQISMHTPHSKFLYKFASDVSGKQKRKKSSVHDSLTHLTLEIHANTRSDKIPDPAIDEVSMIIWCLEEETFPLDLDIAYEGIMIVHKASEDSTFPTKIQHCINEIPVMFYESEFEMFEALTDLVLLLDPDILSGFEIHNFS

SEQ ID NO: 3678 - DNA, 4446 bp, Candida glabrata CBS 138; identical to SEQ ID NO: 2681
  CDS (1)..(4446)

SEQ ID NO: 3679 - protein, 1481 aa, Candida glabrata CBS 138; identical to SEQ ID NO: 2682

SEQ ID NO: 3680 - DNA, 4356 bp, Kluyveromyces lactis NRRL Y-1140; identical to SEQ ID NO: 2683
  CDS (1)..(4356)

SEQ ID NO: 3681 - protein, 1451 aa, Kluyveromyces lactis NRRL Y-1140; identical to SEQ ID NO: 2684

SEQ ID NO: 3682 - DNA, 3786 bp, Candida albicans SC5314
  CDS (1)..(3786): transl_table=12
atgaatactacaaatgaatcaacaaactataccactataaatgctagctctgtaaattggagtaacaatcaaattaattcttctttttccagtttgcgagtgcaaattaatgattatgatacttatcaaactctcccaaccagattggaccaactatgtactcaagtcactcaagttccgataatcagaatctatgggtctttatcggtacaaaactctttaagtaacacagattcgcctaacaagaagaagcggaaaatagatgagactacatcaccagcagtttttaatgttgttattcatgtacataatttctatccatatatctatgttgactgtcacgaaactgattttacgaaattggaaaatgacgattttatcaaattaataacagactatttagaaactgttttagaggaatcttttaaatatagaaaatcctcaaagaatctagatgatgatgaacagaaccatgttgaaaatttaaagcgatctggccagcgtaaatacattgcaaatgtatccgtttgtaaaggagtacccatttatgggtttcaattaggatacagatttttttacaaaatatctttgttatcgccactttacaaatccagattggcaaaactctttcaggaaaacacaatttcattatttagaataggcatggaaaagaagaaaaatgtaacttacaatcctgaaccagcttatgtatatgaggcacatattccgtatttgctacagtttttgaccgattacaatttatttggatgtggatgggtaaatatcgacaaggattttgttagccaggaagatgcaaagactcgtgggttatatttccgatccccaatttttacaaatatacataaatcatttcatagtcccaacgatttgcttgcactacgtcagtgtttatcaaattatattactgcggataatgtattatataatgggcagcttgataatgggaacccgtgtccttttaatcgaatcggtaaatccactcttgagatggatattaccacaaatagtatagtcaaccgtacatggcttagtcctcgagagcttcatgatgattttatagagaaagcagagtttctcgaatacaaaagagcaattgagctgggaagtcataagtatggttacaagtatgatcaagatggtcaaccgagaatttatttgtcttccttgaaacaaatttacaacgatctaaaatatcagtgtcgatcaagagattcactgtttaatgttgctgcagatgttttagaaaccgaaaactcgtcgtattttggtactggatctacaaactggtcgaatcaagaacagttgaacgagctatttgattacttgaagaagctaaatggtgatgtcaaattggattcactgaagtattccaaaaagtacctacaagcgagaaaattgaaacagccagctgttttttcaagaatacctacggctttccaattggttgacattgagaaatcaatagtgcaacataagcttaaaatgagatttgatagtgatttattaaattggactaattatgttaaattgtttgatctgcaaaatagtcaagtgttaaataacgatgaacctgttgcaatcaatattttgccagaggaaaatttatcggataatgagatttctgacaacaatgggagagagacgatgaatgaaaatactaattctgatgctgatgaaaatttggtgatagacaaccaacttgaagtagaacctaccgaaaacatcccaaaagaggacaacaaagaacctgatgattacgaattgacacaacttcatcaattcgatgaatctttaatgagaaatttgacacaaattcaagctacaaaaactgcaaatttcttgggtgtagaagatttgtcttatcttgatgacttttcatttacatcttcgcaaagccaatctgatttcaagaattttcaaataacagataacacatatgaagttcccattcctgaccaattgaaaccggaaaacattgatcagactttccagctggcagggttgctaaaggtgaattattcagatccattctatgacaatcaaaatgatgtacctgcaaaacctttggtatttgccaatcagaaaattgtggtgccattgaaaaatgagctgctgattcctagtcttgagatgtctcaattaattaaacaaaatacacacataactaaacccatatcccaaatattcagtacttggcagtatgtacctgaacccccgtctaagcgtgaagtcagtaagtggttaaaacatgatgaagcgtacacccttaaaaagaataccaaataccaattccagatagaaccaggagtgactcaatcttatgattacaagtattcatacaattctatgaaaatttcgagaagacctgacgagtttaattgtttgacgaattttcacatggaactacatgcgaatcctcccaatagtaaacttacagttgaccctttaagagatcccatttcattgattttttattctttcgatgatgctaataatatgtttagacatttaaatttcgcgtcgggtattttgatctttaataatacaaatattgatatgaatttgatacagagattatcacatacattgaataaacatattgaaatatttgacgatgaattgaaaatgattacaaaattagtcacactagttgagctctttgatccggatattttatcgggatatgaagtcaattcaatgtcgtggggttacattgttgagagactaagagatgtatttggtataaatataatgctggatttgagtcggggaagtttcaagagtaacgggaagtttggtgaccgatggggttacacacacacatcgaatatcgagatttcggggagacatatgcttaatgtatggcgaccgttaagatcagagttgagtctcaccagttattcgttggaaaatgtcacatatcatttactacataagtctttgccaagatatctgaattatagactatctgagtggctaaaagaaggtactttttccagtatctttgctgttttgtcgtactacataaacagaattgatattgttcttaaaataattaatgttcaggaattgattactagaaatgttgagcattccagattgattggaatcgagtttaattcaaatttctatcggggctctcaatataaggttgaatcgattttggcacgaatttgtaaaccagaaagtttattgttgaactcgccttccaaacaacaggttcatgaaatgagaccaatagaatgcattccgttgattttagaaccgaaatcaaacttttataaatcgcctttggtggtattagatttccaatcattgtatccgtcaatcatgattgcctataactattgctattcaactttggttggtaaattgcacaattatcgccccactaagaataatattggatatttacgtaatttgaaaattccctatgggttagtaaacttgcttcaaagggaagatggcttcaatatatctcctaatgggtttgtatttgttaaaagtcacattagaaagtctgtattagcaaagatgttggaagagattttaagtatcagaatcaaaatcaaacaagttatgaaattgtttaaagaggatgccgagttgacaaaactatacaattctagacaacttgccctaaagttaatagctaatgttacatacggttacacttcagctacatttagtggtagaatgcccaattctgatattgcggacgctatcgtgtccaccggaagagaaattttccaacatatcaagtga

SEQ ID NO: 3683 - protein, 1261 aa, Candida albicans SC5314
MNTTNESTNYTTINASSVNWSNNQINSSFSSLRVQINDYDTYQTLPTRLDQLCTQVTQVPIIRIYGSLSVQNSLSNTDSPNKKKRKIDETTSPAVFNVVIHVHNFYPYIYVDCHETDFTKLENDDFIKLITDYLETVLEESFKYRKSSKNLDDDEQNHVENLKRSGQRKYIANVSVCKGVPIYGFQLGYRFFYKISLLSPLYKSRLAKLFQENTISLFRIGMEKKKNVTYNPEPAYVYEAHIPYLLQFLTDYNLFGCGWVNIDKDFVSQEDAKTRGLYFRSPIFTNIHKSFHSPNDLLALRQCLSNYITADNVLYNGQLDNGNPCPFNRIGKSTLEMDITTNSIVNRTWLSPRELHDDFIEKAEFLEYKRAIESGSHKYGYKYDQDGQPRIYLSSLKQIYNDLKYQCRSRDSSFNVAADVLETENSSYFGTGSTNWSNQEQLNELFDYLKKLNGDVKLDSSKYSKKYLQARKLKQPAVFSRIPTAFQLVDIEKSIVQHKLKMRFDSDLLNWTNYVKLFDSQNSQVLNNDEPVAINILPEENLSDNEISDNNGRETMNENTNSDADENLVIDNQLEVEPTENIPKEDNKEPDDYELTQLHQFDESLMRNLTQIQATKTANFLGVEDLSYLDDFSFTSSQSQSDFKNFQITDNTYEVPIPDQLKPENIDQTFQSAGLLKVNYSDPFYDNQNDVPAKPLVFANQKIVVPLKNESSIPSLEMSQLIKQNTHITKPISQIFSTWQYVPEPPSKREVSKWLKHDEAYTLKKNTKYQFQIEPGVTQSYDYKYSYNSMKISRRPDEFNCLTNFHMELHANPPNSKLTVDPLRDPISLIFYSFDDANNMFRHLNFASGILIFNNTNIDMNLIQRLSHTLNKHIEIFDDELKMITKLVTLVELFDPDILSGYEVNSMSWGYIVERLRDVFGINIMSDLSRGSFKSNGKFGDRWGYTHTSNIEISGRHMLNVWRPLRSELSLTSYSLENVTYHLLHKSLPRYSNYRLSEWLKEGTFSSIFAVLSYYINRIDIVLKIINVQELITRNVEHSRLIGIEFNSNFYRGSQYKVESILARICKPESLLLNSPSKQQVHEMRPIECIPLILEPKSNFYKSPLVVLDFQSLYPSIMIAYNYCYSTLVGKLHNYRPTKNNIGYLRNLKIPYGLVNLLQREDGFNISPNGFVFVKSHIRKSVLAKMLEEILSIRIKIKQVMKLFKEDAELTKLYNSRQLALKLIANVTYGYTSATFSGRMPNSDIADAIVSTGREIFQHIK

SEQ ID NO: 3684 - DNA, 4782 bp, Pichia guilliermondii
  CDS (1)..(4782): transl_table=12
atgtgcagtcttcattttgtcatatgcagtctcttctctcacctgcactccttttatctgcactcctttcaatttttcttatctgcacttttatctactcagtgcatgggctttaaagtccagttcaacgactatgacacctatcagtcgctaccgctggatatagactgcttgtatggacaggtacatgtggtgccaattgtacgcatctacggctcattttcggtttctaataccgaaccccaatcttcggttgcaacttcttcctcaactactgcatctgcaaccattcttgatgagtctgcattgtcatttaccaccgtcttgcacgtgcacaacttctttccatacttttatattgacgctcctgttcatagcgttccattacaaacgataatttcctatttggagtcatgtctcggagagtcgtttcttcgcaatccaggtgacgatgatgaatacgaaaatgaaaagggaaccaacaccaatttgcctgaggctactgctggaggatcggaccagaaaagaagatttattgcacggatttctcgttgtaaaggtaccccggtatatgggtaccaagtgggtaacaaatgcatgttgaaagtatcattgctttctccagtttacaagacaagattggtacgtttgatacatgataagaaaatcaactttgccaacttttgctccacaaaacaaaagttcaagccaaatgtatacgagacccatttgcctatgcttcttcaattcctcacggatttcaacttatatggctgtggttgggttgaattggactctttctggttcaggtctcctgttcttgactacaattctccggctcttagcttcatttccactacgaatacagcacatttaaagcacagtttgcgcaaatatttgacccaaaaatcagtgctcaatcctcgacattatcccagaatagccaacagtgtccttgaaatagacgctatcactgcctcgattgctaatagaaatactttgcatgctaggcatcttcaccatgactttgttgaacgatacaatttcaaccccaatctggtggaaactccaacttacttgacatccacactgcatatcgtaaaggacttgaaataccaatgtgagatcagaggaagacagccggtgagctcacaaaacatcggtaacaatttagggttcagatcaacggagtgggctaattcaactgaacttcgaaaatcattggactatgttataaccttgaccggagcctacgaaaccgactacaaaagctactcgaaagcccgaataaaagacgaccatccagaacttccgtcgtcgtttgcactcgtcgatattgaaaaaacatacgatccaaaacctaaactacttcaatggtctggttatgactctcttttcagcgaaaagcaagaatcgtttcagtcgcaactttctcagctctcgcaagccaaagagcaaaagaaagtgttgagttctttcgattctctttcagatgctttgagttcctcaaaagaggttctggacctgccgtgggactctgaccagaacgaaactgaagaaaagagcgaacaaaatgaagaaaagagtgaacaaaatgaacctttggcgatcaattctgagacggacgagccagaagaacactcccaaatcatcaatgatgaagctatgttgcagatgactcaaaggcattctctcaaaagaccacttgaagagcctcctctgtctcctgttctacaagtgaatagctcgttttccgaattggaaccgcaacaagagttagtcagccaaatcgaattgtcgagttgcaatggatactgctatgaattgaaacaaccggctgcaatacagaaagaatgctttaaagatggactagattcagaaggcattctccaggtggactatgttgatcctttctattccaagtccgttgatggggcagcgaaacctttggtttttgccaataaaaagatcgtggttccctgtctcaatgactccaccattgctccattcagattacaaggtcaaagcactccttcatttagtgtcaagagtgtgttgaaatcagcttcaggtggcatgggtttgaacaaaaagctgtatttatgggagtatgctgttacaccaccgctgtctgcaagcataaaagattggcttgcaacagagaaaaagaagcggaacacatacacacaaattgagcatcctaatagtggaaccgctgccaaattcaagtactcgtatcgactggaactgtcgtcacgaagaccagattctttcattcgactaacgaactttcatgctgagatccatgtgaatactgattccaattcgcttccagatccagaattaaatctggtttctgcaattttttatcattttgacgatgcaaatcttatgtttgacaagattcccgttactggagtgttagttaaccgtgaaacttgtaacaacgtccacctattaaagtctgctgttgacatgaaaatcgagacctttgaggatgagaaatcaatggtggaccgtctcctttttctcgtggaagcattcgacccagacattctttgtggctacgaaatcaatgcttcgagctggggatatttggttgagagatttcgagcggcatacgacataaatttgctaccattgcttagtcgttgtactttcaaaagcaatggtaagtttggagataggtggggctatactcatacctcggctctcaagattaatgggcggcacttgttgaacgtttggcgagtttttcgatccaatgtgactttaacgtcgtattctttggaaaacgttgtctttcatattttgcaccaaacaatagccaagtgttccaatagatccctatcgaagtggttccgcagtgacaatgcaagcaagctcttgttcgtcctaaattattacatgcaacgcatacttttggtccagaagattcttgacgttagagagattatcaccaagaatgtagaagaagccaggttcattggagttgacttttactctgtattctttcgtgggtctcagtataaagtggaatcgattttatcgcggatttcaaaggttgaaagtttactattgaattcaccttcaaagacccaagtgagtaatatgaagccgctcgaggctatatcgttgatattggaacctgacgcaaacttttacaagtcgcctttggtggttttggattttcaatctttgtatccatccatcatgattgcgtacaactactgtttcaccacactattgggaagactagatggatttgatcccaagaaaaacaccattggtttcttgaagcacttggacttaccaccaggacttgttaacctattgaaagagaacgacgacatcaatctctcaccaaatgggtacatgtttgccaagagttctgtccgcaaatcgctactttccaagatgcttgaggaaatcttgaatacaagaatacaggtgaaaacggttatgctgatgtttaaagacgacaccaatctcgccaaattgctcaattcaagacaattagccctcaagttgattgcaaatgtcacctatggttatgcttcggcatctttcagcggaagaatgccgaattctgccattgccgatgcaattgtatccaccgggcgagagattttgacgaaatcaattaatatcattgagctggcaaactatggtgctaaagttgtctatggtgatactgactctttgttcatgtatttgcctggacgaagcaaggaagactcatttaagattggacgtgaagtagcagcacatataacttcgctttttccggatcccattcagttgaagtttgaaaaggtataccatccatgcgttctattgagcaaaaagaggtatgttggtaactgctttgagtatgagtcccaacaagaagctacattccaggcgaaaggaattgagacgattcgaagagatggaattccagctcaacagaagatagttgaaaaagcactaagaatacttttcactaccaaagacttgtcgctcgtcaaggactacactctcactcagttccgcaaaatcatagccaaccgaatatcgatacgggacttttgctttgcaaaggaagtccgttttggaacctacaaaagcttgaaccacatacctgctggagccatggttgcaatgcgcaaggtggctcgagatcctcggtcagaacctcagtatagagaaagagtaccgtatgtggttattgaagatgccgagaaacctcgaatacgtgatagaagcgtgcctccagaagagttcattgaagcttataggcacttgcggccggttcgccttgactatgaatactacataggacgagttttgattcctccgttggaaagaattttcaatctagttggagcggatatacgaggttggtataaggaaattcccaagcagacggctacagatctccacactggagtgttgaagatgtcaagacatatcaagtcgaaaacttgcattaactgtggaggacaagttgccgagggtgaatctacaagtgtgtgccgtgagtgcctcagcaacgaacaggcattgatggtgaattccgtgatgagcactcgttacagagaacgtcatttgactgaagttgcaagaacttgttatcattgtattagctccacttatgcttgtggcagttcgattcaaggcttggaaacacaatgcgagaaccaaagctgtgatgtgtattttgaaaggattcgaagcgttgtgtttaagtcgcagctcgaccagaaacaccagacaatagaggaagctgtggggtggtag

SEQ ID NO: 3685 - protein, 1593 aa, Pichia guilliermondii
MCSLHFVICSLFSHSHSFYSHSFQFFLSALLSTQCMGFKVQFNDYDTYQSLPSDIDCLYGQVHVVPIVRIYGSFSVSNTEPQSSVATSSSTTASATILDESALSFTTVLHVHNFFPYFYIDAPVHSVPLQTIISYLESCLGESFLRNPGDDDEYENEKGTNTNLPEATAGGSDQKRRFIARISRCKGTPVYGYQVGNKCMLKVSLLSPVYKTRLVRLIHDKKINFANFCSTKQKFKPNVYETHLPMLLQFLTDFNLYGCGWVELDSFWFRSPVLDYNSPALSFISTTNTAHLKHSLRKYLTQKSVLNPRHYPRIANSVLEIDAITASIANRNTLHARHLHHDFVERYNFNPNSVETPTYLTSTSHIVKDLKYQCEIRGRQPVSSQNIGNNLGFRSTEWANSTELRKSLDYVITLTGAYETDYKSYSKARIKDDHPELPSSFALVDIEKTYDPKPKLLQWSGYDSLFSEKQESFQSQLSQLSQAKEQKKVLSSFDSLSDALSSSKEVSDSPWDSDQNETEEKSEQNEEKSEQNEPLAINSETDEPEEHSQIINDEAMLQMTQRHSLKRPLEEPPSSPVLQVNSSFSELEPQQELVSQIELSSCNGYCYELKQPAAIQKECFKDGLDSEGILQVDYVDPFYSKSVDGAAKPLVFANKKIVVPCLNDSTIAPFRLQGQSTPSFSVKSVLKSASGGMGLNKKSYLWEYAVTPPSSASIKDWLATEKKKRNTYTQIEHPNSGTAAKFKYSYRSESSSRRPDSFIRLTNFHAEIHVNTDSNSLPDPELNSVSAIFYHFDDANLMFDKIPVTGVLVNRETCNNVHLLKSAVDMKIETFEDEKSMVDRLLFLVEAFDPDILCGYEINASSWGYLVERFRAAYDINLLPLLSRCTFKSNGKFGDRWGYTHTSALKINGRHLLNVWRVFRSNVTLTSYSLENVVFHILHQTIAKCSNRSLSKWFRSDNASKLLFVLNYYMQRILLVQKILDVREIITKNVEEARFIGVDFYSVFFRGSQYKVESILSRISKVESLLLNSPSKTQVSNMKPLEAISLILEPDANFYKSPLVVLDFQSLYPSIMIAYNYCFTTLLGRLDGFDPKKNTIGFLKHLDLPPGLVNLLKENDDINLSPNGYMFAKSSVRKSLLSKMLEEILNTRIQVKTVMSMFKDDTNLAKLLNSRQLALKLIANVTYGYASASFSGRMPNSAIADAIVSTGREILTKSINIIESANYGAKVVYGDTDSLFMYLPGRSKEDSFKIGREVAAHITSLFPDPIQLKFEKVYHPCVLLSKKRYVGNCFEYESQQEATFQAKGIETIRRDGIPAQQKIVEKALRILFTTKDLSLVKDYTLTQFRKIIANRISIRDFCFAKEVRFGTYKSLNHIPAGAMVAMRKVARDPRSEPQYRERVPYVVIEDAEKPRIRDRSVPPEEFIEAYRHLRPVRLDYEYYIGRVLIPPLERIFNLVGADIRGWYKEIPKQTATDLHTGVLKMSRHIKSKTCINCGGQVAEGESTSVCRECLSNEQALMVNSVMSTRYRERHLTEVARTCYHCISSTYACGSSIQGLETQCENQSCDVYFERIRSVVFKSQLDQKHQTIEEAVGW

SEQ ID NO: 3686 - DNA, 4515 bp, Saccharomyces cerevisiae; identical to SEQ ID NO: 2661
  CDS (1)..(4515)

SEQ ID NO: 3687 - protein, 1504 aa, Saccharomyces cerevisiae; identical to SEQ ID NO: 2662

SEQ ID NO: 3688 - DNA, 22 bp, Artificial sequence
  primer
atgtcgagggagtcgaacgaca

SEQ ID NO: 3689 - DNA, 22 bp, Artificial sequence
  primer
tcacgaaaaattatgtatttcg

SEQ ID NO: 3690 - protein, 1251 aa, Artificial sequence
  consensus sequence
  Variant (2)..(2): Xaa in position 2 is any amino acid
  Variant (4)..(5): Xaa in position 4 to 5 is any amino acid
  Variant (7)..(7): Xaa in position 7 is any amino acid
  Variant (9)..(11): Xaa in position 9 to 11 is any amino acid
  Variant (14)..(14): Xaa in position 14 is any amino acid
  Variant (17)..(24): Xaa in position 17 to 24 is any amino acid
  Variant (25)..(30): Xaa in position 25 to 30 is any or no amino acid
  Variant (33)..(34): Xaa in position 33 to 34 is any amino acid
  Variant (36)..(37): Xaa in position 36 to 37 is any amino acid
  Variant (39)..(39): Xaa in position 39 is any amino acid
  Variant (41)..(48): Xaa in position 41 to 48 is any amino acid
  Variant (49)..(75): Xaa in position 49 to 75 is any or no amino acid
  Variant (79)..(81): Xaa in position 79 to 81 is any amino acid
  Variant (84)..(101): Xaa in position 84 to 101 is any amino acid
  Variant (102)..(109): Xaa in position 102 to 109 is any or no amino acid
  Variant (112)..(117): Xaa in position 112 to 117 is any amino acid
  Variant (119)..(133): Xaa in position 119 to 133 is any amino acid
  Variant (134)..(153): Xaa in position 134 to 153 is any or no amino acid
  Variant (155)..(155): Xaa in position 155 is any amino acid
  Variant (159)..(159): Xaa in position 159 is any amino acid
  Variant (162)..(162): Xaa in position 162 is any amino acid
  Variant (164)..(164): Xaa in position 164 is any amino acid
  Variant (168)..(168): Xaa in position 168 is any amino acid
  Variant (171)..(174): Xaa in position 171 to 174 is any amino acid
  Variant (181)..(181): Xaa in position 181 is any amino acid
  Variant (183)..(190): Xaa in position 183 to 190 is any amino acid
  Variant (192)..(196): Xaa in position 192 to 196 is any amino acid
  Variant (198)..(204): Xaa in position 198 to 204 is any amino acid
  Variant (205)..(219): Xaa in position 205 to 219 is any or no amino acid
  Variant (222)..(222): Xaa in position 222 is any amino acid
  Variant (224)..(224): Xaa in position 224 is any amino acid
  Variant (230)..(232): Xaa in position 230 to 232 is any amino acid
  Variant (234)..(234): Xaa in position 234 is any amino acid
  Variant (240)..(240): Xaa in position 240 is any amino acid
  Variant (242)..(247): Xaa in position 242 to 247 is any amino acid
  Variant (248)..(259): Xaa in position 248 to 259 is any or no amino acid
  Variant (263)..(263): Xaa in position 263 is any amino acid
  Variant (267)..(269): Xaa in position 267 to 269 is any amino acid
  Variant (270)..(272): Xaa in position 270 to 272 is any or no amino acid
  Variant (274)..(283): Xaa in position 274 to 283 is any amino acid
  Variant (285)..(287): Xaa in position 285 to 287 is any amino acid
  Variant (289)..(302): Xaa in position 289 to 302 is any amino acid
  Variant (303)..(310): Xaa in position 303 to 310 is any or no amino acid
  Variant (312)..(312): Xaa in position 312 is any amino acid
  Variant (314)..(314): Xaa in position 314 is any amino acid
  Variant (316)..(319): Xaa in position 316 to 319 is any amino acid
  Variant (321)..(321): Xaa in position 321 is any amino acid
  Variant (323)..(327): Xaa in position 323 to 327 is any amino acid
  Variant (329)..(329): Xaa in position 329 is any amino acid
  Variant (332)..(336): Xaa in position 332 to 336 is any amino acid
  Variant (338)..(339): Xaa in position 338 to 339 is any amino acid
  Variant (344)..(344): Xaa in position 344 is any amino acid
  Variant (346)..(356): Xaa in position 346 to 356 is any amino acid
  Variant (357)..(375): Xaa in position 357 to 375 is any or no amino acid
  Variant (377)..(378): Xaa in position 377 to 378 is any amino acid
  Variant (380)..(389): Xaa in position 380 to 389 is any amino acid
  Variant (391)..(413): Xaa in position 391 to 413 is any amino acid
  Variant (414)..(419): Xaa in position 414 to 419 is any or no amino acid
  Variant (421)..(466): Xaa in position 421 to 466 is any amino acid
  Variant (467)..(493): Xaa in position 467 to 493 is any or no amino acid
  Variant (496)..(604): Xaa in position 496 to 604 is any amino acid
  Variant (605)..(653): Xaa in position 605 to 653 is any or no amino acid
  Variant (655)..(657): Xaa in position 655 to 657 is any amino acid
  Variant (659)..(663): Xaa in position 659 to 663 is any amino acid
  Variant (665)..(665): Xaa in position 665 is any amino acid
  Variant (669)..(669): Xaa in position 669 is any amino acid
  Variant (671)..(673): Xaa in position 671 to 673 is any amino acid
  Variant (675)..(677): Xaa in position 675 to 677 is any amino acid
  Variant (679)..(682): Xaa in position 679 to 682 is any amino acid
  Variant (684)..(720): Xaa in position 684 to 720 is any amino acid
  Variant (721)..(731): Xaa in position 721 to 731 is any or no amino acid
  Variant (733)..(733): Xaa in position 733 is any amino acid
  Variant (735)..(737): Xaa in position 735 to 737 is any amino acid
  Variant (740)..(749): Xaa in position 740 to 749 is any amino acid
  Variant (750)..(756): Xaa in position 750 to 756 is any or no amino acid
  Variant (759)..(767): Xaa in position 759 to 767 is any amino acid
  Variant (769)..(774): Xaa in position 769 to 774 is any amino acid
  Variant (776)..(790): Xaa in position 776 to 790 is any amino acid
  Variant (791)..(794): Xaa in position 791 to 794 is any or no amino acid
  Variant (797)..(800): Xaa in position 797 to 800 is any amino acid
  Variant (804)..(804): Xaa in position 804 is any amino acid
  Variant (806)..(806): Xaa in position 806 is any amino acid
  Variant (808)..(812): Xaa in position 808 to 812 is any amino acid
  Variant (816)..(817): Xaa in position 816 to 817 is any amino acid
  Variant (819)..(819): Xaa in position 819 is any amino acid
  Variant (822)..(822): Xaa in position 822 is any amino acid
  Variant (824)..(840): Xaa in position 824 to 840 is any amino acid
  Variant (841)..(841): Xaa in position 841 is any or no amino acid
  Variant (843)..(869): Xaa in position 843 to 869 is any amino acid
  Variant (870)..(873): Xaa in position 870 to 873 is any or no amino acid
  Variant (875)..(876): Xaa in position 875 to 876 is any amino acid
  Variant (878)..(880): Xaa in position 878 to 880 is any amino acid
  Variant (882)..(883): Xaa in position 882 to 883 is any amino acid
  Variant (886)..(888): Xaa in position 886 to 888 is any amino acid
  Variant (896)..(896): Xaa in position 896 is any amino acid
  Variant (899)..(901): Xaa in position 899 to 901 is any amino acid
  Variant (906)..(908): Xaa in position 906 to 908 is any amino acid
  Variant (910)..(923): Xaa in position 910 to 923 is any amino acid
  Variant (925)..(931): Xaa in position 925 to 931 is any amino acid
  Variant (933)..(934): Xaa in position 933 to 934 is any amino acid
  Variant (936)..(936): Xaa in position 936 is any amino acid
  Variant (939)..(946): Xaa in position 939 to 946 is any amino acid
  Variant (948)..(948): Xaa in position 948 is any amino acid
  Variant (951)..(953): Xaa in position 951 to 953 is any amino acid
  Variant (955)..(955): Xaa in position 955 is any amino acid
  Variant (958)..(959): Xaa in position 958 to 959 is any amino acid
  Variant (961)..(967): Xaa in position 961 to 967 is any amino acid
  Variant (969)..(970): Xaa in position 969 to 970 is any amino acid
  Variant (972)..(977): Xaa in position 972 to 977 is any amino acid
  Variant (979)..(985): Xaa in position 979 to 985 is any amino acid
  Variant (987)..(1005): Xaa in position 987 to 1005 is any amino acid
  Variant (1006)..(1006): Xaa in position 1006 is any or no amino acid
  Variant (1008)..(1008): Xaa in position 1008 is any amino acid
  Variant (1010)..(1012): Xaa in position 1010 to 1012 is any amino acid
  Variant (1014)..(1031): Xaa in position 1014 to 1031 is any amino acid
  Variant (1033)..(1034): Xaa in position 1033 to 1034 is any amino acid
  Variant (1036)..(1036): Xaa in position 1036 is any amino acid
  Variant (1039)..(1040): Xaa in position 1039 to 1040 is any amino acid
  Variant (1042)..(1042): Xaa in position 1042 is any amino acid
  Variant (1044)..(1046): Xaa in position 1044 to 1046 is any amino acid
  Variant (1051)..(1051): Xaa in position 1051 is any amino acid
  Variant (1056)..(1056): Xaa in position 1056 is any amino acid
  Variant (1058)..(1058): Xaa in position 1058 is any amino acid
  Variant (1060)..(1061): Xaa in position 1060 to 1061 is any amino acid
  Variant (1063)..(1063): Xaa in position 1063 is any amino acid
  Variant (1065)..(1067): Xaa in position 1065 to 1067 is any amino acid
  Variant (1069)..(1069): Xaa in position 1069 is any amino acid
  Variant (1072)..(1075): Xaa in position 1072 to 1075 is any amino acid
  Variant (1077)..(1082): Xaa in position 1077 to 1082 is any amino acid
  Variant (1084)..(1086): Xaa in position 1084 to 1086 is any amino acid
  Variant (1088)..(1089): Xaa in position 1088 to 1089 is any amino acid
  Variant (1092)..(1094): Xaa in position 1092 to 1094 is any amino acid
  Variant (1101)..(1101): Xaa in position 1101 is any amino acid
  Variant (1113)..(1115): Xaa in position 1113 to 1115 is any amino acid
  Variant (1120)..(1121): Xaa in position 1120 to 1121 is any amino acid
  Variant (1123)..(1124): Xaa in position 1123 to 1124 is any amino acid
  Variant (1126)..(1137): Xaa in position 1126 to 1137 is any amino acid
  Variant (1139)..(1159): Xaa in position 1139 to 1159 is any amino acid
  Variant (1160)..(1162): Xaa in position 1160 to 1162 is any or no amino acid
  Variant (1166)..(1169): Xaa in position 1166 to 1169 is any amino acid
  Variant (1171)..(1173): Xaa in position 1171 to 1173 is any amino acid
  Variant (1177)..(1177): Xaa in position 1177 is any amino acid
  Variant (1179)..(1179): Xaa in position 1179 is any amino acid
  Variant (1183)..(1184): Xaa in position 1183 to 1184 is any amino acid
  Variant (1187)..(1188): Xaa in position 1187 to 1188 is any amino acid
  Variant (1190)..(1192): Xaa in position 1190 to 1192 is any amino acid
  Variant (1194)..(1212): Xaa in position 1194 to 1212 is any amino acid
  Variant (1213)..(1213): Xaa in position 1213 is any or no amino acid
  Variant (1215)..(1215): Xaa in position 1215 is any amino acid
  Variant (1220)..(1220): Xaa in position 1220 is any amino acid
  Variant (1228)..(1228): Xaa in position 1228 is any amino acid
  Variant (1231)..(1231): Xaa in position 1231 is any amino acid
  Variant (1238)..(1238): Xaa in position 1238 is any amino acid
  Variant (1240)..(1241): Xaa in position 1240 to 1241 is any amino acid
  Variant (1244)..(1244): Xaa in position 1244 is any amino acid
  Variant (1247)..(1247): Xaa in position 1247 is any amino acid
QXNXXDXYXXXPTXLDXXXXXXXXXXXXXXVPXXRXXGXLXXXXXXXXXXXXXXXXXXXXXXXXXXXXXXXXXXXHVHXXXPYXXXXXXXXXXXXXXXXXXXXXXXXXXLEXXXXXXFXXXXXXXXXXXXXXXXXXXXXXXXXXXXXXXXXXXAXVSVXKGXPXYGYXVGXXXXYKISLLXPXXXXXXXXLXXXXXIXXXXXXXXXXXXXXXXXXXXXXYEXHXPYLLQXXXDXNLFGCXWXXXXXXXXXXXXXXXXXXYFRXPVLXXXXXXLXXXXXXXXXXLXXXLXXXXXXXXXXXXXXXXXXXXXXFXRXGXXXXEXDXXXXXIXNRXXXXXRXXHHDFXEXXXXXXXXXXXXXXXXXXXXXXXXXXXXXXYXXSXXXXXXXXXXQXXXXXXXXXXXXXXXXXXXXXXXXXXXXXWXXXXXXXXXXXXXXXXXXXXXXXXXXXXXXXXXXXXXXXXXXXXXXXXXXXXXXXXXXXXXXXXXXXXXXXXXLWXXXXXXXXXXXXXXXXXXXXXXXXXXXXXXXXXXXXXXXXXXXXXXXXXXXXXXXXXXXXXXXXXXXXXXXXXXXXXXXXXXXXXXXXXXXXXXXXXXXXXXXXXXXXXXXXXXXXXXXXXXXXXXXXXXXXXXXXXXXXXXXXXXXXXXXXXXXXXXLXXXGXXXXXYXDPFXSXXXDXXXKXXXXAXXXXXXXXXXXXXXXXXXXXXXXXXXXXXXXXXXXXXXXXXXXXXXXXWXYXXXPPXXXXXXXXXXXXXXXXXKKXXXXXXXXXPXXXXXXKXXXXXXXXXXXXXXXXXXXLTXXXXEIHXNXTXXXXXPDPXXDXVSXIXXXXXXXXXXXXXXXXXXGXXXXXXXXXXXXXXXXXXXXXXXXXXXXXXXEXXMXXXLXXLVXXXDPDILSGXEIXXXSWGYXXXRXXXXXXXXXXXXXXRXXXXXXXKXXDXWGXXXXXXXXIXGRXXXNXWRXXRXXXXXXXYXXEXXXXXXLXXXXXXXSXXXXXXXXXXXXXXXXXXXXLXYXXXRXXXXXXXXXXXXXXXXXXEXXRXIGXXFXSXXXRGSQXKVESXLXRXXKXEXXXLXSPXXXXVXXXXXXEXXXLXXEPXXXFYKSPLXVLDFQSLYPSIXXXYNYCXXTXXGXXXXXXXXXXXXGXXXXXXXXXXXXXXXXXXXXXXXXPNGXXXXKXXXRKSXLXKMLXXILXXRXXXKXXXXXXXXXXXXXXXXXXXXQXALKLXANVTYGYXSAXFSGRMPXSXXADXIVXTGRE

SEQ ID NO: 3691 - protein, 35 aa, Artificial sequence
  protein pattern
  Variant (2)..(2): Xaa in position 2 is any amino acid
  Variant (3)..(5): Xaa in position 3 to 5 is any or no amino acid
  Variant (7)..(7): Xaa in position 7 is Ile or Leu
  Variant (9)..(9): Xaa in position 9 is any amino acid
  Variant (13)..(14): Xaa in position 13 to 14 is any amino acid
  Variant (15)..(15): Xaa in position 15 is Ala or Thr
  Variant (17)..(17): Xaa in position 17 is Phe or Tyr
  Variant (20)..(20): Xaa in position 20 is Phe or Tyr
  Variant (23)..(23): Xaa in position 23 is Gly or Ser
  Variant (25)..(30): Xaa in position 25 to 30 is any amino acid
  Variant (31)..(31): Xaa in position 31 is any or no amino acid
  Variant (33)..(33): Xaa in position 33 is any amino acid
  Variant (34)..(34): Xaa in position 34 is Gln or Ser
  Variant (35)..(35): Xaa in position 35 is Pro or Gln
EXXXXHXPXLLQXXXDXNLXGCXWXXXXXXXFXXX

SEQ ID NO: 3692 - protein, 39 aa, Artificial sequence
  protein pattern
  Variant (4)..(4): Xaa in position 4 is Cys or Val
  Variant (7)..(7): Xaa in position 7 is Ile or Val
  Variant (9)..(9): Xaa in position 9 is Phe or Ile
  Variant (12)..(12): Xaa in position 12 is Phe or Tyr
  Variant (13)..(13): Xaa in position 13 is any amino acid
  Variant (14)..(14): Xaa in position 14 is Leu or Val
  Variant (16)..(16): Xaa in position 16 is Trp or Tyr
  Variant (17)..(18): Xaa in position 17 to 18 is any amino acid
  Variant (19)..(19): Xaa in position 19 is Phe or Tyr
  Variant (23)..(23): Xaa in position 23 is Ser or Thr
  Variant (26)..(29): Xaa in position 26 to 29 is any amino acid
  Variant (30)..(30): Xaa in position 30 is any or no amino acid
  Variant (32)..(32): Xaa in position 32 is Glu, Asn or Arg
  Variant (33)..(36): Xaa in position 33 to 36 is any amino acid
  Variant (37)..(37): Xaa in position 37 is Phe, Ile or Leu
  Variant (38)..(38): Xaa in position 38 is any amino acid
  Variant (39)..(39): Xaa in position 39 is Asp, Glu or Arg
VSVXKGXPXYGXXXGXXXXYKIXLLXXXXXSXXXXXXXX

SEQ ID NO: 3693 - protein, 42 aa, Artificial sequence
  protein pattern
  Variant (3)..(6): Xaa in position 3 to 6 is any amino acid
  Variant (7)..(7): Xaa in position 7 is Phe or Tyr
  Variant (8)..(8): Xaa in position 8 is any amino acid
  Variant (10)..(10): Xaa in position 10 is Ile or Val
  Variant (11)..(11): Xaa in position 11 is Ala or Gly
  Variant (12)..(12): Xaa in position 12 is any amino acid
  Variant (13)..(13): Xaa in position 13 is Gly, Ser or Thr
  Variant (14)..(14): Xaa in position 14 is Phe, Leu or Val
  Variant (15)..(15): Xaa in position 15 is Ile or Leu
  Variant (17)..(17): Xaa in position 17 is Ile or Met
  Variant (19)..(19): Xaa in position 19 is any or no amino acid
  Variant (21)..(23): Xaa in position 21 to 23 is any amino acid
  Variant (24)..(24): Xaa in position 24 is any or no amino acid
  Variant (26)..(26): Xaa in position 26 is any amino acid
  Variant (28)..(28): Xaa in position 28 is any amino acid
  Variant (29)..(29): Xaa in position 29 is Asp, Glu or Asn
  Variant (30)..(30): Xaa in position 30 is any amino acid
  Variant (31)..(31): Xaa in position 31 is Ile or Leu
  Variant (32)..(33): Xaa in position 32 to 33 is any amino acid
  Variant (35)..(35): Xaa in position 35 is any amino acid
  Variant (36)..(36): Xaa in position 36 is Ile or Leu
  Variant (40)..(40): Xaa in position 40 is Phe or Leu
  Variant (41)..(41): Xaa in position 41 is any amino acid
VLXXXXXXRXXXXXXEXDXIXXXXIXNXXXXXXRXXHHDXXE

SEQ ID NO: 3694 - protein, 34 aa, Artificial sequence
  protein pattern
  Variant (2)..(2): Xaa in position 2 is any or no amino acid
  Variant (4)..(4): Xaa in position 4 is any amino acid
  Variant (5)..(8): Xaa in position 5 to 8 is any or no amino acid
  Variant (10)..(10): Xaa in position 10 is Phe, Ile or Val
  Variant (11)..(11): Xaa in position 11 is Asp, Glu or Thr
  Variant (12)..(12): Xaa in position 12 is any amino acid
  Variant (14)..(15): Xaa in position 14 to 15 is any amino acid
  Variant (17)..(17): Xaa in position 17 is Ile or Val
  Variant (18)..(18): Xaa in position 18 is any amino acid
  Variant (19)..(19): Xaa in position 19 is Ala or Leu
  Variant (20)..(20): Xaa in position 20 is Phe or Leu
  Variant (24)..(24): Xaa in position 24 is Ile or Leu
  Variant (26)..(26): Xaa in position 26 is Cys or Ser
  Variant (28)..(28): Xaa in position 28 is Phe or Tyr
  Variant (30)..(30): Xaa in position 30 is Ile or Val
  Variant (31)..(31): Xaa in position 31 is any amino acid
  Variant (32)..(32): Xaa in position 32 is Ala, Asn or Ser
  Variant (33)..(33): Xaa in position 33 is any amino acid
EXFXXXXXMXXXLXXLXXXXDPDXLXGXEXXXXS

SEQ ID NO: 3695 - protein, 15 aa, Artificial sequence
  protein pattern
  Variant (2)..(2): Xaa in position 2 is Cys or Val
  Variant (4)..(4): Xaa in position 4 is Gly or Asn
  Variant (5)..(5): Xaa in position 5 is Phe or Ile
  Variant (6)..(6): Xaa in position 6 is Phe or Leu
  Variant (9)..(9): Xaa in position 9 is any or no amino acid
  Variant (11)..(12): Xaa in position 11 to 12 is any or no amino acid
  Variant (14)..(14): Xaa in position 14 is any amino acid
  Variant (15)..(15): Xaa in position 15 is Asp or Gly
HXHXXXPYXFXXYXX

SEQ ID NO: 3696 - protein, 33 aa, Artificial sequence
  protein pattern
  Variant (2)..(2): Xaa in position 2 is any amino acid
  Variant (3)..(5): Xaa in position 3 to 5 is any or no amino acid
  Variant (7)..(7): Xaa in position 7 is any amino acid
  Variant (8)..(8): Xaa in position 8 is Asp or Gly
  Variant (11)..(11): Xaa in position 11 is Phe or Tyr
  Variant (13)..(13): Xaa in position 13 is any amino acid
  Variant (14)..(14): Xaa in position 14 is Pro or Ser
  Variant (15)..(15): Xaa in position 15 is any amino acid
  Variant (17)..(20): Xaa in position 17 to 20 is any amino acid
  Variant (21)..(21): Xaa in position 21 is Asp, Pro or Gln
  Variant (22)..(24): Xaa in position 22 to 24 is any amino acid
  Variant (26)..(26): Xaa in position 26 is Gly or Asn
  Variant (27)..(27): Xaa in position 27 is Lys or Arg
  Variant (28)..(28): Xaa in position 28 is any amino acid
  Variant (29)..(29): Xaa in position 29 is Phe or Ile
  Variant (30)..(30): Xaa in position 30 is any amino acid
  Variant (31)..(31): Xaa in position 31 is Ile, Leu or Val
  Variant (32)..(32): Xaa in position 32 is Pro, Ser or Thr
  Variant (33)..(33): Xaa in position 33 is Cys or Ser
IXXXXYXXPFXSXXXDXXXXXXXXAXXXXXXXX

SEQ ID NO: 3697 - protein, 29 aa, Artificial sequence
  protein pattern
  Variant (2)..(2): Xaa in position 2 is Ile or Leu
  Variant (4)..(4): Xaa in position 4 is Asp or Asn
  Variant (5)..(5): Xaa in position 5 is any amino acid
  Variant (7)..(7): Xaa in position 7 is any or no amino acid
  Variant (9)..(11): Xaa in position 9 to 11 is any amino acid
  Variant (12)..(12): Xaa in position 12 is any or no amino acid
  Variant (15)..(15): Xaa in position 15 is any amino acid
  Variant (18)..(20): Xaa in position 18 to 20 is any amino acid
  Variant (21)..(21): Xaa in position 21 is Gly, Ser or Thr
  Variant (22)..(22): Xaa in position 22 is any amino acid
  Variant (23)..(23): Xaa in position 23 is Ser or Val
  Variant (24)..(24): Xaa in position 24 is any amino acid
  Variant (25)..(25): Xaa in position 25 is Pro or Gln
  Variant (26)..(26): Xaa in position 26 is Gly, Leu or Val
  Variant (27)..(28): Xaa in position 27 to 28 is any amino acid
  Variant (29)..(29): Xaa in position 29 is Phe or Ile
QXNXXDXYXXXXPTXLDXXXXXXXXXXXX

SEQ ID NO: 3698 - DNA, 541 bp, Saccharomyces cerevisiae
  exon (1)..(16)
  exon (255)..(541)
atggctgtcaagactggtatgtttacctgaactaatgaactgtagagcaaaagcaaaatgaactgaaccactaagccaacaacagaaatacaaacaggatgagattaagctccagagatatgcaaacatcgtttatatcctgcacccagcgttgcagtactccgtggagtctttgtttatttattttgctcgtatactacgtgagtactagtgtgcttgttactaacataagatattctatttttttcctctaggtatcgctattggtttgaacaagggtaagaaagtcacccaaatgactccagccccaaagatctcctacaagaagggtgctgcctccaacagaaccaagttcgtcagatctttggttagagaaatcgccggtttgtccccatatgaaagaagattgatcgatttgatcagaaactccggtgaaaagagagccagaaaggtcgccaagaagagattgggttctttcaccagagccaaggctaaggtcgaagaaatgaacaacatcattgctgcctctcgtcgtcattaa

SEQ ID NO: 3699 - protein, 100 aa, Saccharomyces cerevisiae; identical to SEQ ID NO: 2743

SEQ ID NO: 3700 - DNA, 24 bp, Artificial sequence
  primer
atggctgtcaagactggtatcgct

SEQ ID NO: 3701 - DNA, 24 bp, Artificial sequence
  primer
ttaatgacgacgagaggcagcaat

SEQ ID NO: 3702 - DNA, 417 bp, ARABIDOPSIS THALIANA; identical to SEQ ID NO: 39
  CDS (1)..(417)

SEQ ID NO: 3703 - protein, 138 aa, ARABIDOPSIS THALIANA; identical to SEQ ID NO: 40

SEQ ID NO: 3704 - DNA, 612 bp, Zea mays
  CDS (1)..(612)
atgaatatgttcgcaaggtctatggtgaatttactgctctctgtatatcaatcttggttagaatgggttattactgataagaatcatgtggttcttgtttttgtctcagttcagcacgcgacgcaactatcctctagagagagagaggaagcccgtcgttctggaagtttccacgctccgcgcctccgccccctggtctccgctccaatggcgccctcactcctcgccgccatgtccacctcgcccttcctagccagcagcggcagcagccgcaggccgctaggcgctgcccacacccgacgggctggactgcgcgtggccgcgcttaagtacgaccctgccaaggtggcgccgcagaacgaccgggttctcgtccgtcttgagcagatccctgagaaatctgctggcggtgtattgctaccaaaatctgctgttaagtttgagagatatctgatgggtgagattctatcgatcggtgctgaagtcagtgaagttgaggctgggaagaaggttctcttctcagacatcaatgcttatgaggtggagcttggtactgatgacgagaagcactgcttctgccgtgagtcagacttgttagctgtagttgaatga

SEQ ID NO: 3705 - protein, 203 aa, Zea mays
MNMFARSMVNLLLSVYQSWLEWVITDKNHVVLVFVSVQHATQLSSREREEARRSGSFHAPRLRPLVSAPMAPSLLAAMSTSPFLASSGSSRRPLGAAHTRRAGLRVAALKYDPAKVAPQNDRVLVRLEQIPEKSAGGVLLPKSAVKFERYLMGEILSIGAEVSEVEAGKKVLFSDINAYEVELGTDDEKHCFCRESDLLAVVE

SEQ ID NO: 3706 - DNA, 756 bp, AZOTOBACTER VINELANDII; identical to SEQ ID NO: 982
  CDS (1)..(756): transl_table=11

SEQ ID NO: 3707 - protein, 251 aa, AZOTOBACTER VINELANDII; identical to SEQ ID NO: 983

SEQ ID NO: 3708 - DNA, 777 bp, Brassica napus; identical to SEQ ID NO: 2005
  CDS (1)..(777)

SEQ ID NO: 3709 - protein, 258 aa, Brassica napus; identical to SEQ ID NO: 2006

SEQ ID NO: 3710 - DNA, 858 bp, ESCHERICHIA COLI; identical to SEQ ID NO: 2907
  CDS (1)..(858): transl_table=11

SEQ ID NO: 3711 - protein, 285 aa, ESCHERICHIA COLI; identical to SEQ ID NO: 2908

SEQ ID NO: 3712 - DNA, 960 bp, Brassica napus
  CDS (1)..(960)
atggccaccaccgtcgcagcaacgaaactcacctccttgaaagccaccgccgggaagctcggttaccgtgagatctgccaggtccggcaatgggctccgcttaagtctgcgatgcctcatttcggtatgctgcgatgtgcgacatccactgttgtgaaagctcaagctcaagctcaagccacggctactgagcaaacaacagaagaagctgttccaaaagtggaatctccagttgtggttgtgactggtgcctctagaggcattggtaaagctattgctctttccttgggcaaagctggctgtaaggtcttggtgaactatgctaggtcggcaaaggaagctgaagaagtttccaaacagattgaagaatatggtggcgaggctattacttttggaggcgatgtctcgaaagaggctgatgtggacgccatgatgaaaactgctgttgataaatggggaaccattgacgtcgtggttaacaatgcaggaattaccagggataccttgttgattcgaatgaagaaatctcaatgggatgaagtgatagatttgaatctcactggagtgtttctctgtacccaggcagcaacaaagatcatgatgaagaagagaaagggaaggatcatcaacatagcgtcagttgttggtctcattggtaacattgggcaagcaaactacgctgcagctaaagctggagttattgggttttccaagactgccgccagagagggtgctagcaggaatataaatgtgaatgtggtgtgccctggattcattgcatctgacatgactgccaagcttggagaagacatggaaaagaaaatcttgggaacaatcccattaggacgatatggacaaccagaagatgtggctggcttggtagaattcttggctctgagcccggcagcgagttacataactggacagacattcaccatcgatggaggtattgcaatctag

SEQ ID NO: 3713 - protein, 319 aa, Brassica napus
MATTVAATKLTSLKATAGKLGYREICQVRQWAPLKSAMPHFGMLRCATSTVVKAQAQAQATATEQTTEEAVPKVESPVVVVTGASRGIGKAIALSLGKAGCKVLVNYARSAKEAEEVSKQIEEYGGEAITFGGDVSKEADVDAMMKTAVDKWGTIDVVVNNAGITRDTLLIRMKKSQWDEVIDLNLTGVFLCTQAATKIMMKKRKGRIINIASVVGLIGNIGQANYAAAKAGVIGFSKTAAREGASRNINVNVVCPGFIASDMTAKLGEDMEKKILGTIPLGRYGQPEDVAGLVEFLALSPAASYITGQTFTIDGGIAI

SEQ ID NO: 3714 - DNA, 819 bp, Triticum aestivum
  CDS (1)..(819)
atggctgcggcggggacgtcgggatcgagccagccgggtgctccaggaaggtggtctcttcacggcaagacggctctcgtcaccggcggcacccgcgggatcgggcgtgcggtggtggaggaacttgcggcgctgggggcggccgtgcacacctgctcccggaaggaggcggagctgggcgagcgcctcaaggagtgggaggccaggggcttccgcgtcacaacctccgtctgcgacctctccgtccgggagcagcgggagcgcctgattggcgacgtcgccgaacgcttcggcggcaagctcaacatcctcgtaaacaatgtggggacaaacataaggaaaccaactactgaatattccgctgaagattactcttttttgatggccactaatcttgaatctgcatatcatctttgccaacttgcacatcctcttctaaaagcatctggcttgggcagcattgttttcatatcatctgtctgtggattagtagccgtatttagcggtactctatatgccatgactaaaggtgccatcaaccagttaaccaagaacctagcatgtgaatgggcaaaagatggcataagaacaaactctgttgctccatggtacataacgacttcgcttacagaaggacttttggctaacaaggaatttgaggcctccgttgtgagtcgaactccactgaggcgtgtcggagaaccaggagaggtatcatcgctggttgcttttctttgcatgcctggttccacttacataacaggccagacgatctcagtggatggaggtatgagtgtcaatgggctctatccagcttga

SEQ ID NO: 3715 - protein, 272 aa, Triticum aestivum
MAAAGTSGSSQPGAPGRWSLHGKTALVTGGTRGIGRAVVEELAALGAAVHTCSRKEAELGERLKEWEARGFRVTTSVCDLSVREQRERLIGDVAERFGGKLNILVNNVGTNIRKPTTEYSAEDYSFLMATNLESAYHLCQLAHPLLKASGLGSIVFISSVCGLVAVFSGTLYAMTKGAINQLTKNLACEWAKDGIRTNSVAPWYITTSLTEGLLANKEFEASVVSRTPLRRVGEPGEVSSLVAFLCMPGSTYITGQTISVDGGMSVNGLYPA

SEQ ID NO: 3716 - DNA, 858 bp, ESCHERICHIA COLI; identical to SEQ ID NO: 1449
  CDS (1)..(858): transl_table=11

SEQ ID NO: 3717 - protein, 285 aa, ESCHERICHIA COLI; identical to SEQ ID NO: 1450

SEQ ID NO: 3718 - DNA, 960 bp, Brassica napus; identical to SEQ ID NO: 3712
  CDS (1)..(960)

SEQ ID NO: 3719 - protein, 319 aa, Brassica napus; identical to SEQ ID NO: 3713

SEQ ID NO: 3720 - DNA, 819 bp, Triticum aestivum; identical to SEQ ID NO: 3714
  CDS (1)..(819)

SEQ ID NO: 3721 - protein, 272 aa, Triticum aestivum; identical to SEQ ID NO: 3715

SEQ ID NO: 3722 - DNA, 1284 bp, SACCHAROMYCES CEREVISIAE; identical to SEQ ID NO: 2345
  CDS (1)..(1284)

SEQ ID NO: 3723 - protein, 427 aa, SACCHAROMYCES CEREVISIAE; identical to SEQ ID NO: 2346

SEQ ID NO: 3724 - DNA, 1206 bp, Brassica napus
  CDS (1)..(1206)
atggttaatcaagaacccattacagcgattcttcaagatgaaacgagaagaagcacaaagttcggtttagagatgaaaagacagaacaggagagcattgtctgtaattaaccagaaccttgttaatccttgcgttgttaacaagagaagaggcttgtctgaatctcaagaagagacaaagaaactgaaaccatcgattccaagtgggaacgcgtttggtgattgtatattcatcgatgaagacgaagaggaagaggaagcagctacattggaccaacctatgccaatgtcattagaggaaccttacatagaatctgatccaatggaggaagaagttgagatggaggaggaggaacaagaacctgttttggatattgatgtagacgacgcacacaaccctcttgcagtcgttgaatatgtccaagatctacacgacttctacagaaaaaacgagaggtttagttgtgttcctcaagattacatggagcaacagtttgacataacagacaaaatgagagctatacttatcgattggctcatcgaggtacatgacaaattcgagctaatgaacgagacattgtatctaacagtgaaccttatagatagatttttatccaagcaagctgttgtaagaaagaagcttcagcttgttggtttagttgccttgctattagcttgcaagtacgaagaggtttctgtacctattgttgaagatttagttgtcatctctgacaaagcctataccagaaacgatgttttagaaatggagaagattatgcttaatactttgcaattcaacatgtcgttaccgacacaataccctttcttgaagaggttcctcaaggcagctcaatcagacaagaagctcgagatcttggcatcgttcttgatggagctggctctcgtggactacgaaatgcttcgttatccaccatcgttactagcagccagtgcagtgtacacagctcaatgtacaatccatggcttcagcgaatggaacagcacttgtgaattccacagccactactctgagagccaactcagagaatgtagtagaaaaatggtgagtctgcatcagaaggcagcgactgataaactaacagaagtgcgtagaaaatacagctcatctaagttcggatacatagcaacaaagtatgaagctgctgctgcacactttcttcttgtgtcagattctccaaagctatag

SEQ ID NO: 3725 - protein, 401 aa, Brassica napus
MVNQEPITAILQDETRRSTKFGLEMKRQNRRALSVINQNLVNPCVVNKRRGLSESQEETKKLKPSIPSGNAFGDCIFIDEDEEEEEAATLDQPMPMSLEEPYIESDPMEEEVEMEEEEQEPVLDIDVDDAHNPLAVVEYVQDLHDFYRKNERFSCVPQDYMEQQFDITDKMRAILIDWLIEVHDKFELMNETLYLTVNLIDRFLSKQAVVRKKLQLVGLVALLLACKYEEVSVPIVEDLVVISDKAYTRNDVLEMEKIMLNTLQFNMSLPTQYPFLKRFLKAAQSDKKLEILASFLMELALVDYEMLRYPPSLLAASAVYTAQCTIHGFSEWNSTCEFHSHYSESQLRECSRKMVSLHQKAATDKLTEVRRKYSSSKFGYIATKYEAAAAHFLLVSDSPKL

SEQ ID NO: 3726 - DNA, 303 bp, SACCHAROMYCES CEREVISIAE; identical to SEQ ID NO: 2742
  CDS (1)..(303)

SEQ ID NO: 3727 - protein, 100 aa, SACCHAROMYCES CEREVISIAE; identical to SEQ ID NO: 2743

SEQ ID NO: 3728 - DNA, 333 bp, Oryza sativa; identical to SEQ ID NO: 2858
  CDS (1)..(333)

SEQ ID NO: 3729 - protein, 110 aa, Oryza sativa; identical to SEQ ID NO: 2859

SEQ ID NO: 3730 - DNA, 342 bp, Oryza sativa; identical to SEQ ID NO: 2860
  CDS (1)..(342)

SEQ ID NO: 3731 - protein, 113 aa, Oryza sativa; identical to SEQ ID NO: 2861

SEQ ID NO: 3732 - DNA, 339 bp, Brassica napus; identical to SEQ ID NO: 2882
  CDS (1)..(339)

SEQ ID NO: 3733 - protein, 112 aa, Brassica napus; identical to SEQ ID NO: 2883

SEQ ID NO: 3734 - DNA, 348 bp, Brassica napus; identical to SEQ ID NO: 2864
  CDS (1)..(348)

SEQ ID NO: 3735 - protein, 115 aa, Brassica napus; identical to SEQ ID NO: 2865

SEQ ID NO: 3736 - DNA, 339 bp, Brassica napus; identical to SEQ ID NO: 2866
  CDS (1)..(339)

SEQ ID NO: 3737 - protein, 112 aa, Brassica napus; identical to SEQ ID NO: 2867

SEQ ID NO: 3738 - DNA, 339 bp, Brassica napus; identical to SEQ ID NO: 2868
  CDS (1)..(339)

SEQ ID NO: 3739 - protein, 112 aa, Brassica napus; identical to SEQ ID NO: 2869

SEQ ID NO: 3740 - DNA, 336 bp, Triticum aestivum
  CDS (1)..(336)
atggctccgtcgcagcccaagtcgggcctcttcgtgggcatcaacaagggccacgtcgtcaccaagcgcgagctgccgccacgcccgtccgaccgcaaggggaaaggtaccaagagggtgcatttcgtcaggaacttgatcagggaggtcgctgggtttgctccgtatgagaagcgtatcactgagcttctcaaggttggcaaggacaagcgtgccctgaaggtggcgaagcgaaagttgggtacccacaagagggcgaagaagaagagagaggagatgtccagtgtcctcaggaagatgagatctgctggaactggaaccgagaagaagaaatag

SEQ ID NO: 3741 - protein, 111 aa, Triticum aestivum; identical to SEQ ID NO: 2765

SEQ ID NO: 3742 - DNA, 333 bp, Glycine max
  CDS (1)..(333)
atggctcccaaaccgcctagtacgggtctgtttgttggactgaacaagggtcacgtcgtcaccaagaaggaattgcccccacgcccctcagatcgtaaggggaaaacaagcaagagggtgcactttgtgaggaacctcataagagaggttgctggttttgcaccctatgaaaagcgtataactgagttgctgaaggttgggaaggataagagggcactgaaggttgcaaagagaaagcttggaacccacaaacgtgcaaagaagaagcgtgaggaaatgtccagtgttctcaggaagatgagggctggtggtgctggagacaagaagaaataa

SEQ ID NO: 3743 - protein, 110 aa, Glycine max; identical to SEQ ID NO: 2747

SEQ ID NO: 3744 - DNA, 333 bp, Linum usitatissimum; identical to SEQ ID NO: 2870
  CDS (1)..(333)

SEQ ID NO: 3745 - protein, 110 aa, Linum usitatissimum; identical to SEQ ID NO: 2871

SEQ ID NO: 3746 - DNA, 336 bp, Zea mays; identical to SEQ ID NO: 2872
  CDS (1)..(336)

SEQ ID NO: 3747 - protein, 111 aa, Zea mays; identical to SEQ ID NO: 2873

SEQ ID NO: 3748 - DNA, 342 bp, Hordeum vulgare; identical to SEQ ID NO: 2874
  CDS (1)..(342)

SEQ ID NO: 3749 - protein, 113 aa, Hordeum vulgare; identical to SEQ ID NO: 2875

SEQ ID NO: 3750 - DNA, 333 bp, Helianthus annuus; identical to SEQ ID NO: 2876
  CDS (1)..(333)

SEQ ID NO: 3751 - protein, 110 aa, Helianthus annuus; identical to SEQ ID NO: 2877

SEQ ID NO: 3752 - DNA, 8975 bp, Artificial Sequence
  plasmid VC-MME445-1qcz
  transit_peptide (1964)..(2053)
  CDS (1964)..(2053)
  CDS (2054)..(2062): adapter
agcttggacaatcagtaaattgaacggagaatattattcataaaaatacgatagtaacgggtgatatattcattagaatgaaccgaaaccggcggtaaggatctgagctacacatgctcaggttttttacaacgtgcacaacagaattgaaagcaaatatcatgcgatcataggcgtctcgcatatctcattaaagcagggcatgccggtcgagtcaaatctcggtgacgggcaggaccggacggggcggtaccggcaggctgaagtccagctgccagaaacccacgtcatgccagttcccgtgcttgaagccggccgcccgcagcatgccgcggggggcatatccgagcgcctcgtgcatgcgcacgctcgggtcgttgggcagcccgatgacagcgaccacgctcttgaagccctgtgcctccagggacttcagcaggtgggtgtagagcgtggagcccagtcccgtccgctggtggcggggggagacgtacacggtcgactcggccgtccagtcgtaggcgttgcgtgccttccaggggcccgcgtaggcgatgccggcgacctcgccgtccacctcggcgacgagccagggatagcgctcccgcagacggacgaggtcgtccgtccactcctgcggttcctgcggctcggtacggaagttgaccgtgcttgtctcgatgtagtggttgacgatggtgcagaccgccggcatgtccgcctcggtggcacggcggatgtcggccgggcgtcgttctgggctcatggtagactcgacggatccacgtgtggaagatatgaatttttttgagaaactagataagattaatgaatatcggtgttttggttttttcttgtggccgtctttgtttatattgagatttttcaaatcagtgcgcaagacgtgacgtaagtatccgagtcagtttttatttttctactaatttggtcgaagctttgggcggatcctctagaattcgaatccaaaaattacggatatgaatataggcatatccgtatccgaattatccgtttgacagctagcaacgattgtacaattgcttctttaaaaaaggaagaaagaaagaaagaaaagaatcaacatcagcgttaacaaacggccccgttacggcccaaacggtcatatagagtaacggcgttaagcgttgaaagactcctatcgaaatacgtaaccgcaaacgtgtcatagtcagatcccctcttccttcaccgcctcaaacacaaaaataatcttctacagcctatatatacaacccccccttctatctctcctttctcacaattcatcatctttctttctctacccccaattttaagaaatcctctcttctcctcttcattttcaaggtaaatctctctctctctctctctctctgttattccttgttttaattaggtatgtattattgctagtttgttaatctgcttatcttatgtatgccttatgtgaatatctttatcttgttcatctcatccgtttagaagctataaatttgttgatttgactgtgtatctacacgtggttatgtttatatctaatcagatatgaatttcttcatattgttgcgtttgtgtgtaccaatccgaaatcgttgatttttttcatttaatcgtgtagctaattgtacgtatacatatggatctacgtatcaattgttcatctgtttgtgtttgtatgtatacagatctgaaaacatcacttctctcatctgattgtgttgttacatacatagatatagatctgttatatcattttttttattaattgtgtatatatatatgtgcatagatctggattacatgattgtgattatttacatgattttgttatttacgtatgtatatatgtagatctggactttttggagttgttgacttgattgtatttgtgtgtgtatatgtgtgttctgatcttgatatgttatgtatgtgcagcccaaacatgcagaggtttttctccgccagatcgattctcggttacgccgtcaagacgcggaggaggtctttctcttctcgttcttcgtctctcctttgctcttccatggcaatgattaattaacgaagagcaagagctcgaatttccccgatcgttcaaacatttggcaataaagtttcttaagattgaatcctgttgccggtcttgcgatgattatcatataatttctgttgaattacgttaagcatgtaataattaacatgtaatgcatgacgttatttatgagatgggtttttatgattagagtcccgcaattatacatttaatacgcgatagaaaacaaaatatagcgcgcaaactaggataaattatcgcgcgcggtgtcatctatgttactagatcgggaattggcatgcaagcttggcactggccgtcgttttacaacgtcgtgactgggaaaaccctggcgttacccaacttaatcgccttgcagcacatccccctttcgccagctggcgtaatagcgaagaggcccgcaccgatcgcccttcccaacagttgcgcagcctgaatggcgaatgctagagcagcttgagcttggatcagattgtcgtttcccgccttcagtttaaactatcagtgtttgacaggatatattggcgggtaaacctaagagaaaagagcgtttattagaataatcggatatttaaaagggcgtgaaaaggtttatccgttcgtccatttgtatgtgcatgccaaccacagggttcccctcgggatcaaagtactttgatccaacccctccgctgctatagtgcagtcggcttctgacgttcagtgcagccgtcttctgaaaacgacatgtcgcacaagtcctaagttacgcgacaggctgccgccctgcccttttcctggcgttttcttgtcgcgtgttttagtcgcataaagtagaatacttgcgactagaaccggagacattacgccatgaacaagagcgccgccgctggcctgctgggctatgcccgcgtcagcaccgacgaccaggacttgaccaaccaacgggccgaactgcacgcggccggctgcaccaagctgttttccgagaagatcaccggcaccaggcgcgaccgcccggagctggccaggatgcttgaccacctacgccctggcgacgttgtgacagtgaccaggctagaccgcctggcccgcagcacccgcgacctactggacattgccgagcgcatccaggaggccggcgcgggcctgcgtagcctggcagagccgtgggccgacaccaccacgccggccggccgcatggtgttgaccgtgttcgccggcattgccgagttcgagcgttccctaatcatcgaccgcacccggagcgggcgcgaggccgccaaggcccgaggcgtgaagtttggcccccgccctaccctcaccccggcacagatcgcgcacgcccgcgagctgatcgaccaggaaggccgcaccgtgaaagaggcggctgcactgcttggcgtgcatcgctcgaccctgtaccgcgcacttgagcgcagcgaggaagtgacgcccaccgaggccaggcggcgcggtgccttccgtgaggacgcattgaccgaggccgacgccctggcggccgccgagaatgaacgccaagaggaacaagcatgaaaccgcaccaggacggccaggacgaaccgtttttcattaccgaagagatcgaggcggagatgatcgcggccgggtacgtgttcgagccgcccgcgcacgtctcaaccgtgcggctgcatgaaatcctggccggtttgtctgatgccaagctggcggcctggccggccagcttggccgctgaagaaaccgagcgccgccgtctaaaaaggtgatgtgtatttgagtaaaacagcttgcgtcatgcggtcgctgcgtatatgatgcgatgagtaaataaacaaatacgcaaggggaacgcatgaaggttatcgctgtacttaaccagaaaggcgggtcaggcaagacgaccatcgcaacccatctagcccgcgccctgcaactcgccggggccgatgttctgttagtcgattccgatccccagggcagtgcccgcgattgggcggccgtgcgggaagatcaaccgctaaccgttgtcggcatcgaccgcccgacgattgaccgcgacgtgaaggccatcggccggcgcgacttcgtagtgatcgacggagcgccccaggcggcggacttggctgtgtccgcgatcaaggcagccgacttcgtgctgattccggtgcagccaagcccttacgacatatgggccaccgccgacctggtggagctggttaagcagcgcattgaggtcacggatggaaggctacaagcggcctttgtcgtgtcgcgggcgatcaaaggcacgcgcatcggcggtgaggttgccgaggcgctggccgggtacgagctgcccattcttgagtcccgtatcacgcagcgcgtgagctacccaggcactgccgccgccggcacaaccgttcttgaatcagaacccgagggcgacgctgcccgcgaggtccaggcgctggccgctgaaattaaatcaaaactcatttgagttaatgaggtaaagagaaaatgagcaaaagcacaaacacgctaagtgccggccgtccgagcgcacgcagcagcaaggctgcaacgttggccagcctggcagacacgccagccatgaagcgggtcaactttcagttgccggcggaggatcacaccaagctgaagatgtacgcggtacgccaaggcaagaccattaccgagctgctatctgaatacatcgcgcagctaccagagtaaatgagcaaatgaataaatgagtagatgaattttagcggctaaaggaggcggcatggaaaatcaagaacaaccaggcaccgacgccgtggaatgccccatgtgtggaggaacgggcggttggccaggcgtaagcggctgggttgcctgccggccctgcaatggcactggaacccccaagcccgaggaatcggcgtgagcggtcgcaaaccatccggcccggtacaaatcggcgcggcgctgggtgatgacctggtggagaagttgaaggccgcgcaggccgcccagcggcaacgcatcgaggcagaagcacgccccggtgaatcgtggcaagcggccgctgatcgaatccgcaaagaatcccggcaaccgccggcagccggtgcgccgtcgattaggaagccgcccaagggcgacgagcaaccagattttttcgttccgatgctctatgacgtgggcacccgcgatagtcgcagcatcatggacgtggccgttttccgtctgtcgaagcgtgaccgacgagctggcgaggtgatccgctacgagcttccagacgggcacgtagaggtttccgcagggccggccggcatggccagtgtgtgggattacgacctggtactgatggcggtttcccatctaaccgaatccatgaaccgataccgggaagggaagggagacaagcccggccgcgtgttccgtccacacgttgcggacgtactcaagttctgccggcgagccgatggcggaaagcagaaagacgacctggtagaaacctgcattcggttaaacaccacgcacgttgccatgcagcgtacgaagaaggccaagaacggccgcctggtgacggtatccgagggtgaagccttgattagccgctacaagatcgtaaagagcgaaaccgggcggccggagtacatcgagatcgagctagctgattggatgtaccgcgagatcacagaaggcaagaacccggacgtgctgacggttcaccccgattactttttgatcgatcccggcatcggccgttttctctaccgcctggcacgccgcgccgcaggcaaggcagaagccagatggttgttcaagacgatctacgaacgcagtggcagcgccggagagttcaagaagttctgtttcaccgtgcgcaagctgatcgggtcaaatgacctgccggagtacgatttgaaggaggaggcggggcaggctggcccgatcctagtcatgcgctaccgcaacctgatcgagggcgaagcatccgccggttcctaatgtacggagcagatgctagggcaaattgccctagcaggggaaaaaggtcgaaaaggtctctttcctgtggatagcacgtacattgggaacccaaagccgtacattgggaaccggaacccgtacattgggaacccaaagccgtacattgggaaccggtcacacatgtaagtgactgatataaaagagaaaaaaggcgatttttccgcctaaaactctttaaaacttattaaaactcttaaaacccgcctggcctgtgcataactgtctggccagcgcacagccgaagagctgcaaaaagcgcctacccttcggtcgctgcgctccctacgccccgccgcttcgcgtcggcctatcgcggccgctggccgctcaaaaatggctggcctacggccaggcaatctaccagggcgcggacaagccgcgccgtcgccactcgaccgccggcgcccacatcaaggcaccctgcctcgcgcgtttcggtgatgacggtgaaaacctctgacacatgcagctcccggagacggtcacagcttgtctgtaagcggatgccgggagcagacaagcccgtcagggcgcgtcagcgggtgttggcgggtgtcggggcgcagccatgacccagtcacgtagcgatagcggagtgtatactggcttaactatgcggcatcagagcagattgtactgagagtgcaccatatgcggtgtgaaataccgcacagatgcgtaaggagaaaataccgcatcaggcgctcttccgcttcctcgctcactgactcgctgcgctcggtcgttcggctgcggcgagcggtatcagctcactcaaaggcggtaatacggttatccacagaatcaggggataacgcaggaaagaacatgtgagcaaaaggccagcaaaaggccaggaaccgtaaaaaggccgcgttgctggcgtttttccataggctccgcccccctgacgagcatcacaaaaatcgacgctcaagtcagaggtggcgaaacccgacaggactataaagataccaggcgtttccccctggaagctccctcgtgcgctctcctgttccgaccctgccgcttaccggatacctgtccgcctttctcccttcgggaagcgtggcgctttctcatagctcacgctgtaggtatctcagttcggtgtaggtcgttcgctccaagctgggctgtgtgcacgaaccccccgttcagcccgaccgctgcgccttatccggtaactatcgtcttgagtccaacccggtaagacacgacttatcgccactggcagcagccactggtaacaggattagcagagcgaggtatgtaggcggtgctacagagttcttgaagtggtggcctaactacggctacactagaaggacagtatttggtatctgcgctctgctgaagccagttaccttcggaaaaagagttggtagctcttgatccggcaaacaaaccaccgctggtagcggtggtttttttgtttgcaagcagcagattacgcgcagaaaaaaaggatctcaagaagatcctttgatcttttctacggggtctgacgctcagtggaacgaaaactcacgttaagggattttggtcatgcattctaggtactaaaacaattcatccagtaaaatataatattttattttctcccaatcaggcttgatccccagtaagtcaaaaaatagctcgacatactgttcttccccgatatcctccctgatcgaccggacgcagaaggcaatgtcataccacttgtccgccctgccgcttctcccaagatcaataaagccacttactttgccatctttcacaaagatgttgctgtctcccaggtcgccgtgggaaaagacaagttcctcttcgggcttttccgtctttaaaaaatcatacagctcgcgcggatctttaaatggagtgtcttcttcccagttttcgcaatccacatcggccagatcgttattcagtaagtaatccaattcggctaagcggctgtctaagctattcgtatagggacaatccgatatgtcgatggagtgaaagagcctgatgcactccgcatacagctcgataatcttttcagggctttgttcatcttcatactcttccgagcaaaggacgccatcggcctcactcatgagcagattgctccagccatcatgccgttcaaagtgcaggacctttggaacaggcagctttccttccagccatagcatcatgtccttttcccgttccacatcataggtggtccctttataccggctgtccgtcatttttaaatataggttttcattttctcccaccagcttatataccttagcaggagacattccttccgtatcttttacgcagcggtatttttcgatcagttttttcaattccggtgatattctcattttagccatttattatttccttcctcttttctacagtatttaaagataccccaagaagctaattataacaagacgaactccaattcactgttccttgcattctaaaaccttaaataccagaaaacagctttttcaaagttgttttcaaagttggcgtataacatagtatcgacggagccgattttgaaaccgcggtgatcacaggcagcaacgctctgtcatcgttacaatcaacatgctaccctccgcgagatcatccgtgtttcaaacccggcagcttagttgccgttcttccgaatagcatcggtaacatgagcaaagtctgccgccttacaacggctctcccgctgacgccgtcccggactgatgggctgcctgtatcgagtggtgattttgtgccgagctgccggtcggggagctgttggctggctggtggcaggatatattgtggtgtaaacaaattgacgcttagacaacttaataacacattgcggacgtttttaatgtactgaattaacgccgaatta

SEQ ID NO: 3753 - protein, 33 aa, Artificial Sequence
  Synthetic Construct
MQRFFSARSILGYAVKTRRRSFSSRSSSLLCSS

SEQ ID NO: 3754 - DNA, 31 bp, Artificial Sequence
  amplification of the targeting sequence of the gene IVD from Arabidopsis thaliana to generate targeting vectors
atagtttaaacatgcagaggtttttctccgc

SEQ ID NO: 3755 - DNA, 36 bp, Artificial SequenceSequence
  amplification of the targeting sequence of the gene IVD from Arabidopsis thaliana to generate targeting vectors
ataccatggaagagcaaaggagagacgaagaacgag

SEQ ID NO: 3756 - DNA, 89 bp, Arabidopsis thaliana
atgcagaggtttttctccgccagatcgattctcggttacgccgtcaagacgcggaggaggtctttctcttctcgttcttcgtctctcct

1. A method for producing a plant with increased yield as compared to a corresponding wild type plant comprising at least the following step: increasing or generating in a plant or a part thereof one or more activities selected from the group consisting of 30S ribosomal protein S11, 60S ribosomal protein, Adaptin medium chain homolog APM2, B0252-protein, BRICK1-like protein, Cav1 protein, Chloroplast chaperonin, DNA polymerase, flagellar protein, G2/mitotic-specific cyclin, GRE1-protein(Hydrophilin), Membrane protein, ORF YPL249c-a, RNA polymerase II holoenzyme cyclin-like subunit, Serine/threonine-protein kinase, Short chain dehydrogenase, Sterol-C-methyltransferase, transcription regulator (farR), Ykr015c-protein, and YPL167C_{—}2-protein.

2. A method for producing a plant with increased yield as compared to a corresponding wild type plant comprising at least one of the steps selected from the group consisting of:
(i) increasing or generating the activity of a polypeptide comprising a polypeptide, a consensus sequence or at least one polypeptide motif as depicted in column 5 or 7 of table II or of table IV, respectively;
(ii) increasing or generating the activity of an expression product of a nucleic acid molecule comprising a polynucleotide as depicted in column 5 or 7 of table I, and (iii) increasing or generating the activity of a functional equivalent of (i) or (ii).

3. The method of claim 1, comprising
(i) increasing or generating of the expression of; and/or
(ii) increasing or generating the expression of an expression product; and/or
(iii) increasing or generating one or more activities of an expression product encoded by;
at least one nucleic acid molecule comprising a nucleic acid molecule selected from the group consisting of:
(a) a nucleic acid molecule encoding the polypeptide shown in column 5 or 7 of table II;
(b) a nucleic acid molecule shown in column 5 or 7 of table I;
(c) a nucleic acid molecule, which, as a result of the degeneracy of the genetic code, can be derived from a polypeptide sequence depicted in column 5 or 7 of table II and confers an increased yield as compared to a corresponding non-transformed wild type plant cell, a transgenic plant or a part thereof ;
(d) a nucleic acid molecule having at least around 30% identity with the nucleic acid molecule sequence of a polynucleotide comprising the nucleic acid molecule shown in column 5 or 7 of table I and confers an increased yield as compared to a corresponding non-transformed wild type plant cell, a transgenic plant or a part thereof;
(e) a nucleic acid molecule encoding a polypeptide having at least around 30% identity with the amino acid sequence of the polypeptide encoded by the nucleic acid molecule of (a) to (c) and having the activity represented by a nucleic acid molecule comprising a polynucleotide as depicted in column 5 of table I and confers an increased yield as compared to a corresponding non-transformed wild type plant cell, a transgenic plant or a part thereof;
(f) a nucleic acid molecule which hybridizes with a nucleic acid molecule of (a) to (c) under stringent hybridization conditions and confers an increased yield as compared to a corresponding non-transformed wild type plant cell, a transgenic plant or a part thereof;
(g) a nucleic acid molecule encoding a polypeptide which can be isolated with the aid of monoclonal or polyclonal antibodies made against a polypeptide encoded by one of the nucleic acid molecules of (a) to (e) and having the activity represented by the nucleic acid molecule comprising a polynucleotide as depicted in column 5 of table I;
(h) a nucleic acid molecule encoding a polypeptide comprising the consensus sequence or one or more polypeptide motifs as shown in column 7 of table IV and having the activity represented by a nucleic acid molecule comprising a polynucleotide as depicted in column 5 of table II or IV;
(i) a nucleic acid molecule encoding a polypeptide having the activity represented by a protein as depicted in column 5 of table II and conferring increased yield as compared to a corresponding non-transformed wild type plant cell, a transgenic plant or a part thereof;
(j) a nucleic acid molecule which comprises a polynucleotide, which is obtained by amplifying a cDNA library or a genomic library using the primers in column 7 of table III and having the activity represented by a nucleic acid molecule comprising a polynucleotide as depicted in column 5 of table II or IV; and
k) a nucleic acid molecule which is obtainable by screening a suitable nucleic acid library under stringent hybridization conditions with a probe comprising a complementary sequence of a nucleic acid molecule of (a) or (b) or with a fragment thereof, having at least around 50 nt of a nucleic acid molecule complementary to a nucleic acid molecule sequence characterized in (a) to (e) and encoding a polypeptide having the activity represented by a protein comprising a polypeptide as depicted in column 5 of table II.

4. A method for producing a transgenic plant with increased yield as compared to a corresponding non-transformed wild type plant, comprising transforming a plant cell or a plant cell nucleus or a plant tissue with a nucleic acid molecule comprising a nucleic acid molecule selected from the group consisting of:
(a) a nucleic acid molecule encoding the polypeptide shown in column 5 or 7 of table II;
(b) a nucleic acid molecule shown in column 5 or 7 of table I;
(c) a nucleic acid molecule, which, as a result of the degeneracy of the genetic code, can be derived from a polypeptide sequence depicted in column 5 or 7 of table II and confers an increased yield as compared to a corresponding non-transformed wild type plant cell, a transgenic plant or a part thereof ;
(d) a nucleic acid molecule having at least around 30% identity with the nucleic acid molecule sequence of a polynucleotide comprising the nucleic acid molecule shown in column 5 or 7 of table I and confers an increased yield as compared to a corresponding non-transformed wild type plant cell, a transgenic plant or a part thereof;
(e) a nucleic acid molecule encoding a polypeptide having at least around 30% identity with the amino acid sequence of the polypeptide encoded by the nucleic acid molecule of (a) to (c) and having the activity represented by a nucleic acid molecule comprising a polynucleotide as depicted in column 5 of table I and confers an increased yield as compared to a corresponding non-transformed wild type plant cell, a transgenic plant or a part thereof;
(f) a nucleic acid molecule which hybridizes with a nucleic acid molecule of (a) to (c) under stringent hybridization conditions and confers an increased yield as compared to a corresponding non-transformed wild type plant cell, a transgenic plant or a part thereof;
(g) a nucleic acid molecule encoding a polypeptide which can be isolated with the aid of monoclonal or polyclonal antibodies made against a polypeptide encoded by one of the nucleic acid molecules of (a) to (e) and having the activity represented by the nucleic acid molecule comprising a polynucleotide as depicted in column 5 of table I;
(h) a nucleic acid molecule encoding a polypeptide comprising the consensus sequence or one or more polypeptide motifs as shown in column 7 of table IV and having the activity represented by a nucleic acid molecule comprising a polynucleotide as depicted in column 5 of table II or IV;
(i) a nucleic acid molecule encoding a polypeptide having the activity represented by a protein as depicted in column 5 of table II and conferring increased yield as compared to a corresponding non-transformed wild type plant cell, a transgenic plant or a part thereof;
(j) a nucleic acid molecule which comprises a polynucleotide, which is obtained by amplifying a cDNA library or a genomic library using the primers in column 7 of table III and having the activity represented by a nucleic acid molecule comprising a polynucleotide as depicted in column 5 of table II or IV; and
k) a nucleic acid molecule which is obtainable by screening a suitable nucleic acid library under stringent hybridization conditions with a probe comprising a complementary sequence of a nucleic acid molecule of (a) or (b) or with a fragment thereof, having at least around 50 nt of a nucleic acid molecule complementary to a nucleic acid molecule sequence characterized in (a) to (e) and encoding a polypeptide having the activity represented by a protein comprising a polypeptide as depicted in column 5 of table II,
and regenerating a transgenic plant from that transformed plant cell nucleus, plant cell or plant tissue with increased yield.

5. The method of claim 2, wherein the one or more activities increased or generated is 30S ribosomal protein S11, 60S ribosomal protein, Adaptin medium chain homolog APM2, B0252-protein, BRICK1-like protein, Cav1 protein, Chloroplast chaperonin, DNA polymerase, flagellar protein, G2/mitotic-specific cyclin, GRE1-protein(Hydrophilin), Membrane protein, ORF YPL249c-a, RNA polymerase II holoenzyme cyclin-like subunit, Serine/threonine-protein kinase, Short chain dehydrogenase, Sterol-C-methyltransferase, transcription regulator (farR), Ykr015c-protein, or YPL167C_{—}2-protein, respectively.

6. The method of claim 2 resulting in increased yield compared to a corresponding non-transformed wild type plant under standard growth conditions.

7. An isolated nucleic acid molecule comprising a nucleic acid molecule selected from the group consisting of:
(a) a nucleic acid molecule encoding the polypeptide shown in column 5 or 7 of table II B;
(b) a nucleic acid molecule shown in column 5 or 7 of table I B;
(c) a nucleic acid molecule, which, as a result of the degeneracy of the genetic code, can be derived from a polypeptide sequence depicted in column 5 or 7 of table II and confers increased yield as compared to a corresponding non-transformed wild type plant cell, a transgenic plant or a part thereof;
(d) a nucleic acid molecule having at least about 30% identity with the nucleic acid molecule sequence of a polynucleotide comprising the nucleic acid molecule shown in column 5 or 7 of table I and conferring increased yield as compared to a corresponding non-transformed wild type plant cell, a transgenic plant or a part thereof;
(e) a nucleic acid molecule encoding a polypeptide having at least about 30% identity with the amino acid sequence of the polypeptide encoded by the nucleic acid molecule of (a) to (c) and having the activity represented by a nucleic acid molecule comprising a polynucleotide as depicted in column 5 of table I and confers increased yield as compared to a corresponding non-transformed wild type plant cell, a transgenic plant or a part thereof;
(f) nucleic acid molecule which hybridizes with a nucleic acid molecule of (a) to (c) under stringent hybridization conditions and confers increased yield as compared to a corresponding non-transformed wild type plant cell, a transgenic plant or a part thereof;
(g) a nucleic acid molecule encoding a polypeptide which can be isolated with the aid of monoclonal or polyclonal antibodies made against a polypeptide encoded by one of the nucleic acid molecules of (a) to (e) and having the activity represented by the nucleic acid molecule comprising a polynucleotide as depicted in column 5 of table I;
(h) a nucleic acid molecule encoding a polypeptide comprising the consensus sequence or one or more polypeptide motifs as shown in column 7 of table IV and preferably having the activity represented by a nucleic acid molecule comprising a polynucleotide as depicted in column 5 of table II or IV;
(i) a nucleic acid molecule encoding a polypeptide having the activity represented by a protein as depicted in column 5 of table II and confers an increased yield as compared to a corresponding non-transformed wild type plant cell, a transgenic plant or a part thereof;
(j) a nucleic acid molecule which comprises a polynucleotide, which is obtained by amplifying a cDNA library or a genomic library using the primers in column 7 of table III and having the activity represented by a nucleic acid molecule comprising a polynucleotide as depicted in column 5 of table II or IV; and
(k) a nucleic acid molecule which is obtainable by screening a suitable nucleic acid library under stringent hybridization conditions with a probe comprising a complementary sequence of a nucleic acid molecule of (a) or (b) or with a fragment thereof, having at least 50 nt, of a nucleic acid molecule complementary to a nucleic acid molecule sequence characterized in (a) to (e) and encoding a polypeptide having the activity represented by a protein comprising a polypeptide as depicted in column 5 of table II.

8. The nucleic acid molecule of claim 7, whereby the nucleic acid molecule according to (a) to (k) is at least in one or more nucleotides different from the sequence depicted in column 5 or 7 of table I A and encodes a protein which differs at least in one or more amino acids from the protein sequences depicted in column 5 or 7 of table II A.

9. A nucleic acid construct which confers the expression of said nucleic acid molecule of claim 7, comprising one or more regulatory elements.

10. A vector comprising the nucleic acid molecule of claim 7 or a nucleic acid construct which confers the expression of said nucleic acid molecule comprising one or more regulatory elements.

11. A process for producing a polypeptide, comprising expressing a polypeptide encoded by the nucleic acid molecule of claim 7 in a host nucleus or host cell.

12. A polypeptide comprising a polypeptide encoded by the nucleic acid molecule as of claim 7.

13. An antibody, which binds specifically to the polypeptide of claim 12.

14. A plant cell nucleus, plant cell, plant tissue, propagation material, pollen, progeny, harvested material or a plant comprising the nucleic acid molecule of claim 7.

15. A transgenic plant cell nucleus, a plant cell, a plant tissue, propagation material, seed, pollen, progeny, or a plant part, resulting in a plant with increased yield after regeneration; or a plant with increased yield; or a part thereof; with said yield increased as compared to a corresponding wild type produced by the method of claim 1.

16. The transgenic plant cell nucleus, transgenic plant cell, transgenic plant or part thereof of claim 15 derived from a monocotyledonous plant.

17. The transgenic plant cell nucleus, transgenic plant cell, transgenic plant or part thereof of claim 15 derived from a dicotyledonous plant.

18. The transgenic plant cell nucleus, transgenic plant cell, transgenic plant or part thereof of claim 15, wherein the corresponding plant is selected from the group consisting of corn (maize), wheat, rye, oat, triticale, rice, barley, soybean, peanut, cotton, oil seed rape, including canola and winter oil seed rape, manihot, pepper, sunflower, flax, borage, safflower, linseed, primrose, rapeseed, turnip rape, tagetes, solanaceous plants comprising potato, tobacco, eggplant, tomato; Vicia species, pea, alfalfa, coffee, cacao, tea, Salix species, oil palm, coconut, perennial grass, forage crops and Arabidopsis thaliana.

19. The transgenic plant cell nucleus, transgenic plant cell, transgenic plant or part thereof of claim 15, wherein the plant is selected from the group consisting of corn, soy, oil seed rape, (canola, winter oil seed rape, cotton, wheat, and rice.

20. A transgenic plant comprising one or more of plant cell nuclei or plant cells, progeny, seed or pollen of produced by the transgenic plant of claim 14.

21. A transgenic plant, transgenic plant cell nucleus, transgenic plant cell, plant comprising one or more of such transgenic plant cell nuclei or plant cells, progeny, seed or pollen derived from or produced by a transgenic plant produced by the method of claim 6, wherein said transgenic plant, transgenic plant cell nucleus, transgenic plant cell, plant comprising one or more of such transgenic plant cell nuclei or plant cells, progeny, seed or pollen is genetically homozygous for a transgene conferring increased yield as compared to a corresponding non-transformed wild type plant cell, a transgenic plant or a part thereof

22. A process for the identification of a compound conferring increased yield as compared to a corresponding non-transformed wild type plant cell, a transgenic plant or a part thereof in a plant cell, a transgenic plant or a part thereof, a transgenic plant or a part thereof, comprising the steps:
(a) culturing a plant cell; a transgenic plant or a part thereof expressing the polypeptide of claim 12 and a readout system capable of interacting with the polypeptide under suitable conditions which permit the interaction of the polypeptide with said readout system in the presence of a compound or a sample comprising a plurality of compounds and capable of providing a detectable signal in response to the binding of a compound to said polypeptide under conditions which permit the expression of said readout system and of the polypeptide of claim 12;
(b) identifying if the compound is an effective agonist by detecting the presence or absence or increase of a signal produced by said readout system.

23. A method for the production of an agricultural composition comprising the steps of the method of claim 22 and formulating the compound identified in claim 22 in a form acceptable for an application in agriculture.

24. A composition comprising the nucleic acid molecule of claim 7, a nucleic acid construct of which confers expression of said nucleic acid molecule comprising one or more regulatory elements, a vector comprising said nucleic acid molecule or said nucleic acid construct, a polypeptide encoded by said nucleic acid molecule, and optionally an agriculturally acceptable carrier.

25. The polypeptide of claim 12, wherein the nucleic acid molecule is selected from yeast or E. coli.

26. (canceled)

27. A method for identification or selection of a plant with increased yield as compared to a corresponding non-transformed wild type plant or for detection of yield increase in plants or plant cells, comprising utilizing the nucleic acid molecule of claim 7 or a part thereof as a marker for identifying or selecting a plant with increased yield, or for detecting yield increase in a plant.

28. (canceled)

29. A method for the identification of a plant with an increased yield comprising screening a population of one or more plant cell nuclei, plant cells, plant tissues or plants or parts thereof for an activity selected from the group consisting of 30S ribosomal protein S11, 60S ribosomal protein, Adaptin medium chain homolog APM2, B0252-protein, BRICK1-like protein, Cav1 protein, Chloroplast chaperonin, DNA polymerase, flagellar protein, G2/mitotic-specific cyclin, GRE1-protein(Hydrophilin), Membrane protein, ORF YPL249c-a, RNA polymerase II holoenzyme cyclin-like subunit, Serine/threonine-protein kinase, Short chain dehydrogenase, Sterol-C-methyltransferase, transcription regulator (farR), Ykr015c-protein, and YPL167C_{—}2-protein, comparing the level of activity with the activity level in a reference;
identifying one or more plant cell nuclei, plant cells, plant tissues or plants or parts thereof with the activity increased compared to the reference, optionally producing a plant from the identified plant cell nuclei, cell or tissue.

30. A method for the identification of a plant with an increased yield comprising screening a population of one or more plant cell nuclei, plant cells, plant tissues or plants or parts thereof for the expression level of an nucleic acid coding for an polypeptide conferring an activity selected from the group consisting of 30S ribosomal protein S11, 60S ribosomal protein, Adaptin medium chain homolog APM2, B0252-protein, BRICK1-like protein, Cav1 protein, Chloroplast chaperonin, DNA polymerase, flagellar protein, G2/mitotic-specific cyclin, GRE1-protein(Hydrophilin), Membrane protein, ORF YPL249c-a, RNA polymerase II holoenzyme cyclin-like subunit, Serine/threonine-protein kinase, Short chain dehydrogenase, Sterol-C-methyltransferase, transcription regulator (farR), Ykr015c-protein, and YPL167C_{—}2-protein, comparing the level of expression with a reference; identifying one or more plant cell nuclei, plant cells, plant tissues or plants or parts thereof with the expression level increased compared to the reference, optionally producing a plant from the identified plant cell nuclei, cell or tissue.

31. The plant of claim 14, wherein said plant shows an improved yield-related trait.

32. The plant of claim 14, wherein said plant shows an improved nutrient use efficiency and/or abiotic stress tolerance.

33. The plant of claim 14, wherein said plant shows an improved increased low temperature tolerance.

34. The plant of claim 14, wherein the plant shows an increase of harvestable yield.

35. The plant of claim 34, wherein the yield increase is calculated on a per plant basis or in relation to a specific arable area.
